United States Patent Application Publication US 2011/0183924 A1 - sequence listing, part 154

SEQ ID NO: 402855 - DNA, 1855 bp, Homo sapiens
aacagagactgtggttgctgcggatggagggaccgctgatggtggctttgccttctccccggcagatctgtatcttcgtcggggagacgctgctgttttctaactgggccatcactgcagacatcctcatgtacgtggtcatccccacgcggcgcgccactgccgtggccttgcagagcttcacctcccacctgctgggggacgccgggagcccctacctcattggctttggtgaaccagctggcgatgccgcccgcatctgtgaaagtctgaggtggtgccattgggacaatgaagaacccacactcccacctcgtctgggaggtgtcctacagcgtccgggaccggctgggctgccccaaagctttctgtgtgatccacggctaggcacccaccctctctggcccaggcctgctgagtggccctggcatcaagaagaggctgtgtcctcagttaccctggaaggatgtgtgtgttggagccacacggttggacaggttcccagccctaggtttgggccgcagggccctggggccaaggaagaagacagccccaagtgggtgtccggggagagcctggcctgccaccagcttatgtgatcttgggcaagtccctgccctccctggaacgaagggccagggggctggactttcccacacaacttgctgggcaaagcacgatctgcagctttgaagactcaacagaccctggaccatacggagagcaggtggcccaggcctcagggcggcagtcccggctttgaggctcacgcgagggcctggtatgcagggaccactgctcagctgggcctcggaccttggggatattggacgcaacctggcaaatgaagctgggcgcccaagtctctgggtactccctggaggacactgtctcactgtctcgggttggctcccagcctggaggtcccagatggggactgttctgacaagctggcatcaccaggggtgaaggccctggctgcagctgtacaccacctgtgcccccaggctcaaggtctctggcaggtgcacaccagcccaactctgcagggcttctctccctgccaccaccccccaagccaggaccccactccttccccgaggctgagctgagccttttccaggggcagggcccaggagaccattcccagaatccatggggcagtagccagggctccggctgctggaggaagcagctatccacaaagcttcctgccccagagctgaggctgaggccccgggagaggcggcccctacccaaacactggctgctggcattccaccaagtgaccccaggggccaggccttcgatcacccacctcccatccatgcacacaccaggatgcagctgccaacttcacaccagccccaacccgctttgggggagcttagccccctgcgtcacccactccctgcacttctgctgcaatcaaggtggttctggtgcgggggtggggtggggggtgaggccttgtggccaatgggggaccccccaagagccagcttggacaatgctcttcttgccccttagttactggctggctgtggcttcagtggtgtgtaagcaggtggaatactcacccaccaagctctggggtaccccgagggcctgacaagaggatggggtgggggtggcatcctccaaagaccagcctccacccccactccagcctcagcggggccccagcgatgttttcttgttgtacaagaaccaggtccgagtgttgcctcctcttccttccggaagccaaactgctcctttattttttagagctgctgattgtgaatctcagagtcttaagagagaagccaaatatattcctcttgtaaatgaagaaataaacctatttaaatca

SEQ ID NO: 402856 - DNA, 2765 bp, Homo sapiens
aacagagactgtggttgctgcggatggagggaccgctgatggtggctttgccttctccccggcagatctgtatcttcgtcggggagacgctgctgttttctaactgggccatcactgcagacatcctcatgtacgtggtcatccccacgcggcgcgccactgccgtggccttgcagagcttcacctcccacctgctgggggacgccgggagcccctacctcattggctttatctcagacctgatccgccagagcactaaggactccccgctctgggagttcctgagcctgggctacgcgctcatgctctgccctttcgtcgtggtcctgggcggcatgttcttcctcgccactgcgctcttcttcgtcagcgaccgcgccagggctgagcagcaggtgaaccagctggcgatgccgcccgcatctgtgaaagtctgaggtggtgccattgggacaatgaagaacccacactcccacctcgtctgggaggtgtcctacagcgtccgggaccggctgggctgccccaaagctttctgtgtgatccacggctaggcacccaccctctctggcccaggcctgctgagtggccctggcatcaagaagaggctgtgtcctcagttaccctggaaggatgtgtgtgttggagccacacggttggacaggttcccagccctaggtttgggccgcagggccctggggccaaggaagaagacagccccaagtgggtgtccggggagagcctggcctgccaccagcttatgtgatcttgggcaagtccctgccctccctggaacgaagggccagggggctggactttcccacacaacttgctgggcaaagcacgatctgcagctttgaagactcaacagaccctggaccatacggagagcaggtggcccaggcctcagggcggcagtcccggctttgaggctcacgcgagggcctggtatgcagggaccactgctcagctgggcctcggaccttggggatattggacgcaacctggcaaatgaagctgggcgcccaagtctctgggtactccctggaggacactgtctcactgtctcgggttggctcccagcctggaggtcccagatggggactgttctgacaagctggcatcaccaggggtgaaggccctggctgcagctgtacaccacctgtgcccccaggctcaaggtctctggcaggtgcacaccagcccaactctgcagggcttctctccctgccaccaccccccaagccaggaccccactccttccccgaggctgagctgagccttttccaggggcagggcccaggagaccattcccagaatccatggggcagtagccagggctccggctgctggaggaagcagctatccacaaagcttcctgccccagagctgaggctgaggccccgggagaggcggcccctacccaaacactggctgctggcattccaccaagtgaccccaggggccaggccttcgatcacccacctcccatccatgcacacaccaggatgcagctgccaacttcacaccagccccaacccgctttgggggagcttagccccctgcgtcacccactccctgcacttctgctgcaatcaaggtggttctggtgcgggggtggggtggggggtgaggccttgtggccaatgggggaccccccaagagccagcttggacaatgctcttcttgccccttagttactggctggctgtggcttcagtggtgtgtaagcaggtggaatactcacccaccaagctctggggtaccccgagggcctgacaagaggatggggtgggggtggcatcctccaaagaccagcctccacccccactccagcctcagcggggccccagcgatgttttcttgttgtacaagaaccaggtccgagtgttgcctcctcttccttccggaagccaaactgctcctttattttttagagctgctgattgtgaatctcagagtcttaagagagaagccaaatatattcctcttgtaaatgaagaaataaacctatttaaatcaccccctggtggctccctcacagcaaaaaagcctgggggcaaagaggtggcaggcacgagagatggtcacacctgcctgcagccagcacatcaacctgcaccaacccaggcaaacaccagagccctggacatggccctggagccagggtcccagcccagaaccgggggtggggaggtctctgcaccctgggacccctgcaggaatggctcaggctgtgcttgccagagcaggatgcccgggcaggcggcaacagccaccctccccagtggcagcgccttagaaacagcttgcgtattaaaatcatggtttaaaaaaaaaaaaaaaaataggcgtctcaggcagatggaggcaggggctgaggggggcccgtacctgtgctcagggcttccctgccttcctcacctgtgctttcttcttggccccactctgaagcaggctgggactcctgatgaccaaagacagccttgcctttttccgtgccagcgcggacagtggtgatttgcccaagaccccctttttgggaagagccttctgatgctgcttttggcctgcaggttccgtgggggacccgggagctccattcacctgggacggcttctggtttttcttctgcagttttggggatttggcaggggtgctggggctccgggtgggggcgccaggggctggactcttggtggttggcgtcccgtttgcctgggctgggaccttagcctttgtcctgttcctcttcttcctgcccatgc

SEQ ID NO: 402857 - DNA, 2078 bp, Homo sapiens
gccctgggcatgtggatcccgctctacctgcaccgcgcccaagttgtgcagaagacagcagagacgtgcaacagcccgccctgtggggccaaggacagcctcatctttggggccatcacctgctttacgggatttctgggcgtggtcacgggggcaggagccacgcgctggtgccgcctgaagacccagcgggccgacccactggtgtgtgccgtgggcatgctgggctctgccatcttcatctgcctgatcttcgtggctgccaagagcagcatcgtaggagcctatatctgtatcttcgtcggggagacgctgctgttttctaactgggccatcactgcagacatcctcatgtacgtggtcatccccacgcggcgcgccactgccgtggccttgcagagcttcacctcccacctgctgggggacgccgggagcccctacctcattggctttggtgaaccagctggcgatgccgcccgcatctgtgaaagtctgaggtggtgccattgggacaatgaagaacccacactcccacctcgtctgggaggtgtcctacagcgtccgggaccggctgggctgccccaaagctttctgtgtgatccacggctaggcacccaccctctctggcccaggcctgctgagtggccctggcatcaagaagaggctgtgtcctcagttaccctggaaggatgtgtgtgttggagccacacggttggacaggttcccagccctaggtttgggccgcagggccctggggccaaggaagaagacagccccaagtgggtgtccggggagagcctggcctgccaccagcttatgtgatcttgggcaagtccctgccctccctggaacgaagggccagggggctggactttcccacacaacttgctgggcaaagcacgatctgcagctttgaagactcaacagaccctggaccatacggagagcaggtggcccaggcctcagggcggcagtcccggctttgaggctcacgcgagggcctggtatgcagggaccactgctcagctgggcctcggaccttggggatattggacgcaacctggcaaatgaagctgggcgcccaagtctctgggtactccctggaggacactgtctcactgtctcgggttggctcccagcctggaggtcccagatggggactgttctgacaagctggcatcaccaggggtgaaggccctggctgcagctgtacaccacctgtgcccccaggctcaaggtctctggcaggtgcacaccagcccaactctgcagggcttctctccctgccaccaccccccaagccaggaccccactccttccccgaggctgagctgagccttttccaggggcagggcccaggagaccattcccagaatccatggggcagtagccagggctccggctgctggaggaagcagctatccacaaagcttcctgccccagagctgaggctgaggccccgggagaggcggcccctacccaaacactggctgctggcattccaccaagtgaccccaggggccaggccttcgatcacccacctcccatccatgcacacaccaggatgcagctgccaacttcacaccagccccaacccgctttgggggagcttagccccctgcgtcacccactccctgcacttctgctgcaatcaaggtggttctggtgcgggggtggggtggggggtgaggccttgtggccaatgggggaccccccaagagccagcttggacaatgctcttcttgccccttagttactggctggctgtggcttcagtggtgtgtaagcaggtggaatactcacccaccaagctctggggtaccccgagggcctgacaagaggatggggtgggggtggcatcctccaaagaccagcctccacccccactccagcctcagcggggccccagcgatgttttcttgttgtacaagaaccaggtccgagtgttgcctcctcttccttccggaagccaaactgctcctttattttttagagctgctgattgtgaatctcagagtcttaagagagaagccaaatatattcctcttgtaaatgaagaaataaacctatttaaatca

SEQ ID NO: 402858 - DNA, 2330 bp, Homo sapiens
gccctgggcatgtggatcccgctctacctgcaccgcgcccaagttgtgcagaagacagcagagacgtgcaacagcccgccctgtggggccaaggacagcctcatctttggggccatcacctgctttacgggatttctgggcgtggtcacgggggcaggagccacgcgctggtgccgcctgaagacccagcgggccgacccactggtgtgtgccgtgggcatgctgggctctgccatcttcatctgcctgatcttcgtggctgccaagagcagcatcgtaggagcctatatctgtatcttcgtcggggagacgctgctgttttctaactgggccatcactgcagacatcctcatgtacgtggtcatccccacgcggcgcgccactgccgtggccttgcagagcttcacctcccacctgctgggggacgccgggagcccctacctcattggctttgtgagtagccccggggtggggctggccgggggaggctgggggactgcaggagggctctgccctgacatccacccccaaatcctcgcagatctcagacctgatccgccagagcactaaggactccccgctctgggagttcctgagcctgggctacgcgctcatgctctgccctttcgtcgtggtcctgggcggcatgttcttcctcgccactgcgctcttcttcgtcagcgaccgcgccagggctgagcagcaggtgaaccagctggcgatgccgcccgcatctgtgaaagtctgaggtggtgccattgggacaatgaagaacccacactcccacctcgtctgggaggtgtcctacagcgtccgggaccggctgggctgccccaaagctttctgtgtgatccacggctaggcacccaccctctctggcccaggcctgctgagtggccctggcatcaagaagaggctgtgtcctcagttaccctggaaggatgtgtgtgttggagccacacggttggacaggttcccagccctaggtttgggccgcagggccctggggccaaggaagaagacagccccaagtgggtgtccggggagagcctggcctgccaccagcttatgtgatcttgggcaagtccctgccctccctggaacgaagggccagggggctggactttcccacacaacttgctgggcaaagcacgatctgcagctttgaagactcaacagaccctggaccatacggagagcaggtggcccaggcctcagggcggcagtcccggctttgaggctcacgcgagggcctggtatgcagggaccactgctcagctgggcctcggaccttggggatattggacgcaacctggcaaatgaagctgggcgcccaagtctctgggtactccctggaggacactgtctcactgtctcgggttggctcccagcctggaggtcccagatggggactgttctgacaagctggcatcaccaggggtgaaggccctggctgcagctgtacaccacctgtgcccccaggctcaaggtctctggcaggtgcacaccagcccaactctgcagggcttctctccctgccaccaccccccaagccaggaccccactccttccccgaggctgagctgagccttttccaggggcagggcccaggagaccattcccagaatccatggggcagtagccagggctccggctgctggaggaagcagctatccacaaagcttcctgccccagagctgaggctgaggccccgggagaggcggcccctacccaaacactggctgctggcattccaccaagtgaccccaggggccaggccttcgatcacccacctcccatccatgcacacaccaggatgcagctgccaacttcacaccagccccaacccgctttgggggagcttagccccctgcgtcacccactccctgcacttctgctgcaatcaaggtggttctggtgcgggggtggggtggggggtgaggccttgtggccaatgggggaccccccaagagccagcttggacaatgctcttcttgccccttagttactggctggctgtggcttcagtggtgtgtaagcaggtggaatactcacccaccaagctctggggtaccccgagggcctgacaagaggatggggtgggggtggcatcctccaaagaccagcctccacccccactccagcctcagcggggccccagcgatgttttcttgttgtacaagaaccaggtccgagtgttgcctcctcttccttccggaagccaaactgctcctttattttttagagctgctgattgtgaatctcagagtcttaagagagaagccaaatatattcctcttgtaaatgaagaaataaacctatttaaatca

SEQ ID NO: 402859 - DNA, 873 bp, Homo sapiens
ttcctttcctcattcaacatccccgcatttcaaggctctctaccagcatttctttgttcattgttcagaaaaaaatgaatcaagccatgactagaggcttgaattcaacctttaaaaaattgtatggctcaaagggtctctatccaagtttttcccaaaagattattctccaaggaaaaaagaaaacaaaatggctaaatcgcaacattttttcagtctccattatcccacggctctctttaccccttgagacacacaatcttcaatagtaaacagggctgaagtttgagggcaaggcctagagaagctgtttaatttctaccccaaagacaaactcagattctttcacaattttccctcaggccagccctctgctttatagggccaaaccactgaaagaacaaatgaatgcgaacaatttgcctcccagcagcgagcactaagatttcctacagatacgaattcccaagcaaaccctgcccaaagataatacaaatgaaggttgggtttatcgggctttttaaagggtggctgcctgatcttctttaggatctgaatatgtttacacggggattggcggggcgcttactgacagagcagttttagaaaacaaacacaggccccagaacactcatcagtctgcagcggctcggccgctcattccacaaatactcactgtgcatccaccatgcgcagccactgtgtgtggtgctgtgggggacagaatgacaatgtgtcttgggaggtggcctcagctataggtagggaggacagggcttctgtcccaaatggtaaatgtcatagagtgggggtgtcaccgagtgtgggggtattacagagttaggccaagaggtgggatctgaggtagacctc

SEQ ID NO: 402860 - DNA, 608 bp, Homo sapiens
atgaactgtgactccatttgaaagagagatacccagagaggccaggccttacccagagatcaaggtggcagcattggagctgggttttgacaggcacagctgcaaatgctcacaggaccagcagcattggaaaagtaatcaccagagccctccacgaagcccctgatgggatagatcggacttaagaacaacagtatcaacaaagagaattttcaggaaaagaagctctgccttgcttgtttaattaaaaaagaagatatatgggaagacattttgcagaatgcctttttagaaaggcaaaaaaaaaaaaaaagaaagaaaattcctcctacctaaagtaaaacatcaacactcttgaatagaaaagaatttagattctgaactaaatggtttaatgagggacagataataagtgtgaattgaaactaattggtgtttcagatcactgagctggttgaaaaaccatttgtgatgaggtctgtataagttaacagtcgcttttaaatgcccaattaaacatcgttctgtccctagtgagaataaaaaaatgtattgttgcttattgctctatacttaaccaaatgattaaagtgggtaatctgaacaga

SEQ ID NO: 402861 - DNA, 338 bp, Homo sapiens
  misc_feature (306)..(306): n is a, c, g, or t
  misc_feature (315)..(315): n is a, c, g, or t
gaccgtaagaattcctacttcaaaccctcagacctcaaataactgccagaactacttgactgaggtatcaacctatgttatctcctccatcagaaagcccatgatattgacataaaagtggctgttgctgtgttggacacttgctcccatctattttcttctctagaatccactgccctggaatgagtcattttttttagaagcagaggtggagccactgaggaagcacaggcgagccctccccagcgtgtactcactggtccccaacagaagaacagctgccgcatccactgaggggctcagtgnatgggcggngtccaacctctggtgctgaatca

SEQ ID NO: 402862 - DNA, 415 bp, Homo sapiens
tatcacctggagatagatggattcccagacccaccaaatctaggttttagaccaaaaaagaatgttttattattagaattgagtatatctcaggtcctctttcattactacaacacaaaataaatctgggggccaggaacggtggctcacacctgtaatcccagcactttgggaggctgaggcaggtggattgcctgagatcaggagttccagaccagtctggccaacatggtgaaaccccgtctctactaaaaatacaaaaaaaattagctgggcgtggtgatatgcccctgtaatcccagctacttgggaggctgaggcaggggaattgcttgaatcaaggaggtggaggttgcaatgagccaagatcgcgccactgcactccagcctgggtgacaaagcgagactccagcaa

SEQ ID NO: 402863 - DNA, 377 bp, Homo sapiens
cattagccaccacgcctggcctagaattcaaatcttaaaacattgctgtgttgaatttttattttatggctgacatttttgtttaatgtcatctttttcaattaaaaggagttttaaaatatataatgttgaaatcaaagtagcaagtttttgtttttttggttttttttttttgagacggattctcactctgtcgcccaggctggagtgcagtgatgtgattgtggcctcctccgcctcctgggttcaagtgatcctcctaccgcagtctcccaagtagctgggattacaagtggatgccaccacacccagctcatttttgtatttttagtagagatggggtttcaccatgttgtccaggctggtcttgaactcct

SEQ ID NO: 402864 - DNA, 1450 bp, Homo sapiens
cgttatttttgtagtgtttctgattctaaaagggccaggcttgagagtatgaggaattgagcagggttttcttctgactcaaaaataaggaggaggcccttggtaattcctataggctttaggttgagatccctaaagggttacatctcagacaaaagtaaatcagaagtaaacctggcatcagaaggactgaagcccagtttaaaatcatctcagttcccaattaggttaaaatacaatttgtagtattcttaaccacctgccaagagcaaatacaatctccaccagaagaagacatcatccaactgctaaaattatctttataatttttcatatacaggatctaacactcagtccaaaacagagagagagagagacagacagagacataaagacatacatggaggcaaaccagcatgaataaaaaccacgagaaatgtggccgggcatggtggctcacgtctgtaatcccagcactttagggggctgaggcaggtggatcacttgaggtcaggagttcaagaccagcctggtcaacatggtgaaaccccatctttactaaaaatacaaaaattagctgggcttggtggcacatgcctgtaatcccagctatacaagaggctgagggaggagaattgcttgaacccaggaggcggaggttgcagtgagctgagtttgtaccactgcactgcagcctgagtgacagagtgagattgcgtctcaacaacaacaacaaaatatcccaagagaaatgagataataataccacagtggatccagccaatgatattagcactagacatggactggaaactaaccatgctttcaagaaattttaaaaaataaggtgcaatatttttattaaagaactacaaattacttttaaaaatcccaaattggggaaaacctagaactaaaaagtactgtgaaattgaaaagacacagatggtttttaatagtaagatacaggttagtaaaattagtaaattggaagatagaccagaagaaaatactgagcctaatgaatgaagataagaaagagacttatactctaagagcatagtaaaaaggtctaacatgtgccataggaattttggaaagatgtgtatgagagacgtagaataagttagaagccgtgtttgaagacataatggttgagaatgttccaaaactgtcaaaacaaaaaaacaaacccaacaagcatacatttgaaaagctctttaagaatccaaggcatgttaaatacaaagatatttatacctagaaaattatactaaaccaaagacaatgaaaaaagtctaaaaagcagctagaggaaaccagagactacagttgctccttgccaagctgaaaatattttaagtcaaaaatgcatttaatgcatctaaactaccaagcatcataacttgacatagcctaccttaaatgtgcaggacattaaatgtgctca

SEQ ID NO: 402865 - DNA, 401 bp, Homo sapiens
ggatttcaggatttatttgaagtgagctctgtcagtatgcaggtacccttaccaccccaaggaaaaggctaaagccaagagactgtgactggagctgcctttgtcagcaaggagaaagaagatccaatgggcttgtactaatgtcaggggcacgtgtccctctgccggccacgtgcaccttagaaagaagtcagcctggaccaattcaagagatcctgcctaagatgactgcctggaagtgccgagcacccccgacagagtggaccactgaagctagggatgagaaagggagtccttaatggtcaggtagaggatagccttagaaactgcagtgagaagaccacagaggaaagagctaaaaaaatccaagaattctgttgggagaagggaatctcacaaga

SEQ ID NO: 402866 - DNA, 286 bp, Homo sapiens
gggcagcacaccacagcatctgctacagtcaacctctttcacaactcaggttcactggcttcaaataataagtttatgacacctaggcatagaaccctagatgtctgctattttcccatcatggggaatacgaagtgaccaggtggcaaccgtagcttaaatttaatgggatgcttgccatagaccctggtaacagtatttcccctctgtgaaccaggaccccaaaacttcgcaagttttgggggacagaaaatgcaaattcccaagcaagtcactgggactgatg

SEQ ID NO: 402867 - DNA, 894 bp, Homo sapiens
ttttgttcttttgaaagagacagccttgctatcttgcctaggctggtcttgaactcctggcctcaagtgatcctccagccttagcctcccaaatagctgggattacaggcatgagccaatgcacacagcctagtgactcgtttctaacaaacagagcatagcccaagtgatggaatgttactgccacaattagattattaatggctatgacttctgtcttgctagtactctttttcttactggcagtctctcttgtcctctcgatgaagctagttgccatgttgtgagatgctctatggggagcttcgtgtgacaaggaactgaggaagaccttcaaccaacatctggtgaggaactgaggcctcagttcaagagctcagaaggaactgactcctgccaacaaccacatgagtgagctgggaagcagatttttcccagctgagccctgacgtgatggcagccttttgagaaccacaggaccctgctaagccaagctcagattctcgacctacagaaactatgaaataataaatattgtcttaggccactgatttctgggttaaactgttatgcagcaataaacaaatacaccaactaaagaaaaagtttctttaaagaattaaagaagatttgttgttgttgctgcatttaatgttttgaagattcttgctgtaactggataagatgagcatttatttcagttatcatagaaacaaactcagtgcaatgactgggatgactaaaagatggccataagagaggagacaggctgtattccacgtccaattcccagtgaatacaacaacaaaagaattattatttcagtagtactagcacttcctttcttagctaccatggatcagcttgcagcacaccaaccctcttgcaatgaac

SEQ ID NO: 402868 - DNA, 841 bp, Homo sapiens
ttttgttcttttgaaagagacagccttgctatcttgcctaggctggtcttgaactcctggcctcaagtgatcctccagccttagcctcccaaatagctgggattacaggcatgagccaatgcacacagcctagtgactcgtttctaacaaacagagcatagcccaagtgatggaatgttactgccacaattagattattaatggctatgacttctgtcttgctagtactctttttcttactggcagtctctcttgtcctctcgatgaagctagttgccatgttgtgagatgctctatggggagcttcgtgtgacaaggaactgaggaagaccttcaaccaacatctggtgaggaactgaggcctcagttcaagagctcagaaggaactgactcctgccaacaaccacatgagtgagctgggaagcagatttttcccagctgagccctgacgtgatggcagccttttgagaaccacaggaccctgctaagccaagctcagattctcgacctacagaaactatgaaataataaatattgtcttaggccactgatttctgggttaaactgttatgcagcaataaacaaatacaccaactaaagaaaaagaagattcttgctgtaactggataagatgagcatttatttcagttatcatagaaacaaactcagtgcaatgactgggatgactaaaagatggccataagagaggagacaggctgtattccacgtccaattcccagtgaatacaacaacaaaagaattattatttcagtagtactagcacttcctttcttagctaccatggatcagcttgcagcacaccaaccctcttgcaatgaac

SEQ ID NO: 402869 - DNA, 386 bp, Homo sapiens
gtatcttcagggtagattttataagtgagattatagggctccttatgtagttatattaggtattgccaagtttcccttgagaagggttgtagcagtttgtattccttaacagcaatgaaaagagtgattattttcctaagatctggctaacaaaatgtgttgtcatattttaatttattacattttattagttaaaattttaatttttacccatctgataggtgagaaataatagcttagcatttttttaatctgcatttttctagttatgaacttgcactttacaggtatatatatgtatttttctttttaaaaaattgtattttaagttctggggtacatgtgcaggacatgcaggtttattacgtaggtaaatgtgtgccacg

SEQ ID NO: 402870 - DNA, 512 bp, Homo sapiens
acaggttgtacttctccatatgtgagactactggaagtgagaagcaatatttgtcatttctaaaactggccaggctgtgctgacccaggattagtaatttgttatgtctgttttcccttagatgtttgggcactcagatgctatcttggtgcacacacacaacattgctgttcagtcacaaatccgaacaacttaatataataaattgtactaaaagtcatttaagaaataccaaaaagtaagcttttgtttctaaccattgttataaaggctaatataattgttgttatatagcagtaagatatatttgtgtgcatgcgtctccaagtcagttgtaaatgtcttgagaacagagaatacaattgtcatctttatattgcctcatttctccactaatacttagcaaataaaaggcaataagtaaatatgtactggttgaatgcctctggagacctagagtttaaagttttaagtcaataaataaataaatatttactcttaaataaatagaa

SEQ ID NO: 402871 - DNA, 576 bp, Homo sapiens
gcctcccgggcatcccccgtcccaccctcacccagtcaaaccaccacgttcccaaatgtaaagcaacccaccgagcgcccatggagcaaggtttagggccaggcttcgagccagctgaggcacaccacctaacagacgctgaggtccatagagccgacagaactccctaaggcaggtggccctgccccggcccatctcccaccccacactgtgtacctcccagcaggcctcacgctcctcctctacaattcagctccagaccctaggcatgacttcccgtacctcctgcccagcccaagccacagctctgcagggacacagaggagccctgggctcctgcccaacctgccacaaccagcgacgatggacccgagccagcccacagccccgacctgagaaacatctgtaaaatgggacagcaccatcacggctgctgggagaccacacaccccaacaccaaccctggttcttggaaatcaatccaggttggagcttcacaacgagcaaagccagcagaggacaagcaggctggctctggaccgcactcacaaaggtagctaaagcaaggcggccgct

SEQ ID NO: 402872 - DNA, 390 bp, Homo sapiens
ctccagagtagctgggattacagtcatgtgcccctgccaagctcatggctgggtgtggtggctcgtgcctgtaatcacagcactttgggaggccaaggcaggtggatcccttgagctcaggaatttgagaccagcctgggcaacatagtgaaaccccaccttcaaaaaaaaaaacaaaagatctgaaggtcatactccttcctcacactccattggcatataatatattttttggagggagagatactattgagattttcaggttctagggctcagttgaaatatccctcaccaggacttagtgctcttagaacctggaagtttcaaaaaggaaaaataaaaaaataaaaagtaatatttttaaaaagataaattaaaataaatagtaaa

SEQ ID NO: 402873 - DNA, 800 bp, Homo sapiens
gatcatcgtcatgaaactcatcatcaaatggcatttgagcaaaatctttattaattaaacatgagtggaagtttaaaggccaaagcacaactcactcaggcattgtgaactatgtgtgcagacagatcacaactcatccttggtctctgggtgtgtctgcgtctattactgacttaccctggatatgtaaaatgagtaagaaaaactttttgtgttagccactgggatttttggtttgtgtattactttagcatattatctcattttgaatgctatagtttaggacactagtttaaactactgaagttaaaatgttctccttatttcagaggagagaaggatcttacagtgacagacatccattagtaagaattaatttctagagataaagtgaattcagtaaccacagtgtcagtagagtcagcatggtcaaaatagtctacatgggaaatgtttggtggctcttagttgatcatggagtctctagaaccaaaagttatgaatgccaattaagtttcgatttggcttatatgatctcaaatcttcaggtttacaaaacatatcttgagccaccacccagctctgtcacccaggctggagtgcagtggcaccatctcagctcattgcagcctccgcctccgaggtttaagcgattctcatgcctcagcctcctgagtaactgggactacaggtgctcaccaccatgcagggatgttttttctatttttttggagagacacggtttcaccatgttggccaggctgctctcgaactccttacctcatgatccgcccacctcg

SEQ ID NO: 402874 - DNA, 688 bp, Homo sapiens
ttttgaaaggcggcttctcaccatgttgctcaggctggtctcaaactcctgggctcaagtgatcctcctgcatcggcctctcaaagtgctgggattacaacaggtgcaagccaccgccctggcctttgtttacttatttattaaagattactctagaatgcatgcttggaatattgcctgtatcatatcatatgtgttgctaaataaagctacccatttcataactacacaaaatgattaggaagtttccatcgtgttctttactctgtgttctttctccactaatatttgatcttcttcctcctcttttgacaaactcacaatagattatcagcccttctaatgatcaagggtctgtcggcctctttcttattcgttccaatgagagctggtgacagcatcaatcttgcgtcacacagctccatgaagtatctgcctgccttcatctctgtatctcattaatggaactgttgatgggaaggagtgaaatgatgctcaaagctggcattagcacagccgactcccagactgtctctttgtgagcctggcagctttgttcacaccatgaccccacgctacaggtgcgtttcatgattccttctgcagtggtcatgatccatttaattgaaaatatttcttcctgggtggtacttgctagaaaggcttcacaaacccaggacacagtatg

SEQ ID NO: 402875 - DNA, 312 bp, Homo sapiens
aaggaactccaacaaaccaattaacctctttcgatttggtgcaactggaaaaatgacatccacgtaagcaagacccagagacagtaagcctggcacttagtaggttttcgattaacactagcaaccatgatgatatgtgattattaggccccaaaatggcccgtggctgaagccaccagtgactgtgggatactttctccagcaacatcactaccaccctcttaaagcacccacgccaacttagttgacagaagttaagcctattacattgaaccgctttacatcttccaataaaagtaccttaggagcatg

SEQ ID NO: 402876 - DNA, 454 bp, Homo sapiens
cctcagtaaatatgtgctgtattacatgtgtatatatgggtttgtatgtgtgtgtattcattcccaaaaagaattctaagtaggaagcatcaaaatcacaaaaatcactgggtacatttgggaactaattcatccaatttatagcgtgatctaatacaatgattctcaaaatttagtgtgttaaataatctcaacaagcttggaaaaatgaagattgaagcttagtctagaattttggttctgtatctctaaagaaaccttcatttttatggctggtctgaggactgtacctggatgatataaacaaataatttaacttctaaaaaaattaatgctcaagcatggtggctggcacctataatcctagcacttcgggaggctgaggcaggaatatcacttcagctcaggggtttgagaccagcctggggagcatagtgatactttgtctctacca

SEQ ID NO: 402877 - DNA, 286 bp, Homo sapiens
ctttttttcttttggatgaaaggcaatttcattacacaataataaacttctttgccaaagctttatttggaagcagggggaaagggaagggaaattttattaaatggtaaacctatcagtaattagaaataatactttaacctcaaaagaaatactaaagcctctaccagcacttaaaatctgcaaaataactgtgcccactaaaaattctagttcttccttttatgaatatatctgcagctattccatatttcaaaacaataaattctatatgaaatgctctatg

SEQ ID NO: 402878 - DNA, 704 bp, Homo sapiens
gcacatttagttcatcatagaaagtctgaaatactggttctagagagagtttatgaacctcctcttttactacgatatttactctaggatctagtccttttctatccatgcccagagatatgtgttctctttttttctaccttgggtttaagggatttgtaattactaattttaaggggttgcagcttccactcatacaggcggggctgccttctcctttttggagctaaacaggattttttcatcctttttccaagtagtccagatgacacaagaccagtaattacacacagttgcacatgagcttaattcatggcagatatacttatttcctgccgtgtaacttttttttttcaatttaaagaaccacatcttatcctatgccgattgctattgatagtggcacaagcattaagttttagggttatatgcttggggacccatctttcttctgtcttagctgttactttacttgcgtcgcctagaaaatgaccagtccttaattttattctaaaaactgtgatcatgggaggcttaaaatgggtcataacaggcatcaggttggttatttcctgagctacataccttggatagaatagcattatacaaacaagtttcttttagagtcccggtacacttataataaccataaaataacaggactgtagcaatcttttgtcctaccttagtgacttgatgtatat

SEQ ID NO: 402879 - DNA, 461 bp, Homo sapiens
tcgctctgtcacccaggctggagtgcagtggcgcgatctcggctcactgcaagctccgccacctgggttcacgccattctcctgcctcagcctcccgagtagctgggactacaggtgctgggctttctgccacttgaatcctgtttcttatcacccgtgtttggtctgtgtttatgagtctttctccaaatgtcatctgtccgtactgcatggtttctacagaagaccttggtgccttccaatatgcccaccactaaaatgctgggtgaggctttgctgatttcctcacccttactcctcatggttttccccagaccatgaccaggaagtatgcaatggtcacactctgcgagccctcaaaggaggaagtcatttgttcaagttggggttgcaaactccagagctgccatagtttctggcggtgtgtggtaattttcccttgtcattaaatgacatatgta

SEQ ID NO: 402880 - DNA, 527 bp, Homo sapiens
  misc_feature (1)..(1): n is a, c, g, or t
  misc_feature (14)..(14): n is a, c, g, or t
  misc_feature (19)..(19): n is a, c, g, or t
  misc_feature (504)..(504): n is a, c, g, or t
  misc_feature (508)..(508): n is a, c, g, or t
  misc_feature (513)..(513): n is a, c, g, or t
  misc_feature (518)..(518): n is a, c, g, or t
  misc_feature (520)..(520): n is a, c, g, or t
naaacacctttcanggtancttaattccccttaacctaagtccaccctcagcagatgataatatcaatacacctgccgagcgtctgcgggggccgcttccaccctcagcggatgataatctcaagacaccttccgagcgtcagctcactccccttccaccctcagctccaccctcagcagatgataatatcaagacacctgccgagcgtctgcgggggccgcttccaccctcagcggatgataatctcaagacaccttccgagcgtcagctcactccccttccaccctcagctccaccctcagcagatgataatatcaagacacctgccttccaccctcagcggatgatctcaagacaccttccgagcgtcagctcactccccttccaccctcagctccaccctcagcagatgataatatcaagatacctgctgagcgtctgcggattccgctatccgtcggggatcctctagaggggacaacaggcatgcaagcaggcacggnggtntcaangagtncntgtagac

SEQ ID NO: 402881 - DNA, 1568 bp, Homo sapiens
  misc_feature (1545)..(1545): n is a, c, g, or t
  misc_feature (1549)..(1549): n is a, c, g, or t
  misc_feature (1554)..(1554): n is a, c, g, or t
  misc_feature (1559)..(1559): n is a, c, g, or t
  misc_feature (1561)..(1561): n is a, c, g, or t
atggagacccagtgctgaggtccttgtatgcacacaaagaaaagagtttcttcctttcgaggaaatacaatgtcctgaaagacgtcattactctacggagacatgtggaaacacaaagttagagctaaaatccgtaagaggaaggtgacaacgaaaatcaaccatcatgacaaaatcaatggaaagaggaagagcgccagaaaacagaaaatgtttcaacgtgcgcaagagttgcggcggcgagcagaggactaccacaaatgcaaaatccccccttctgcaagaaaggctctttgcaactgggtcagaatggcggcagcggagcatcgtcattcttcaggattgccctactggccctacctcacagctgaaactttaaaaaacaggatgggccaccagccacctcctccaactcaacaacattctataactgataactccctgagcctcaagacacctcccgagtgtctgctcactccccttccaccctcagcggatgataatctcaagacacctcccgagtgtgtgctcactccccttccaccctcagcggatgataatctcaagacacctcccgagtgtgtgctcactccccttccaccctcagcggatgataatctcaagacacctcctgagtgtctgctcactccccttccaccctcagcggatgataatctcaagacacctcccgagtgtctactcactccccttccaccctcagctctaccctcagctccaccctcagcggatgataatctcaagacacgtgccgagtgtctgctccatccccttccaccctcagcggatgataatctcaagacaccttccgagcgtcagctcactccccttccaccctcagctccaccctcagcagatgataatatcaagacacctgccttccaccctcagcggatgataatctcaagacaccttccgagcgtcagctcactccccttccaccctcagctccaccctcagcagatgataatatcaagacacctgccgagcgtctgcgggggccgcttccaccctcagcggatgataatctcaagacaccttccgagcgtcagctcactgcccttccaccctcagcagatgataatatcaatacacctgccgagcgtctgcgggggccgcttccaccctcagcggatgataatctcaagacaccttccgagcgtcagctcactccccttccaccctcagctccaccctcagcagatgataatatcaagacacctgccgagcgtctgcgggggccgcttccaccctcagcggatgataatctcaagacaccttccgagcgtcagctcactccccttccaccctcagctccaccctcagcagatgataatatcaagacacctgccttccaccctcagcggatgatctcaagacaccttccgagcgtcagctcactccccttccaccctcagctccaccctcagcagatgataatatcaagatacctgctgagcgtctgcggattccgctatccgtcggggatcctctagaggggacaacaggcatgcaagcaggcacggnggtntcaangagtncntgtagac

SEQ ID NO: 402882 - DNA, 1152 bp, Homo sapiens
  misc_feature (1091)..(1091): n is a, c, g, or t
  misc_feature (1096)..(1097): n is a, c, g, or t
  misc_feature (1143)..(1143): n is a, c, g, or t
atggagacccagtgctgaggtccttgtatgcacacaaagaaaagagtttcttcctttcgaggaaatacaatgtcctgaaagacgtcattactctacggagacatgtggaaacacaaagttagagctaaaatccgtaagaggaaggtgacaacgaaaatcaaccatcatgacaaaatcaatggaaagaggaagagcgccagaaaacagaaaatgtttcaacgtgcgcaagagttgcggcggcgagcagaggactaccacaaatgcaaaatccccccttctgcaagaaaggctctttgcaactgggtcagaatggcggcagcggagcatcgtcattcttcaggattgccctactggccctacctcacagctgaaactttaaaaaacaggatgggccaccagccacctcctccaactcaacaacattctataactgataactccctgagcctcaagacacctcccgagtgtctgctcactccccttccaccctcagcggatgataatctcaagacacctcccgagtgtgtgctcactccccttccaccctcagcggatgataatctcaagacacctcccgagtgtgtgctcactccccttccaccctcagcggatgataatctcaagacacctcctgagtgtctgctcactccccttccaccctcagcggatgataatctcaagacacctcccgagtgtctactcactccccttccaccctcagctctaccctcagctccaccctcagcggatgataatctcaagacacgtgccgagtgtctgctccatccccttccaccctcagcggatgataatctcaagacaccttccgagcgtcagctcactccccttccaccctcagctccaccctcagcagatgataatatcaagacacctgccgagcgtctgcgggggccgcttccaccctcagcggatgataatctcaagacaccttccgagcgtcagctcactccccttccaccctcagctccaccctcagcagatgataatatcaagacacctgccgagcgtctgcgggggccgcttccaccctcagcggatgaataaattttaaaagaaaacctttttcgagncggtnnaggtttaactttccccttttccaccccttcaactaggattgatttnatattttaa

SEQ ID NO: 402883 - DNA, 1071 bp, Homo sapiens
  misc_feature (65)..(65): n is a, c, g, or t
  misc_feature (96)..(96): n is a, c, g, or t
  misc_feature (1048)..(1048): n is a, c, g, or t
  misc_feature (1052)..(1052): n is a, c, g, or t
  misc_feature (1057)..(1057): n is a, c, g, or t
  misc_feature (1062)..(1062): n is a, c, g, or t
  misc_feature (1064)..(1064): n is a, c, g, or t
agaggatccgagcagatctcagaaggtctgtggtagacgcattacatttgagacgctctgtctgnatctcaggccaacacgacttcctcaagcatnctccaaaccctcagcggatgataatctcaagacacctcctgagtgtctgctcactccccttccaccctcagcggatgataatctcaagacacctcccgagtgtctactcactccccttccaccctcagctctaccctcagctccaccctcagcggatgataatctcaagacacgtgccgagtgtctgctccatccccttccaccctcagcggatgataatctcaagacaccttccgagcgtcagctcactccccttccaccctcagctccaccctcagcagatgataatatcaagacacctgccttccaccctcagcggatgataatctcaagacaccttccgagcgtcagctcactccccttccaccctcagctccaccctcagcagatgataatatcaagacacctgccgagcgtctgcgggggccgcttccaccctcagcggatgataatctcaagacaccttccgagcgtcagctcactgcccttccaccctcagcagatgataatatcaatacacctgccgagcgtctgcgggggccgcttccaccctcagcggatgataatctcaagacaccttccgagcgtcagctcactccccttccaccctcagctccaccctcagcagatgataatatcaagacacctgccgagcgtctgcgggggccgcttccaccctcagcggatgataatctcaagacaccttccgagcgtcagctcactccccttccaccctcagctccaccctcagcagatgataatatcaagacacctgccttccaccctcagcggatgatctcaagacaccttccgagcgtcagctcactccccttccaccctcagctccaccctcagcagatgataatatcaagatacctgctgagcgtctgcggattccgctatccgtcggggatcctctagaggggacaacaggcatgcaagcaggcacggnggtntcaangagtncntgtagac

SEQ ID NO: 402884 - DNA, 1454 bp, Homo sapiens
  misc_feature (1431)..(1431): n is a, c, g, or t
  misc_feature (1435)..(1435): n is a, c, g, or t
  misc_feature (1440)..(1440): n is a, c, g, or t
  misc_feature (1445)..(1445): n is a, c, g, or t
  misc_feature (1447)..(1447): n is a, c, g, or t
atggagacccagtgctgaggtccttgtatgcacacaaagaaaagagtttcttcctttcgaggaaatacaatgtcctgaaagacgtcattactctacggagacatgtggaaacacaaagttagagctaaaatccgtaagaggaaggtgacaacgaaaatcaaccatcatgacaaaatcaatggaaagaggaagagcgccagaaaacagaaaatgtttcaacgtgcgcaagagttgcggcggcgagcagaggactaccacaaatgcaaaatccccccttctgcaagaaaggctctttgcaactgggtcagaatggcggcagcggagcatcgtcattcttcaggattgccctactggccctacctcacagctgaaactttaaaaaacaggatgggccaccagccacctcctccaactcaacaacattctataactgataactccctgagcctcaagacacctcccgagtgtctgctcactccccttccaccctcagcggatgataatctcaagacacctcccgagtgtgtgctcactccccttccaccctcagcggatgataatctcaagacacctcccgagtgtctactcactccccttccaccctcagctctaccctcagctccaccctcagcggatgataatctcaagacacgtgccgagtgtctgctccatccccttccaccctcagcggatgataatctcaagacaccttccgagcgtcagctcactccccttccaccctcagctccaccctcagcagatgataatatcaagacacctgccttccaccctcagcggatgataatctcaagacaccttccgagcgtcagctcactccccttccaccctcagctccaccctcagcagatgataatatcaagacacctgccgagcgtctgcgggggccgcttccaccctcagcggatgataatctcaagacaccttccgagcgtcagctcactgcccttccaccctcagcagatgataatatcaatacacctgccgagcgtctgcgggggccgcttccaccctcagcggatgataatctcaagacaccttccgagcgtcagctcactccccttccaccctcagctccaccctcagcagatgataatatcaagacacctgccgagcgtctgcgggggccgcttccaccctcagcggatgataatctcaagacaccttccgagcgtcagctcactccccttccaccctcagctccaccctcagcagatgataatatcaagacacctgccttccaccctcagcggatgatctcaagacaccttccgagcgtcagctcactccccttccaccctcagctccaccctcagcagatgataatatcaagatacctgctgagcgtctgcggattccgctatccgtcggggatcctctagaggggacaacaggcatgcaagcaggcacggnggtntcaangagtncntgtagac

SEQ ID NO: 402885 - DNA, 994 bp, Homo sapiens
atggagacccagtgctgaggtccttgtatgcacacaaagaaaagagtttcttcctttcgaggaaatacaatgtcctgaaagacgtcattactctacggagacatgtggaaacacaaagttagagctaaaatccgtaagaggaaggtgacaacgaaaatcaaccatcatgacaaaatcaatggaaagaggaagagcgccagaaaacagaaaatgtttcaacgtgcgcaagagttgcggcggcgagcagaggactaccacaaatgcaaaatccccccttctgcaagaaaggctctttgcaactgggtcagaatggcggcagcggagcatcgtcattcttcaggattgccctactggccctacctcacagctgaaactttaaaaaacaggatgggccaccagccacctcctccaactcaacaacattctataactgataactccctgagcctcaagacacctcccgagtgtctgctcactccccttccaccctcagcggatgataatctcaagacacctcccgagtgtgtgctcactccccttccaccctcagcggatgataatctcaagacacctcccgagtgtgtgctcactccccttccaccctcagcggatgataatctcaagacacctcctgagtgtctgctcactccccttccaccctcagcggatgataatctcaagacacctcccgagtgtctactcactccccttccaccctcagctctaccctcagctccaccctcagcggatgataatctcaagacacgtgccgagtgtctgctccatccccttccaccctcagcggatgataatctcaagacaccttccgagcgtcagctcactcccctccgaagcggctgccgcatccgaagcagttgccgcaccatagtctaatagaaaacaaccgaaaccaaataattcaagcactgcttattacaattttactggggtctctattttaccctcctacaagcctcagagtacttcgagtctc

SEQ ID NO: 402886 - DNA, 149 bp, Homo sapiens
cctcctgtctcaaaaggcaccagagtcttctcagaaaagccttcctgcttgatccagtgacaaccaccacctcctgggcactcgatgccacctccatgcctccttcaggacgtggggatccattatcccatcttgcttcaaaatcttta

SEQ ID NO: 402887 - DNA, 805 bp, Homo sapiens
ccagattcaccactgttaacatgatgccatacttgctctgatgttttttctgttccttctgtacaagtgtgcacacacacctatacacacatacatacatacatacacatatgtttttcatgaactgtttgagtggaggcctcagattacactttattttgaagataaacagaatcttctgggagattggttgtgtggtatgagagaaagtgagaattcaagaatgacgcttgggttttagcctaggcagttagacagaaggagttgcccttgagtgggttgaggaagcgtgagggaggagcaaacctggggagaagtccaggattttgattttggtcatgtgaatctggaggtatctattagatatctatgcagaggagtgctgtaggcagctggataggtgaatgcacagttcagggaggaggtgtggacttggcagttgttggtgaatagatagtgtgtaaagcctcgagacggtgcgagatctcaaagagagtgagggtaagtagaggaaacatctgaggatggaggcttgagacagcctcgtatgagaggttatggaattgaggaggagctgataaaggaggctgtgaaggagataggtgagtgaggaggccaagagaagaagacattcatcgttggctgtgtcactactcacagtccatgtagcaacatgcaagtcattcggtgtctgccaagagcagtttgggtggaaggtcttaagacaaaatggaggagagaagttgcaatgtgggaactctcgagaggtttgttataaaagagaggtccagaaaaagagaatagt

SEQ ID NO: 402888 - DNA, 2947 bp, Homo sapiens
  misc_feature (3)..(3): n is a, c, g, or t
  misc_feature (7)..(8): n is a, c, g, or t
  misc_feature (12)..(12): n is a, c, g, or t
  misc_feature (14)..(16): n is a, c, g, or t
tcngcgnnttcngnnngcgcctggaaacacgaacttccggtctcttaggctccgggccacagagacggtgtcagtggtagcctagagaggccgctaacagacaggagccgaacgggggcttccgctcagcagagaggcaagatggctacggcagggggtggctctggggctgacccgggaagtcggggtctccttcgccttctgtctttctgcgtcctactagcaggtttgtgcaggggaaactcagtggagaggaagatatatatccccttaaataaaacagctccctgtgttcgcctgctcaacgccactcatcagattggctgccagtcttcaattagtggagacacaggggttatccacgtagtagagaaagaggaggacctacagtgggtattgactgatggccccaaccccccttacatggttctgctggagagcaagcattttaccagggatttaatggagaagctgaaagggagaaccagccgaattgctggtcttgcagtgtccttgaccaagcccagtcctgcctcaggcttctctcctagtgtacagtgcccaaatgatgggtttggtgtttactccaattcctatgggccagagtttgctcactgcagagaaatacagtggaattcgctgggcaatggtttggcttatgaagactttagtttccccatctttcttcttgaagatgaaaatgaaaccaaagtcatcaagcagtgctatcaagatcacaacctgagtcagaatggctcagcaccaaccttcccactatgtgccatgcagctcttttcacacatgcatgctgtcatcagcactgccacctgcatgcggcgcagctccatccaaagcaccttcagcatcaacccagaaatcgtctgtgaccccctgtctgattacaatgtgtggagcatgctaaagcctataaatacaactgggacattaaagcctgacgacagggttgtggttgctgccacccggctggatagtcgttcctttttctggaatgtggccccaggggctgaaagcgcagtggcttcctttgtcacccagctggctgctgctgaagctttgcaaaaggcacctgatgtgaccaccctgccccgcaatgtcatgtttgtcttctttcaaggggaaacttttgactacattggcagctcgaggatggtctacgatatggagaagggcaagtttcccgtgcagttagagaatgttgactcatttgtggagctgggacaggtggccttaagaacttcattagagctttggatgcacacagatcctgtttctcagaaaaatgagtctgtacggaaccaggtggaggatctcctggccacattggagaagagtggtgctggtgtccctgctgtcatcctcaggaggccaaatcagtcccagcctctcccaccatcttccctgcagcgatttcttcgagctcgaaacatctctggcgttgttctggctgaccactctggtgccttccataacaaatattaccagagtatttacgacactgctgagaacattaatgtgagctatcccgaatggctgagccctgaagaggacctgaactttgtaacagacactgccaaggccctggcagatgtggccacggtgctgggacgtgctctgtatgagcttgcaggaggaaccaacttcagcgacacagttcaggctgatccccaaacggttacccgcctgctctatgggttcctgattaaagccaacaactcatggttccagtctatcctcaggcaggacctaaggtcctacttgggtgacgggcctcttcaacattacatcgctgtctccagccccaccaacaccacttatgttgtacagtatgccttggcaaatttgactggcacagtggtcaacctcacccgagagcagtgccaggatccaagtaaagtcccaagtgaaaacaaggatctgtatgagtactcatgggtccagggccctttgcattctaatgagacggaccgactcccccggtgtgtgcgttctactgcacgattagccagggccttgtctcctgcctttgaactgagtcagtggagctctactgaatactctacatggactgagagccgctggaaagatatccgtgcccggatatttctcatcgccagcaaagagcttgagttgatcaccctgacagtgggcttcggcatcctcatcttctccctcatcgtcacctactgcatcaatgccaaagctgatgtccttttcattgctccccgggagccaggagctgtgtcatactgaggaggaccccagcttttcttgccagctcagcagttcacttcctagagcatctgtcccactgggacacaaccactaatttgtcactggaacctccctgggcctgtctcagattgggattaacataaaagagtggaactatccaaaagagacagggagaaataaataaattgcctcccttcctccgctcccctttcccatcaccccttccccatttcctcttccttctctactcatgccagattttgggattacaaatagaagcttcttgctcctgtttaactccctagttacccaccctaatttgcccttcaggacccttctactttttccttcctgccctgtacctctctctgctcctcacccccacccctgtacccagccaccttcctgactgggaaggacataaaaggtttaatgtcagggtcaaactacattgagcccctgaggacaggggcatctctgggctgagcctactgtctccttcccactgtcctttctccaggccctcagatggcacattagggtgggcgtgctgcgggtgggtatcccacctccagcccacagtgctcagttgtactttttattaagctgtaatatctatttttgtttttgtctttttcctttattctttttgtaaatatatatataatgagtttcattaaaatagattatccca

SEQ ID NO: 402889 - DNA, 653 bp, Homo sapiens
agtatattaagtgcaacaggtacatgccatgagccatattaccgattggagccccaaggtctggaacctccctgggcctgtctcagattgggattaacataaaagagtggaactatccaaaagagacagggagaaataaataaattgcctcccttcctccgctcccctttcccatcaccccttccccatttcctcttccttctctactcatgccagattttgggattacaaatagaagcttcttgctcctgtttaactccctagttacccaccctaatttgcccttcaggacccttctactttttccttcctgccctgtacctctctctgctcctcacccccacccctgtacccagccaccttcctgactgggaaggacataaaaggtttaatgtcagggtcaaactacattgagcccctgaggacaggggcatctctgggctgagcctactgtctccttcccactgtcctttctccaggccctcagatggcacattagggtgggcgtgctgcgggtgggtatcccacctccagcccacagtgctcagttgtactttttattaagctgtaatatctatttttgtttttgtctttttcctttattctttttgtaaatatatatataatgagtttcattaaaatagattatccca

SEQ ID NO: 402890 - DNA, 413 bp, Homo sapiens
ggaattctcctcacccccacccctgtacccaccctaatttgcccttcaggacccttctactttttccttcctgccctgtacctctctctgctcctcacccccacccctgtacccagccaccttcctgactgggaaggacataaaaggtttaatgtcagggtcaaactacattgagcccctgaggacaggggcatctctgggctgagcctactgtctccttcccactgtcctttctccaggccctcagatggcacattagggtgggcgtgctgcgggtgggtatcccacctccagcccacagtgctcagttgtactttttattaagctgtaatatctatttttgtttttgtctttttcctttattctttttgtaaatatatatataatgagtttcattaaaatagattatccca

SEQ ID NO: 402891 - DNA, 559 bp, Homo sapiens
  misc_feature (468)..(468): n is a, c, g, or t
  misc_feature (473)..(473): n is a, c, g, or t
tccatcgtgatagctgactcttgaggataaaccgacgcagaggatcctaagtaccttcagcatcaacccagaaatcgtctgtgaccccctgtctgattacaatgtgtggagcatgctaaagcctataaatacaactgggacattaaagcctgacgacagggttgtggttgctgccacccggctggatagtcgttcctttttctggaatgtggccccaggggctgaaagcgcagtggcttcctttgtcacccagctggctgctgctgaagctttgcaaaaggcacctgatgtgaccaccctgccccgcaatgtcatgtttgtcttctttcaaggggaaacttttgactacattggcagctcgaggatggtctacgatatggagaagggcaagtttcccgtgcagttagagaatgttgactcatttgtggagctgggacaggtggccttaagaacttcattagagcttgngactntacttggatcctggcactgctctcgggtgaggttgaccactgtgccagtcaaaattgccaagcatactgtacaaacataagtgtgt

SEQ ID NO: 402892 - DNA, 374 bp, Homo sapiens
  misc_feature (341)..(341): n is a, c, g, or t
atttttagtagagatgggtttcaccatgttggtcaggctagtcttaaactcctgacctcaggtgatccacctttcttggcctcccaaagtgctgggattataggcgtgagccactgcacccggccaggaggcctttcttcacagatagtttgagtaggtgttcattctggagagcccctgtggatcccagaactctttcacagcttcaactcccggctggcattccccatctggcacagctgggatgagtcagtctaatgtaccgagctcctgtcacaagtcagtaatgtaagtgccgcaagggaaccaaagccatgggccctcctttctgccttcatggngagacgtctgtaggctggagagatgttgccctg

SEQ ID NO: 402893 - DNA, 276 bp, Homo sapiens
catcgacatggagatagcccagagtgttctccggtgcagcgtagagaacagtttgacgtcagttgatcgagctagagacaggtggccttaagaacttcattagagctttggatgcacacagatcctgtttctcagaaaaatgagtctgtacggaaccagggaggatctcctggcactgggaatgaaaaagaacggttcttttcattgcagggttatagcatttgcacttttattttccagatatcctgagggtgcattttggaaatgaattttaag

SEQ ID NO: 402894 - DNA, 3368 bp, Homo sapiens
  misc_feature (3)..(3): n is a, c, g, or t
  misc_feature (7)..(8): n is a, c, g, or t
  misc_feature (12)..(12): n is a, c, g, or t
  misc_feature (14)..(16): n is a, c, g, or t
tcngcgnnttcngnnngcgcctggaaacacgaacttccggtctcttaggctccgggccacagagacggtgtcagtggtagcctagagaggccgctaacagacaggagccgaacgggggcttccgctcagcagagaggcaagatggctacggcagggggtggctctggggctgacccgggaagtcggggtctccttcgccttctgtctttctgcgtcctactagcaggtttgtgcaggggaaactcagtggagaggaagatatatatccccttaaataaaacagctccctgtgttcgcctgctcaacgccactcatcagattggctgccagtcttcaattagtggagacacaggggttatccacgtagtagagaaagaggaggacctacagtgggtattgactgatggccccaaccccccttacatggttctgctggagagcaagcattttaccagggatttaatggagaagctgaaagggagaaccagccgaattgctggtcttgcagtgtccttgaccaagcccagtcctgcctcaggcttctctcctagtgtacagtgcccaaatgatgggtttggtgtttactccaattcctatgggccagagtttgctcactgcagagaaatacagtggaattcgctgggcaatggtttggcttatgaagactttagtttccccatctttcttcttgaagatgaaaatgaaaccaaagtcatcaagcagtgctatcaagatcacaacctgagtcagaatggctcagcaccaaccttcccactatgtgccatgcagctcttttcacacatgcatgctgtcatcagcactgccacctgcatgcggcgcagctccatccaaagcaccttcagcatcaacccagaaatcgtctgtgaccccctgtctgattacaatgtgtggagcatgctaaagcctataaatacaactgggacattaaagcctgacgacagggttgtggttgctgccacccggctggatagtcgttcctttttctggaatgtggccccaggggctgaaagcgcagtggcttcctttgtcacccagctggctgctgctgaagctttgcaaaaggcacctgatgtgaccaccctgccccgcaatgtcatgtttgtcttctttcaaggggaaacttttgactacattggcagctcgaggatggtctacgatatggagaagggcaagtttcccgtgcagttagagaatgttgactcatttgtggagctgggacaggtggccttaagaacttcattagagctttggatgcacacagatcctgtttctcagaaaaatgagtctgtacggaaccaggtggaggatctcctggccacattggagaagagtggtgctggtgtccctgctgtcatcctcaggaggccaaatcagtcccagcctctcccaccatcttccctgcagcgatttcttcgagctcgaaacatctctggcgttgttctggctgaccactctggtgccttccataacaaatattaccagagtatttacgacactgctgagaacattaatgtgagctatcccgaatggctgagccctgaagaggacctgaactttgtaacagacactgccaaggccctggcagatgtggccacggtgctgggacgtgctctgtatgagcttgcaggaggaaccaacttcagcgacacagttcaggctgatccccaaacggttacccgcctgctctatgggttcctgattaaagccaacaactcatggttccagtctatcctcaggcaggacctaaggtcctacttgggtgacgggcctcttcaacattacatcgctgtctccagccccaccaacaccacttatgttgtacagtatgccttggcaaatttgactggcacagtggtcaacctcacccgagagcagtgccaggatccaagtaaagtcccaagtgaaaacaaggatctgtatgagtactcatgggtccagggccctttgcattctaatgagacggaccgactcccccggtgtgtgcgttctactgcacgattagccagggccttgtctcctgcctttgaactgagtcagtggagctctactgaatactctacatggactgagagccgctggaaagatatccgtgcccggatatttctcatcgccagcaaagagcttgagttgatcaccctgacagtgggcttcggcatcctcatcttctccctcatcgtcacctactgcatcaatgccaaagctgatgtccttttcattgctccccgggagccaggagctgtgtcatactgaggaggaccccagcttttcttgccagctcagcagttcacttcctagagcatctgtcccactgggacacaaccactaatttgtcactggaacctccctgggcctgtctcagattgggattaacataaaagagtggaactatccaaaagagacagggagaaataaataaattgcctcccttcctccgctcccctttcccatcaccccttccccatttcctcttccttctctactcatgccagattttgggattacaaatagaagcttcttgctcctgtttaactccctagttacccaccctaatttgcccttcaggacccttctactttttccttcctgccctgtacctctctctgctcctcacccccacccctgtacccagccaccttcctgactgggaaggacataaaaggtttaatgtcagggtcaaactacattgagcccctgaggacaggggcatctctgggctgagcctactgtctccttcccactgtcctttctccaggccctcagatggcacattagggtgggcgtgctgcgggtgggtatcccacctccagcccacagtgctcagttgtactttttattaagctgtaatatctatttttgtttttgtctttttcctttattctttttgtaaatatatatataatgagtttcattaaaatagattatcccaaaaaaaaaaacaggggaggagaggctattggagttgtcccaccgaagggggaccccagtgcatttcagcaggtacccagcttgttgttgtagcaaaaggggtccccctaaatatgtggagcctcgtacatactacaggctagggcacattgtccggtggagggttgaccacgccggtcgcgaccctggtgacaaccctggatagctaggggaacatcattgggtaaaggggtaaccttacttatcgctgcttgtgacagttaatgtgtcactaattgcaccgtaccctgagatttacagtgctctagatggagcagtataagatttttacgggtgtatcacgcgtcgtagactcgctgaatctcgtggcatgaagagaaatatggaaccggactagtgtcgtggagcatgtgtacacggac

SEQ ID NO: 402895 - DNA, 2855 bp, Homo sapiens
  misc_feature (3)..(3): n is a, c, g, or t
  misc_feature (7)..(8): n is a, c, g, or t
  misc_feature (12)..(12): n is a, c, g, or t
  misc_feature (14)..(16): n is a, c, g, or t
tcngcgnnttcngnnngcgcctggaaacacgaacttccggtctcttaggctccgggccacagagacggtgtcagtggtagcctagagaggccgctaacagacaggagccgaacgggggcttccgctcagcagaggtttgtgcaggggaaactcagtggagaggaagatatatatccccttaaataaaacagctccctgtgttcgcctgctcaacgccactcatcagattggctgccagtcttcaattagtggagacacaggggttatccacgtagtagagaaagaggaggacctacagtgggtattgactgatggccccaaccccccttacatggttctgctggagagcaagcattttaccagggatttaatggagaagctgaaagggagaaccagccgaattgctggtcttgcagtgtccttgaccaagcccagtcctgcctcaggcttctctcctagtgtacagtgcccaaatgatgggtttggtgtttactccaattcctatgggccagagtttgctcactgcagagaaatacagtggaattcgctgggcaatggtttggcttatgaagactttagtttccccatctttcttcttgaagatgaaaatgaaaccaaagtcatcaagcagtgctatcaagatcacaacctgagtcagaatggctcagcaccaaccttcccactatgtgccatgcagctcttttcacacatgcatgctgtcatcagcactgccacctgcatgcggcgcagctccatccaaagcaccttcagcatcaacccagaaatcgtctgtgaccccctgtctgattacaatgtgtggagcatgctaaagcctataaatacaactgggacattaaagcctgacgacagggttgtggttgctgccacccggctggatagtcgttcctttttctggaatgtggccccaggggctgaaagcgcagtggcttcctttgtcacccagctggctgctgctgaagctttgcaaaaggcacctgatgtgaccaccctgccccgcaatgtcatgtttgtcttctttcaaggggaaacttttgactacattggcagctcgaggatggtctacgatatggagaagggcaagtttcccgtgcagttagagaatgttgactcatttgtggagctgggacaggtggccttaagaacttcattagagctttggatgcacacagatcctgtttctcagaaaaatgagtctgtacggaaccaggtggaggatctcctggccacattggagaagagtggtgctggtgtccctgctgtcatcctcaggaggccaaatcagtcccagcctctcccaccatcttccctgcagcgatttcttcgagctcgaaacatctctggcgttgttctggctgaccactctggtgccttccataacaaatattaccagagtatttacgacactgctgagaacattaatgtgagctatcccgaatggctgagccctgaagaggacctgaactttgtaacagacactgccaaggccctggcagatgtggccacggtgctgggacgtgctctgtatgagcttgcaggaggaaccaacttcagcgacacagttcaggctgatccccaaacggttacccgcctgctctatgggttcctgattaaagccaacaactcatggttccagtctatcctcaggcaggacctaaggtcctacttgggtgacgggcctcttcaacattacatcgctgtctccagccccaccaacaccacttatgttgtacagtatgccttggcaaatttgactggcacagtggtcaacctcacccgagagcagtgccaggatccaagtaaagtcccaagtgaaaacaaggatctgtatgagtactcatgggtccagggccctttgcattctaatgagacggaccgactcccccggtgtgtgcgttctactgcacgattagccagggccttgtctcctgcctttgaactgagtcagtggagctctactgaatactctacatggactgagagccgctggaaagatatccgtgcccggatatttctcatcgccagcaaagagcttgagttgatcaccctgacagtgggcttcggcatcctcatcttctccctcatcgtcacctactgcatcaatgccaaagctgatgtccttttcattgctccccgggagccaggagctgtgtcatactgaggaggaccccagcttttcttgccagctcagcagttcacttcctagagcatctgtcccactgggacacaaccactaatttgtcactggaacctccctgggcctgtctcagattgggattaacataaaagagtggaactatccaaaagagacagggagaaataaataaattgcctcccttcctccgctcccctttcccatcaccccttccccatttcctcttccttctctactcatgccagattttgggattacaaatagaagcttcttgctcctgtttaactccctagttacccaccctaatttgcccttcaggacccttctactttttccttcctgccctgtacctctctctgctcctcacccccacccctgtacccagccaccttcctgactgggaaggacataaaaggtttaatgtcagggtcaaactacattgagcccctgaggacaggggcatctctgggctgagcctactgtctccttcccactgtcctttctccaggccctcagatggcacattagggtgggcgtgctgcgggtgggtatcccacctccagcccacagtgctcagttgtactttttattaagctgtaatatctatttttgtttttgtctttttcctttattctttttgtaaatatatatataatgagtttcattaaaatagattatccca

SEQ ID NO: 402896 - DNA, 2625 bp, Homo sapiens
gctacagtgggtattgactgatggccctcctctttctctactacgtggataaagaggaggacctacagtgggtattgactgatggccccaaccccccttacatggttctgctggagagcaagcattttaccagggatttaatggagaagctgaaagggagaaccagccgaattgctggtcttgcagtgtccttgaccaagcccagtcctgcctcaggcttctctcctagtgtacagtgcccaaatgatgggtttggtgtttactccaattcctatgggccagagtttgctcactgcagagaaatacagtggaattcgctgggcaatggtttggcttatgaagactttagtttccccatctttcttcttgaagatgaaaatgaaaccaaagtcatcaagcagtgctatcaagatcacaacctgagtcagaatggctcagcaccaaccttcccactatgtgccatgcagctcttttcacacatgcatgctgtcatcagcactgccacctgcatgcggcgcagctccatccaaagcaccttcagcatcaacccagaaatcgtctgtgaccccctgtctgattacaatgtgtggagcatgctaaagcctataaatacaactgggacattaaagcctgacgacagggttgtggttgctgccacccggctggatagtcgttcctttttctggaatgtggccccaggggctgaaagcgcagtggcttcctttgtcacccagctggctgctgctgaagctttgcaaaaggcacctgatgtgaccaccctgccccgcaatgtcatgtttgtcttctttcaaggggaaacttttgactacattggcagctcgaggatggtctacgatatggagaagggcaagtttcccgtgcagttagagaatgttgactcatttgtggagctgggacaggtggccttaagaacttcattagagctttggatgcacacagatcctgtttctcagaaaaatgagtctgtacggaaccaggtggaggatctcctggccacattggagaagagtggtgctggtgtccctgctgtcatcctcaggaggccaaatcagtcccagcctctcccaccatcttccctgcagcgatttcttcgagctcgaaacatctctggcgttgttctggctgaccactctggtgccttccataacaaatattaccagagtatttacgacactgctgagaacattaatgtgagctatcccgaatggctgagccctgaagaggacctgaactttgtaacagacactgccaaggccctggcagatgtggccacggtgctgggacgtgctctgtatgagcttgcaggaggaaccaacttcagcgacacagttcaggctgatccccaaacggttacccgcctgctctatgggttcctgattaaagccaacaactcatggttccagtctatcctcaggcaggacctaaggtcctacttgggtgacgggcctcttcaacattacatcgctgtctccagccccaccaacaccacttatgttgtacagtatgccttggcaaatttgactggcacagtggtcaacctcacccgagagcagtgccaggatccaagtaaagtcccaagtgaaaacaaggatctgtatgagtactcatgggtccagggccctttgcattctaatgagacggaccgactcccccggtgtgtgcgttctactgcacgattagccagggccttgtctcctgcctttgaactgagtcagtggagctctactgaatactctacatggactgagagccgctggaaagatatccgtgcccggatatttctcatcgccagcaaagagcttgagttgatcaccctgacagtgggcttcggcatcctcatcttctccctcatcgtcacctactgcatcaatgccaaagctgatgtccttttcattgctccccgggagccaggagctgtgtcatactgaggaggaccccagcttttcttgccagctcagcagttcacttcctagagcatctgtcccactgggacacaaccactaatttgtcactggaacctccctgggcctgtctcagattgggattaacataaaagagtggaactatccaaaagagacagggagaaataaataaattgcctcccttcctccgctcccctttcccatcaccccttccccatttcctcttccttctctactcatgccagattttgggattacaaatagaagcttcttgctcctgtttaactccctagttacccaccctaatttgcccttcaggacccttctactttttccttcctgccctgtacctctctctgctcctcacccccacccctgtacccagccaccttcctgactgggaaggacataaaaggtttaatgtcagggtcaaactacattgagcccctgaggacaggggcatctctgggctgagcctactgtctccttcccactgtcctttctccaggccctcagatggcacattagggtgggcgtgctgcgggtgggtatcccacctccagcccacagtgctcagttgtactttttattaagctgtaatatctatttttgtttttgtctttttcctttattctttttgtaaatatatatataatgagtttcattaaaatagattatccca

SEQ ID NO: 402897 - DNA, 3132 bp, Homo sapiens
  misc_feature (3)..(3): n is a, c, g, or t
  misc_feature (7)..(8): n is a, c, g, or t
  misc_feature (12)..(12): n is a, c, g, or t
  misc_feature (14)..(16): n is a, c, g, or t
tcngcgnnttcngnnngcgcctggaaacacgaacttccggtctcttaggctccgggccacagagacggtgtcagtggtagcctagagaggccgctaacagacaggagccgaacgggggcttccgctcagcagagaggcaagatggctacggcagggggtggctctggggctgacccgggaagtcggggtctccttcgccttctgtctttctgcgtcctactagcaggcctcttcctggacttcgagcctgaccctctcccactttgtccagatgtctcgtttttcccacaaccccagccacccaccccacagtcgaaaggaacaggtgtgaaagttagctttcttcctcgcgtttagactttttgagacgaaagcaatcttgttctgtgggtgctgtgcggcgcttaaaaggtttgtgcaggggaaactcagtggagaggaagatatatatccccttaaataaaacagctccctgtgttcgcctgctcaacgccactcatcagattggctgccagtcttcaattagtggagacacaggggttatccacgtagtagagaaagaggaggacctacagtgggtattgactgatggccccaaccccccttacatggttctgctggagagcaagcattttaccagggatttaatggagaagctgaaagggagaaccagccgaattgctggtcttgcagtgtccttgaccaagcccagtcctgcctcaggcttctctcctagtgtacagtgcccaaatgatgggtttggtgtttactccaattcctatgggccagagtttgctcactgcagagaaatacagtggaattcgctgggcaatggtttggcttatgaagactttagtttccccatctttcttcttgaagatgaaaatgaaaccaaagtcatcaagcagtgctatcaagatcacaacctgagtcagaatggctcagcaccaaccttcccactatgtgccatgcagctcttttcacacatgcatgctgtcatcagcactgccacctgcatgcggcgcagctccatccaaagcaccttcagcatcaacccagaaatcgtctgtgaccccctgtctgattacaatgtgtggagcatgctaaagcctataaatacaactgggacattaaagcctgacgacagggttgtggttgctgccacccggctggatagtcgttcctttttctggaatgtggccccaggggctgaaagcgcagtggcttcctttgtcacccagctggctgctgctgaagctttgcaaaaggcacctgatgtgaccaccctgccccgcaatgtcatgtttgtcttctttcaaggggaaacttttgactacattggcagctcgaggatggtctacgatatggagaagggcaagtttcccgtgcagttagagaatgttgactcatttgtggagctgggacaggtggccttaagaacttcattagagctttggatgcacacagatcctgtttctcagaaaaatgagtctgtacggaaccaggtggaggatctcctggccacattggagaagagtggtgctggtgtccctgctgtcatcctcaggaggccaaatcagtcccagcctctcccaccatcttccctgcagcgatttcttcgagctcgaaacatctctggcgttgttctggctgaccactctggtgccttccataacaaatattaccagagtatttacgacactgctgagaacattaatgtgagctatcccgaatggctgagccctgaagaggacctgaactttgtaacagacactgccaaggccctggcagatgtggccacggtgctgggacgtgctctgtatgagcttgcaggaggaaccaacttcagcgacacagttcaggctgatccccaaacggttacccgcctgctctatgggttcctgattaaagccaacaactcatggttccagtctatcctcaggcaggacctaaggtcctacttgggtgacgggcctcttcaacattacatcgctgtctccagccccaccaacaccacttatgttgtacagtatgccttggcaaatttgactggcacagtggtcaacctcacccgagagcagtgccaggatccaagtaaagtcccaagtgaaaacaaggatctgtatgagtactcatgggtccagggccctttgcattctaatgagacggaccgactcccccggtgtgtgcgttctactgcacgattagccagggccttgtctcctgcctttgaactgagtcagtggagctctactgaatactctacatggactgagagccgctggaaagatatccgtgcccggatatttctcatcgccagcaaagagcttgagttgatcaccctgacagtgggcttcggcatcctcatcttctccctcatcgtcacctactgcatcaatgccaaagctgatgtccttttcattgctccccgggagccaggagctgtgtcatactgaggaggaccccagcttttcttgccagctcagcagttcacttcctagagcatctgtcccactgggacacaaccactaatttgtcactggaacctccctgggcctgtctcagattgggattaacataaaagagtggaactatccaaaagagacagggagaaataaataaattgcctcccttcctccgctcccctttcccatcaccccttccccatttcctcttccttctctactcatgccagattttgggattacaaatagaagcttcttgctcctgtttaactccctagttacccaccctaatttgcccttcaggacccttctactttttccttcctgccctgtacctctctctgctcctcacccccacccctgtacccagccaccttcctgactgggaaggacataaaaggtttaatgtcagggtcaaactacattgagcccctgaggacaggggcatctctgggctgagcctactgtctccttcccactgtcctttctccaggccctcagatggcacattagggtgggcgtgctgcgggtgggtatcccacctccagcccacagtgctcagttgtactttttattaagctgtaatatctatttttgtttttgtctttttcctttattctttttgtaaatatatatataatgagtttcattaaaatagattatccca

SEQ ID NO: 402898 - DNA, 3107 bp, Homo sapiens
tgtgggcacacaaatgacctgctgatgttaaattaactgacccgtgtatgtcataaggtttctctcaattctgttcacactcttggaaaaatgcctcagaaagttttcttagcccagcacctgtgtattaaccaattagtaatatacatacaggatatacaagcagaagtgtgatcacctgtgcaaccagaatctggcaaatctaaggtcaaacacctttcctttgaccaagttttctctcttttagtgtcactgtcaatggcgctacatggactttgtaataaccctttgaggcacatagctgggtgccatgtagaacatgtatctgttacgataagtgtgtgcccaagaaatcagaagaatggactttaatctcattttagaaagtttgtgcaggggaaactcagtggagaggaagatatatatccccttaaataaaacagctccctgtgttcgcctgctcaacgccactcatcagattggctgccagtcttcaattagtggagacacaggggttatccacgtagtagagaaagaggaggacctacagtgggtattgactgatggccccaaccccccttacatggttctgctggagagcaagcattttaccagggatttaatggagaagctgaaagggagaaccagccgaattgctggtcttgcagtgtccttgaccaagcccagtcctgcctcaggcttctctcctagtgtacagtgcccaaatgatgggtttggtgtttactccaattcctatgggccagagtttgctcactgcagagaaatacagtggaattcgctgggcaatggtttggcttatgaagactttagtttccccatctttcttcttgaagatgaaaatgaaaccaaagtcatcaagcagtgctatcaagatcacaacctgagtcagaatggctcagcaccaaccttcccactatgtgccatgcagctcttttcacacatgcatgctgtcatcagcactgccacctgcatgcggcgcagctccatccaaagcaccttcagcatcaacccagaaatcgtctgtgaccccctgtctgattacaatgtgtggagcatgctaaagcctataaatacaactgggacattaaagcctgacgacagggttgtggttgctgccacccggctggatagtcgttcctttttctggaatgtggccccaggggctgaaagcgcagtggcttcctttgtcacccagctggctgctgctgaagctttgcaaaaggcacctgatgtgaccaccctgccccgcaatgtcatgtttgtcttctttcaaggggaaacttttgactacattggcagctcgaggatggtctacgatatggagaagggcaagtttcccgtgcagttagagaatgttgactcatttgtggagctgggacaggtggccttaagaacttcattagagctttggatgcacacagatcctgtttctcagaaaaatgagtctgtacggaaccaggtggaggatctcctggccacattggagaagagtggtgctggtgtccctgctgtcatcctcaggaggccaaatcagtcccagcctctcccaccatcttccctgcagcgatttcttcgagctcgaaacatctctggcgttgttctggctgaccactctggtgccttccataacaaatattaccagagtatttacgacactgctgagaacattaatgtgagctatcccgaatggctgagccctgaagaggacctgaactttgtaacagacactgccaaggccctggcagatgtggccacggtgctgggacgtgctctgtatgagcttgcaggaggaaccaacttcagcgacacagttcaggctgatccccaaacggttacccgcctgctctatgggttcctgattaaagccaacaactcatggttccagtctatcctcaggcaggacctaaggtcctacttgggtgacgggcctcttcaacattacatcgctgtctccagccccaccaacaccacttatgttgtacagtatgccttggcaaatttgactggcacagtggtcaacctcacccgagagcagtgccaggatccaagtaaagtcccaagtgaaaacaaggatctgtatgagtactcatgggtccagggccctttgcattctaatgagacggaccgactcccccggtgtgtgcgttctactgcacgattagccagggccttgtctcctgcctttgaactgagtcagtggagctctactgaatactctacatggactgagagccgctggaaagatatccgtgcccggatatttctcatcgccagcaaagagcttgagttgatcaccctgacagtgggcttcggcatcctcatcttctccctcatcgtcacctactgcatcaatgccaaagctgatgtccttttcattgctccccgggagccaggagctgtgtcatactgaggaggaccccagcttttcttgccagctcagcagttcacttcctagagcatctgtcccactgggacacaaccactaatttgtcactggaacctccctgggcctgtctcagattgggattaacataaaagagtggaactatccaaaagagacagggagaaataaataaattgcctcccttcctccgctcccctttcccatcaccccttccccatttcctcttccttctctactcatgccagattttgggattacaaatagaagcttcttgctcctgtttaactccctagttacccaccctaatttgcccttcaggacccttctactttttccttcctgccctgtacctctctctgctcctcacccccacccctgtacccagccaccttcctgactgggaaggacataaaaggtttaatgtcagggtcaaactacattgagcccctgaggacaggggcatctctgggctgagcctactgtctccttcccactgtcctttctccaggccctcagatggcacattagggtgggcgtgctgcgggtgggtatcccacctccagcccacagtgctcagttgtactttttattaagctgtaatatctatttttgtttttgtctttttcctttattctttttgtaaatatatatataatgagtttcattaaaatagattatccca

SEQ ID NO: 402899 - DNA, 3010 bp, Homo sapiens
  misc_feature (3)..(3): n is a, c, g, or t
  misc_feature (7)..(8): n is a, c, g, or t
  misc_feature (12)..(12): n is a, c, g, or t
  misc_feature (14)..(16): n is a, c, g, or t
tcngcgnnttcngnnngcgcctggaaacacgaacttccggtctcttaggctccgggccacagagacggtgtcagtggtagcctagagaggccgctaacagacaggagccgaacgggggcttccgctcagcagagaggcaagatggctacggcagggggtggctctggggctgacccgggaagtcggggtctccttcgccttctgtctttctgcgtcctactagcaggtttgtgcaggggaaactcagtggagaggaagatatatatccccttaaataaaacagctccctgtgttcgcctgctcaacgccactcatcagattggctgccagtcttcaattagtggagacacaggggttatccacgtagtagagaaagaggaggacctacagtgggtattgactgatggccccaaccccccttacatggttctgctggagagcaagcattttaccaggcagaatgtcaggctgtctgataccttcctgtgttccttcatggaattcctttcctattccagggatttaatggagaagctgaaagggagaaccagccgaattgctggtcttgcagtgtccttgaccaagcccagtcctgcctcaggcttctctcctagtgtacagtgcccaaatgatgggtttggtgtttactccaattcctatgggccagagtttgctcactgcagagaaatacagtggaattcgctgggcaatggtttggcttatgaagactttagtttccccatctttcttcttgaagatgaaaatgaaaccaaagtcatcaagcagtgctatcaagatcacaacctgagtcagaatggctcagcaccaaccttcccactatgtgccatgcagctcttttcacacatgcatgctgtcatcagcactgccacctgcatgcggcgcagctccatccaaagcaccttcagcatcaacccagaaatcgtctgtgaccccctgtctgattacaatgtgtggagcatgctaaagcctataaatacaactgggacattaaagcctgacgacagggttgtggttgctgccacccggctggatagtcgttcctttttctggaatgtggccccaggggctgaaagcgcagtggcttcctttgtcacccagctggctgctgctgaagctttgcaaaaggcacctgatgtgaccaccctgccccgcaatgtcatgtttgtcttctttcaaggggaaacttttgactacattggcagctcgaggatggtctacgatatggagaagggcaagtttcccgtgcagttagagaatgttgactcatttgtggagctgggacaggtggccttaagaacttcattagagctttggatgcacacagatcctgtttctcagaaaaatgagtctgtacggaaccaggtggaggatctcctggccacattggagaagagtggtgctggtgtccctgctgtcatcctcaggaggccaaatcagtcccagcctctcccaccatcttccctgcagcgatttcttcgagctcgaaacatctctggcgttgttctggctgaccactctggtgccttccataacaaatattaccagagtatttacgacactgctgagaacattaatgtgagctatcccgaatggctgagccctgaagaggacctgaactttgtaacagacactgccaaggccctggcagatgtggccacggtgctgggacgtgctctgtatgagcttgcaggaggaaccaacttcagcgacacagttcaggctgatccccaaacggttacccgcctgctctatgggttcctgattaaagccaacaactcatggttccagtctatcctcaggcaggacctaaggtcctacttgggtgacgggcctcttcaacattacatcgctgtctccagccccaccaacaccacttatgttgtacagtatgccttggcaaatttgactggcacagtggtcaacctcacccgagagcagtgccaggatccaagtaaagtcccaagtgaaaacaaggatctgtatgagtactcatgggtccagggccctttgcattctaatgagacggaccgactcccccggtgtgtgcgttctactgcacgattagccagggccttgtctcctgcctttgaactgagtcagtggagctctactgaatactctacatggactgagagccgctggaaagatatccgtgcccggatatttctcatcgccagcaaagagcttgagttgatcaccctgacagtgggcttcggcatcctcatcttctccctcatcgtcacctactgcatcaatgccaaagctgatgtccttttcattgctccccgggagccaggagctgtgtcatactgaggaggaccccagcttttcttgccagctcagcagttcacttcctagagcatctgtcccactgggacacaaccactaatttgtcactggaacctccctgggcctgtctcagattgggattaacataaaagagtggaactatccaaaagagacagggagaaataaataaattgcctcccttcctccgctcccctttcccatcaccccttccccatttcctcttccttctctactcatgccagattttgggattacaaatagaagcttcttgctcctgtttaactccctagttacccaccctaatttgcccttcaggacccttctactttttccttcctgccctgtacctctctctgctcctcacccccacccctgtacccagccaccttcctgactgggaaggacataaaaggtttaatgtcagggtcaaactacattgagcccctgaggacaggggcatctctgggctgagcctactgtctccttcccactgtcctttctccaggccctcagatggcacattagggtgggcgtgctgcgggtgggtatcccacctccagcccacagtgctcagttgtactttttattaagctgtaatatctatttttgtttttgtctttttcctttattctttttgtaaatatatatataatgagtttcattaaaatagattatccca

SEQ ID NO: 402900 - DNA, 2892 bp, Homo sapiens
  misc_feature (3)..(3): n is a, c, g, or t
  misc_feature (7)..(8): n is a, c, g, or t
  misc_feature (12)..(12): n is a, c, g, or t
  misc_feature (14)..(16): n is a, c, g, or t
tcngcgnnttcngnnngcgcctggaaacacgaacttccggtctcttaggctccgggccacagagacggtgtcagtggtagcctagagaggccgctaacagacaggagccgaacgggggcttccgctcagcagagaggcaagatggctacggcagggggtggctctggggctgacccgggaagtcggggtctccttcgccttctgtctttctgcgtcctactagcaggtttgtgcaggggaaactcagtggagaggaagatatatatccccttaaataaaacagctccctgtgttcgcctgctcaacgccactcatcagattggctgccagtcttcaattagtggagacacaggggttatccacgtagtagagaaagaggaggacctacagtgggtattgactgatggccccaaccccccttacatggttctgctggagagcaagcattttaccagggatttaatggagaagctgaaagggagaaccagccgaattgctggtcttgcagtgtccttgaccaagcccagtcctgcctcaggcttctctcctagtgtacagtgcccaaatgatgggtttggtgtttactccaattcctatgggccagagtttgctcactgcagagaaatacagtggaattcgctgggcaatggtttggcttatgaagactttagtttccccatctttcttcttgaagatgaaaatgaaaccaaagtcatcaagcagtgctatcaagatcacaacctgagtcagaatggctcagcaccaaccttcccactatgtgccatgcagctcttttcacacatgcatgctgtcatcagcactgccacctgcatgcggcgcagctccatccaaagcaccttcagcatcaacccagaaatcgtctgtgaccccctgtctgattacaatgtgtggagcatgctaaagcctataaatacaactgggacattaaagcctgacgacagggttgtggttgctgccacccggctggatagtcgttcctttttctggaatgtggccccaggggctgaaagcgcagtggcttcctttgtcacccagctggctgctgctgaagctttgcaaaaggcacctgatgtgaccaccctgccccgcaatgtcatgtttgtcttctttcaaggggaaacttttgactacattggcagctcgaggatggtctacgatatggagaagggcaagtttcccgtgcagttagagaatgttgactcatttgtggagctgggacaggtggccttaagaacttcattagagctttggatgcacacagatcctgtttctcagaaaaatgagtctgtacggaaccaggtggaggatctcctggccacattggagaagagtggtgctggtgtccctgctgtcatcctcaggaggccaaatcagtcccagcctctcccaccatcttccctgcagcgatttcttcgagctcgaaacatctctggcgttgttctggctgaccactctggtgccttccataacaaatattaccagagtatttacgacactgctgagaacattaatgtgagctatcccgaatggctgagccctgaagaggacctgaactttgtaacagacactgccaaggccctggcagatgtggccacggtgctgggacgtgctctgtatgagcttgcaggaggaaccaacttcagcgacacagttcaggctgatccccaaacggttacccgcctgctctatgggttcctgattaaagccaacaactcatggttccagtctatcctcaggcaggacctaaggtcctacttgggtgacgggcctcttcaacattacatcgctgtctccagccccaccaacaccacttatgttgtacagtatgccttggcaaatttgactggcacagtggtcaacctcacccgagagcagtgccaggatccaagtaaagtcccaagtgaaaacaaggatctgtatgagtactcatgggtccagggccctttgcattctaatgagacggaccgactcccccggtgtgtgcgttctactgcacgattagccagggccttgtctcctgcctttgaactgagtcagtggagctctactgaatactctacatggactgagagccgctggaaagatatccgtgcccggatatttctcatcgccagcaaagagcttgagttgatcaccctgacagtgggcttcggcatcctcatcttctccctcatcgtcacctactgcatcaatgccaaagctgatgtccttttcattgctccccgggagccaggagctgtgtcatactgaggaggaccccagcttttcttgccagctcagcagttcacttcctagagcatctgtcccactgggacacaaccactaatttgtcactggaacctccctgggcctgtctcagattgggattaacataaaagagtggaacttcccatcaccccttccccatttcctcttccttctctactcatgccagattttgggattacaaatagaagcttcttgctcctgtttaactccctagttacccaccctaatttgcccttcaggacccttctactttttccttcctgccctgtacctctctctgctcctcacccccacccctgtacccagccaccttcctgactgggaaggacataaaaggtttaatgtcagggtcaaactacattgagcccctgaggacaggggcatctctgggctgagcctactgtctccttcccactgtcctttctccaggccctcagatggcacattagggtgggcgtgctgcgggtgggtatcccacctccagcccacagtgctcagttgtactttttattaagctgtaatatctatttttgtttttgtctttttcctttattctttttgtaaatatatatataatgagtttcattaaaatagattatccca

SEQ ID NO: 402901 - DNA, 2971 bp, Homo sapiens
  misc_feature (3)..(3): n is a, c, g, or t
  misc_feature (7)..(8): n is a, c, g, or t
  misc_feature (12)..(12): n is a, c, g, or t
  misc_feature (14)..(16): n is a, c, g, or t
  misc_feature (2951)..(2951): n is a, c, g, or t
  misc_feature (2953)..(2954): n is a, c, g, or t
  misc_feature (2958)..(2958): n is a, c, g, or t
tcngcgnnttcngnnngcgcctggaaacacgaacttccggtctcttaggctccgggccacagagacggtgtcagtggtagcctagagaggccgctaacagacaggagccgaacgggggcttccgctcagcagagaggcaagatggctacggcagggggtggctctggggctgacccgggaagtcggggtctccttcgccttctgtctttctgcgtcctactagcaggtttgtgcaggggaaactcagtggagaggaagatatatatccccttaaataaaacagctccctgtgttcgcctgctcaacgccactcatcagattggctgccagtcttcaattagtggagacacaggggttatccacgtagtagagaaagaggaggacctacagtgggtattgactgatggccccaaccccccttacatggttctgctggagagcaagcattttaccagggatttaatggagaagctgaaagggagaaccagccgaattgctggtcttgcagtgtccttgaccaagcccagtcctgcctcaggcttctctcctagtgtacagtgcccaaatgatgggtttggtgtttactccaattcctatgggccagagtttgctcactgcagagaaatacagtggaattcgctgggcaatggtttggcttatgaagactttagtttccccatctttcttcttgaagatgaaaatgaaaccaaagtcatcaagcagtgctatcaagatcacaacctgagtcagaatggctcagcaccaaccttcccactatgtgccatgcagctcttttcacacatgcatgctgtcatcagcactgccacctgcatgcggcgcagctccatccaaagcaccttcagcatcaacccagaaatcgtctgtgaccccctgtctgattacaatgtgtggagcatgctaaagcctataaatacaactgggacattaaagcctgacgacagggttgtggttgctgccacccggctggatagtcgttcctttttctggaatgtggccccaggggctgaaagcgcagtggcttcctttgtcacccagctggctgctgctgaagctttgcaaaaggcacctgatgtgaccaccctgccccgcaatgtcatgtttgtcttctttcaaggggaaacttttgactacattggcagctcgaggatggtctacgatatggagaagggcaagtttcccgtgcagttagagaatgttgactcatttgtggagctgggacaggtggccttaagaacttcattagagctttggatgcacacagatcctgtttctcagaaaaatgagtctgtacggaaccaggtggaggatctcctggccacattggagaagagtggtgctggtgtccctgctgtcatcctcaggaggccaaatcagtcccagcctctcccaccatcttccctgcagcgatttcttcgagctcgaaacatctctggcgttgttctggctgaccactctggtgccttccataacaaatattaccagagtatttacgacactgctgagaacattaatgtgagctatcccgaatggctgagccctgaagaggacctgaactttgtaacagacactgccaaggccctggcagatgtggccacggtgctgggacgtgctctgtatgagcttgcaggaggaaccaacttcagcgacacagttcaggctgatccccaaacggttacccgcctgctctatgggttcctgattaaagccaacaactcatggttccagtctatcctcaggcaggacctaaggtcctacttgggtgacgggcctcttcaacattacatcgctgtctccagccccaccaacaccacttatgttgtacagtatgccttggcaaatttgactggcacagtggtcaacctcacccgagagcagtgccaggatccaagtaaagtcccaagtgaaaacaaggatctgtatgagtactcatgggtccagggccctttgcattctaatgagacggaccgactcccccggtgtgtgcgttctactgcacgattagccagggccttgtctcctgcctttgaactgagtcagtggagctctactgaatactctacatggactgagagccgctggaaagatatccgtgcccggatatttctcatcgccagcaaagagcttgagttgatcaccctgacagtgggcttcggcatcctcatcttctccctcatcgtcacctactgcatcaatgccaaagctgatgtccttttcattgctccccgggagccaggagctgtgtcatactgaggaggaccccagcttttcttgccagctcagcagttcacttcctagagcatctgtcccactgggacacaaccactaatttgtcactggaacctccctgggcctgtctcagattgggattaacataaaagagtggaactatccaaaagagacagggagaaataaataaattgcctcccttcctccgctcccctttcccatcaccccttccccatttcctcttccttctctactcatgccagattttgggattacaaatagaagcttcttgctcctgtttaactccctagttacccaccctaatttgcccttcaggacccttctactttttccttcctgccctgtacctctctctgctcctcacccccacccctgtacccagccaccttcctgactgggaaggacataaaaggtttaatgtcagggtcaaactacattgagcccctgaggacaggggcatctctgggctgagcctactgtctccttcccactgtcctttctccaggccctcagatggcacattagggtgggcgtgctgcgggtgggtatcccacctccagcccacagtgctcagttgtactttttattaagctgtaatatctatttttgtttttgtctttttcctttattctttttgtaaatatatatataatgagtttcattaaaatagattatcccaaaanannaganaaaaagagaagac

SEQ ID NO: 402902 - DNA, 2049 bp, Homo sapiens
ggatcctctagagacgcagctcatccaaagcacttcaacatcaaccagaaatcgtctgtgaccccctgtctgattacaatgtgtggagcatgctaaagcctataaatacaactgggacattaaagcctgacgacagggttgtggttgctgccacccggctggctgctgctgaagctttgcaaaaggcacctgatgtgaccaccctgccccgcaatgtcatgtttgtcttctttcaaggggaaacttttgactacattggcagctcgaggatggtctacgatatggagaagggcaagtttcccgtgcagttagagaatgttgactcatttgtggagctgggacaggtggccttaagaacttcattagagctttggatgcacacagatcctgtttctcagaaaaatgagtctgtacggaaccaggtggaggatctcctggccacattggagaagagtggtgctggtgtccctgctgtcatcctcaggaggccaaatcagtcccagcctctcccaccatcttccctgcagcgatttcttcgagctcgaaacatctctggcgttgttctggctgaccactctggtgccttccataacaaatattaccagagtatttacgacactgctgagaacattaatgtgagctatcccgaatggctgagccctgaagaggacctgaactttgtaacagacactgccaaggccctggcagatgtggccacggtgctgggacgtgctctgtatgagcttgcaggaggaaccaacttcagcgacacagttcaggctgatccccaaacggttacccgcctgctctatgggttcctgattaaagccaacaactcatggttccagtctatcctcaggcaggacctaaggtcctacttgggtgacgggcctcttcaacattacatcgctgtctccagccccaccaacaccacttatgttgtacagtatgccttggcaaatttgactggcacagtggtcaacctcacccgagagcagtgccaggatccaagtaaagtcccaagtgaaaacaaggatctgtatgagtactcatgggtccagggccctttgcattctaatgagacggaccgactcccccggtgtgtgcgttctactgcacgattagccagggccttgtctcctgcctttgaactgagtcagtggagctctactgaatactctacatggactgagagccgctggaaagatatccgtgcccggatatttctcatcgccagcaaagagcttgagttgatcaccctgacagtgggcttcggcatcctcatcttctccctcatcgtcacctactgcatcaatgccaaagctgatgtccttttcattgctccccgggagccaggagctgtgtcatactgaggaggaccccagcttttcttgccagctcagcagttcacttcctagagcatctgtcccactgggacacaaccactaatttgtcactggaacctccctgggcctgtctcagattgggattaacataaaagagtggaactatccaaaagagacagggagaaataaataaattgcctcccttcctccgctcccctttcccatcaccccttccccatttcctcttccttctctactcatgccagattttgggattacaaatagaagcttcttgctcctgtttaactccctagttacccaccctaatttgcccttcaggacccttctactttttccttcctgccctgtacctctctctgctcctcacccccacccctgtacccagccaccttcctgactgggaaggacataaaaggtttaatgtcagggtcaaactacattgagcccctgaggacaggggcatctctgggctgagcctactgtctccttcccactgtcctttctccaggccctcagatggcacattagggtgggcgtgctgcgggtgggtatcccacctccagcccacagtgctcagttgtactttttattaagctgtaatatctatttttgtttttgtctttttcctttattctttttgtaaatatatatataatgagtttcattaaaatagattatccca

SEQ ID NO: 402903 - DNA, 3178 bp, Homo sapiens
  misc_feature (3)..(3): n is a, c, g, or t
  misc_feature (7)..(8): n is a, c, g, or t
  misc_feature (12)..(12): n is a, c, g, or t
  misc_feature (14)..(16): n is a, c, g, or t
tcngcgnnttcngnnngcgcctggaaacacgaacttccggtctcttaggctccgggccacagagacggtgtcagtggtagcctagagaggccgctaacagacaggagccgaacgggggcttccgctcagcagagaggcaagatggctacggcagggggtggctctggggctgacccgggaagtcggggtctccttcgccttctgtctttctgcgtcctactagcaggtttgtgcaggggaaactcagtggagaggaagatatatatccccttaaataaaacagctccctgtgttcgcctgctcaacgccactcatcagattggctgccagtcttcaattagtggagacacaggggttatccacgtagtagagaaagaggaggacctacagtgggtattgactgatggccccaaccccccttacatggttctgctggagagcaagcattttaccagggatttaatggagaagctgaaagggagaaccagccgaattgctggtcttgcagtgtccttgaccaagcccagtcctgcctcaggcttctctcctagtgtacagtgcccaaatgatgggtttggtgtttactccaattcctatgggccagagtttgctcactgcagagaaatacagtggaattcgctgggcaatggtttggcttatgaagactttagtttccccatctttcttcttgaagatgaaaatgaaaccaaagtcatcaagcagtgctatcaagatcacaacctgagtcagaatggctcagcaccaaccttcccactatgtgccatgcagctcttttcacacatgcatgctgtcatcagcactgccacctgcatgcggcgcagctccatccaaagcaccttcagcatcaacccagaaatcgtctgtgaccccctgtctgattacaatgtgtggagcatgctaaagcctataaatacaactgggacattaaagcctgacgacagggttgtggttgctgccacccggctggatagtcgttcctttttctggaatgtggccccaggggctgaaagcgcagtggcttcctttgtcacccagctggctgctgctgaagctttgcaaaaggcacctgatgtgaccaccctgccccgcaatgtcatgtttgtcttctttcaaggggaaacttttgactacattggcagctcgaggatggtctacgatatggagaagggcaagtttcccgtgcagttagagaatgttgactcatttgtggagctgggacaggtggccttaagaacttcattagagctttggatgcacacagatcctgtttctcagaaaaatgagtctgtacggaaccaggtggaggatctcctggccacattggagaagagtggtgctggtgtccctgctgtcatcctcaggaggccaaatcagtcccagcctctcccaccatcttccctgcagcgatttcttcgagctcgaaacatctctggcgttgttctggctgaccactctggtgccttccataacaaatattaccagagtatttacgacactgctgagaacattaatgtgagctatcccgaatggctgagccctgaagaggacctgaactttgtaacagacactgccaaggccctggcagatgtggccacggtgctgggacgtgctctgtatgagcttgcaggaggaaccaacttcagcgacacagttcaggctgatccccaaacggttacccgcctgctctatgggttcctgattaaagccaacaactcatggttccagtctatcctcaggcaggacctaaggtcctacttgggtgacgggcctcttcaacattacatcgctgtctccagccccaccaacaccacttatgttgtacagtatgccttggcaaatttgactggcacagtggtcaacctcacccgagagcagtgccaggatccaagtaaagtcccaagtgaaaacaaggatgtgagtggtggtgggtgttggaagtgccctggggcccctttcccttgggaaagttggaggttcttctagacctagttagacccaggggattgggatggagaggtggagagatgcagtcctcagcaattgggtgttgaaaagcctgggtgaaaatggaccatctgaagggtaaagggacagcagccagttagctcaattggttagagcatggcactgatagagggtagagggaacgagtgagaagaggatcaccctagccgtgtgttgtggcgcatcttctgtgcagctgtatgagtactcatgggtccagggccctttgcattctaatgagacggaccgactcccccggtgtgtgcgttctactgcacgattagccagggccttgtctcctgcctttgaactgagtcagtggagctctactgaatactctacatggactgagagccgctggaaagatatccgtgcccggatatttctcatcgccagcaaagagcttgagttgatcaccctgacagtgggcttcggcatcctcatcttctccctcatcgtcacctactgcatcaatgccaaagctgatgtccttttcattgctccccgggagccaggagctgtgtcatactgaggaggaccccagcttttcttgccagctcagcagttcacttcctagagcatctgtcccactgggacacaaccactaatttgtcactggaacctccctgggcctgtctcagattgggattaacataaaagagtggaacttcccatcaccccttccccatttcctcttccttctctactcatgccagattttgggattacaaatagaagcttcttgctcctgtttaactccctagttacccaccctaatttgcccttcaggacccttctactttttccttcctgccctgtacctctctctgctcctcacccccacccctgtacccagccaccttcctgactgggaaggacataaaaggtttaatgtcagggtcaaactacattgagcccctgaggacaggggcatctctgggctgagcctactgtctccttcccactgtcctttctccaggccctcagatggcacattagggtgggcgtgctgcgggtgggtatcccacctccagcccacagtgctcagttgtactttttattaagctgtaatatctatttttgtttttgtctttttcctttattctttttgtaaatatatatataatgagtttcattaaaatagattatccca

SEQ ID NO: 402904 - DNA, 2674 bp, Homo sapiens
  misc_feature (3)..(3): n is a, c, g, or t
  misc_feature (7)..(8): n is a, c, g, or t
  misc_feature (12)..(12): n is a, c, g, or t
  misc_feature (14)..(16): n is a, c, g, or t
tcngcgnnttcngnnngcgcctggaaacacgaacttccggtctcttaggctccgggccacagagacggtgtcagtggtagcctagagaggccgctaacagacaggagccgaacgggggcttccgctcagcagagaggcaagatggctacggcagggggtggctctggggctgacccgggaagtcggggtctccttcgccttctgtctttctgcgtcctactagcaggtttgtgcaggggaaactcagtggagaggaagatatatatccccttaaataaaacagctccctgtgttcgcctgctcaacgccactcatcagattggctgccagtcttcaattagtggagacacaggggttatccacgtagtagagaaagaggaggacctacagtgggtattgactgatggccccaaccccccttacatggttctgctggagagcaagcattttaccagggatttaatggagaagctgaaagggagaaccagccgaattgctggtcttgcagtgtccttgaccaagcccagtcctgcctcaggcttctctcctagtgtacagtgcccaaatgatgggtttggtgtttactccaattcctatgggccagagtttgctcactgcagagaaatacagtggaattcgctgggcaatggtttggcttatgaagactttagtttccccatctttcttcttgaagatgaaaatgaaaccaaagtcatcaagcagtgctatcaagatcacaacctgagtcagaatggctcagcaccaaccttcccactatgtgccatgcagctcttttcacacatgcatgctgtcatcagcactgccacctgcatgcggcgcagctccatccaaagcaccttcagcatcaacccagaaatcgtctgtgaccccctgtctgattacaatgtgtggagcatgctaaagcctataaatacaactgggacattaaagcctgacgacagggttgtggttgctgccacccggctggatagtcgttcctttttctggaatgtggccccaggggctgaaagcgcagtggcttcctttgtcacccagctggctgctgctgaagctttgcaaaaggcacctgatgtgaccaccctgccccgcaatgtcatgtttgtcttctttcaaggggaaacttttgactacattggcagctcgaggatggtctacgatatggagaagggcaagtttcccgtgcagttagagaatgttgactcatttgtggagctgggacaggtggccttaagaacttcattagagctttggatgcacacagatcctgtttctcagaaaaatgagtctgtacggaaccaggtggaggatctcctggccacattggagaagagtggtgctggtgtccctgctgtcatcctcaggaggccaaatcagtcccagcctctcccaccatcttccctgcagcgatttcttcgagctcgaaacatctctggcgttgttctggctgaccactctggtgccttccataacaaatattaccagagtatttacgacactgctgagaacattaatgtgagctatcccgaatggctgagccctgaagaggacctgaactttgtaacagacactgccaaggccctggcagatgtggccacggtgctgggacgtgctctgtatgagcttgcaggaggaaccaacttcagcgacacagttcaggctgatccccaaacggttacccgcctgctctatgggttcctgattaaagccaacaactcatggttccagtctatcctcaggcaggacctaaggtcctacttgggtgacgggcctcttcaacattacatcgctgtctccagccccaccaacaccacttatgttgtacagtatgccttggcaaatttgactggcacagtggtcaacctcacccgagagcagtgccaggatccaagtaaagtcccaagtgaaaacaaggatctgtatgagtactcatgggtccagggccctttgcattctaatgagacggaccgactcccccggtgtgtgcgttctactgcacgattagccagggccttgtctcctgcctttgaactgagtcagtggagctctactgaatactctacatggactgagagccgctggaaagatatccgtgcccggatatttctcatcgccagcaaagagcttgagttgatcaccctgacagtgggcttcggcatcctcatcttctccctcatcgtcacctactgcatcaatgccaaagctgatgtccttttcattgctccccgggagccaggagctgtgtcatactgaggaggaccccagcttttcttgccagctcagcagttcacttcctagagcatctgtcccactgggacacaaccactaatttgtcactggaacctccctgggcctgtctcagattgggattaacataaaagagtggaactatccaaaagagacagggagaaataaataaattgcctcccttcctccgctcccctttcccatcaccccttccccatttcctcttccttctctactcatgccagattttgggattacaaatagaagcttcttgctcctgtttaactccctagttacccaccctaatttgcccttcaggacccttctactttttccttcctgccctgtacctctctctgctcctcacccccacccctgtaccgtctcctcaggggatcctctagagtcg

SEQ ID NO: 402905 - DNA, 1388 bp, Homo sapiens
cccacgcgtccggaactttgtaacagacactgccaaggccctggcagatgtggccacggtgctgggacgtgctctgtatgagcttgcaggaggaaccaacttcagcgacacagttcaggctgatccccaaacggttacccgcctgctctatgggttcctgattaaagccaacaactcatggttccagtctatcctcaggcaggacctaaggtcctacttgggtgacgggcctcttcaacattacatcgctgtctccagccccaccaacaccacttatgttgtacagtatgccttggcaaatttgactggcacagtggtcaacctcacccgagagcagtgccaggatccaagtaaagtcccaagtgaaaacaaggatctgtatgagtactcatgggtccagggccctttgcattctaatgagacggaccgactcccccggtgtgtgcgttctactgcacgattagccagggccttgtctcctgcctttgaactgagtcagtggagctctactgaatactctacatggactgagagccgctggaaagatatccgtgcccggatatttctcatcgccagcaaagagcttgagttgatcaccctgacagtgggcttcggcatcctcatcttctccctcatcgtcacctactgcatcaatgccaaagctgatgtccttttcattgctccccgggagccaggagctgtgtcatactgaggaggaccccagcttttcttgccagctcagcagttcacttcctagagcatctgtcccactgggacacaaccactaatttgtcactggaacctccctgggcctgtctcagattgggattaacataaaagagtggaactatccaaaagagacagggagaaataaataaattgcctcccttcctccgctcccctttcccatcaccccttccccatttcctcttccttctctactcatgccagattttgggattacaaatagaagcttcttgctcctgtttaactccctagttacccaccctaatttgcccttcaggacccttctactttttccttcctgccctgtacctctctctgctcctcacccccacccctgtacccagccaccttcctgactgggaaggacataaaaggtttaatgtcagggtcaaactacattgagcccctgaggacaggggcatctctgggctgagcctactgtctccttcccactgtcctttctccaggccctcagatggcacattagggtgggcgtgctgcgggtgggtatcccacctccagcccacagtgctcagttgtactttttattaagctgtaatatctatttttgtttttgtctttttcctttattctttttgtaaatatatatataatgagtttcattaaaatagattatccca

SEQ ID NO: 402906 - DNA, 1913 bp, Homo sapiens
  misc_feature (3)..(3): n is a, c, g, or t
  misc_feature (7)..(8): n is a, c, g, or t
  misc_feature (12)..(12): n is a, c, g, or t
  misc_feature (14)..(16): n is a, c, g, or t
tcngcgnnttcngnnngcgcctggaaacacgaacttccggtctcttaggctccgggccacagagacggtgtcagtggtagcctagagaggccgctaacagacaggagccgaacgggggcttccgctcagcagagaggcaagatggctacggcagggggtggctctggggctgacccgggaagtcggggtctccttcgccttctgtctttctgcgtcctactagcaggtttgtgcaggggaaactcagtggagaggaagatatatatccccttaaataaaacagctccctgtgttcgcctgctcaacgccactcatcagattggctgccagtcttcaattagtggagacacaggggttatccacgtagtagagaaagaggaggacctacagtgggtattgactgatggccccaaccccccttacatggttctgctggagagcaagcattttaccagggatttaatggagaagctgaaagggagaaccagccgaattgctggtcttgcagtgtccttgaccaagcccagtcctgcctcaggcttctctcctagtgtacagtgcccaaatgatgggtttggtgtttactccaattcctatgggccagagtttgctcactgcagagaaatacagtggaattcgctgggcaatggtttggcttatgaagactttagtttccccatctttcttcttgaagatgaaaatgaaaccaaagtcatcaagcagtgctatcaagatcacaacctgagtcagaatggctcagcaccaaccttcccactatgtgccatgcagctcttttcacacatgcatgctgtcatcagcactgccacctgcatgcggcgcagctccatccaaagcaccttcagcatcaacccagaaatcgtctgtgaccccctgtctgattacaatgtgtggagcatgctaaagcctataaatacaactgggacattaaagcctgacgacagggttgtggttgctgccacccggctggatagtcgttcctttttctggaatgtggccccaggggctgaaagcgcagtggcttcctttgtcacccagctggctgctgctgaagctttgcaaaaggcacctgatgtgaccaccctgccccgcaatgtcatgtttgtcttctttcaaggggaaacttttgactacattggcagctcgaggatggtctacgatatggagaagggcaagtttcccgtgcagttagagaatgttgactcatttgtggagctgggacaggtggccttaagaacttcattagagctttggatgcacacagatcctgtttctcagaaaaatgagtctgtacggaaccagctggaacctccctgggcctgtctcagattgggattaacataaaagagtggaactatccaaaagagacagggagaaataaataaattgcctcccttcctccgctcccctttcccatcaccccttccccatttcctcttccttctctactcatgccagattttgggattacaaatagaagcttcttgctcctgtttaactccctagttacccaccctaatttgcccttcaggacccttctactttttccttcctgccctgtacctctctctgctcctcacccccacccctgtacccagccaccttcctgactgggaaggacataaaaggtttaatgtcagggtcaaactacattgagcccctgaggacaggggcatctctgggctgagcctactgtctccttcccactgtcctttctccaggccctcagatggcacattagggtgggcgtgctgcgggtgggtatcccacctccagcccacagtgctcagttgtactttttattaagctgtaatatctatttttgtttttgtctttttcctttattctttttgtaaatatatatataatgagtttcattaaaatagattatccca

SEQ ID NO: 402907 - DNA, 1113 bp, Homo sapiens
gggtcgtatgcatagatttgcacatggtgggctggtatgtggtcaacctcacccgagagcagtgccaggatccaagtaaagtcccaagtgaaaacaaggatctgtatgagtactcatgggtccagggccctttgcattctaatgagacggaccgactcccccggtgtgtgcgttctactgcacgattagccagggccttgtctcctgcctttgaactgagtcagtggagctctactgaatactctacatggactgagagccgctggaaagatatccgtgcccggatatttctcatcgccagcaaagagcttgagttgatcaccctgacagtgggcttcggcatcctcatcttctccctcatcgtcacctactgcatcaatgccaaagctgatgtccttttcattgctccccgggagccaggagctgtgtcatactgaggaggaccccagcttttcttgccagctcagcagttcacttcctagagcatctgtcccactgggacacaaccactaatttgtcactggaacctccctgggcctgtctcagattgggattaacataaaagagtggaactatccaaaagagacagggagaaataaataaattgcctcccttcctccgctcccctttcccatcaccccttccccatttcctcttccttctctactcatgccagattttgggattacaaatagaagcttcttgctcctgtttaactccctagttacccaccctaatttgcccttcaggacccttctactttttccttcctgccctgtacctctctctgctcctcacccccacccctgtacccagccaccttcctgactgggaaggacataaaaggtttaatgtcagggtcaaactacattgagcccctgaggacaggggcatctctgggctgagcctactgtctccttcccactgtcctttctccaggccctcagatggcacattagggtgggcgtgctgcgggtgggtatcccacctccagcccacagtgctcagttgtactttttattaagctgtaatatctatttttgtttttgtctttttcctttattctttttgtaaatatatatataatgagtttcattaaaatagattatccca

SEQ ID NO: 402908 - DNA, 2396 bp, Homo sapiens
  misc_feature (3)..(3): n is a, c, g, or t
  misc_feature (7)..(8): n is a, c, g, or t
  misc_feature (12)..(12): n is a, c, g, or t
  misc_feature (14)..(16): n is a, c, g, or t
tcngcgnnttcngnnngcgcctggaaacacgaacttccggtctcttaggctccgggccacagagacggtgtcagtggtagcctagagaggccgctaacagacaggagccgaacgggggcttccgctcagcagagaggcaagatggctacggcagggggtggctctggggctgacccgggaagtcggggtctccttcgccttctgtctttctgcgtcctactagcaggtttgtgcaggggaaactcagtggagaggaagatatatatccccttaaataaaacagctccctgtgttcgcctgctcaacgccactcatcagattggctgccagtcttcaattagtggagacacaggggttatccacgtagtagagaaagaggaggacctacagtgggtattgactgatggccccaaccccccttacatggttctgctggagagcaagcattttaccagggatttaatggagaagctgaaagggagaaccagccgaattgctggtcttgcagtgtccttgaccaagcccagtcctgcctcaggcttctctcctagtgtacagtgcccaaatgatgggtttggtgtttactccaattcctatgggccagagtttgctcactgcagagaaatacagtggaattcgctgggcaatggtttggcttatgaagactttagtttccccatctttcttcttgaagatgaaaatgaaaccaaagtcatcaagcagtgctatcaagatcacaacctgagtcagaatggctcagcaccaaccttcccactatgtgccatgcagctcttttcacacatgcatgctgtcatcagcactgccacctgcatgcggcgcagctccatccaaagcaccttcagcatcaacccagaaatcgtctgtgaccccctgtctgattacaatgtgtggagcatgctaaagcctataaatacaactgggacattaaagcctgacgacagggttgtggttgctgccacccggctggatagtcgttcctttttctggaatgtggccccaggggctgaaagcgcagtggcttcctttgtcacccagctggctgctgctgaagctttgcaaaaggcacctgatgtgaccaccctgccccgcaatgtcatgtttgtcttctttcaaggggaaacttttgactacattggcagctcgaggatggtctacgatatggagaagggcaagtttcccgtgcagttagagaatgttgactcatttgtggagctgggacaggtggccttaagaacttcattagagctttggatgcacacagatcctgtttctcagaaaaatgagtctgtacggaaccaggtggaggatctcctggccacattggagaagagtggtgctggtgtccctgctgtcatcctcaggaggccaaatcagtcccagcctctcccaccatcttccctgcagcgatttcttcgagctcgaaacatctctggcgttgttctggctgaccactctggtgccttccataacaaatattaccagagtatttacgacactgctgagaacattaatgtgagctatcccgaatggctgagccctgaagaggacctgaactttgtaacagacactgccaaggccctggcagatgtggccacggtgctgggacgtgctctgtatgagcttgcaggaggaaccaacttcagcgacacagttcaggctgatccccaaacggttacccgcctgctctatgggttcctgattaaagccaacaactcatggttccagtctatcctcaggcaggacctaaggtcctacttgggtgacgggcctcttcaacattacatcgctgtctccagccccaccaacaccacttatgttgtacagtatgccttggcaaatttgactggcacagtggtcaacctcacccgagagcagtgccaggatccaagtaaagtcccaagtgaaaacaaggatctgtatgagtactcatgggtccagggccctttgcattctaatgagacggaccgactcccccggtgtgtgcgttctactgcacgattagccagggccttgtctcctgcctttgaactgagtcagtggagctctactgaatactctacatggactgagagccgctggaaagatatccgtgcccggatatttctcatcgccagcaaagagcttgagttgatcaccctgacagtgggcttcggcatcctcatcttctccctcatcgtcacctactgcatcaatgccaaagctgatgtccttttcattgctccccgggagccaggagctgtgtcatactgaggaggaccccagcttttcttgccagctcagcagttcacttcctagagcatctgtcccactgggacacaaccactaatttgtcaccatctctgagtcccacagtcgaagggatcctcaagagcagc

SEQ ID NO: 402909 - DNA, 997 bp, Homo sapiens
gatggctacggagggggtggctctgatgagacggaccgactcccccggtgtgtgcgttctactgcacgattagccagggccttgtctcctgcctttgaactgagtcagtggagctctactgaatactctacatggactgagagccgctggaaagatatccgtgcccggatatttctcatcgccagcaaagagcttgagttgatcaccctgacagtgggcttcggcatcctcatcttctccctcatcgtcacctactgcatcaatgccaaagctgatgtccttttcattgctccccgggagccaggagctgtgtcatactgaggaggaccccagcttttcttgccagctcagcagttcacttcctagagcatctgtcccactgggacacaaccactaatttgtcactggaacctccctgggcctgtctcagattgggattaacataaaagagtggaactatccaaaagagacagggagaaataaataaattgcctcccttcctccgctcccctttcccatcaccccttccccatttcctcttccttctctactcatgccagattttgggattacaaatagaagcttcttgctcctgtttaactccctagttacccaccctaatttgcccttcaggacccttctactttttccttcctgccctgtacctctctctgctcctcacccccacccctgtacccagccaccttcctgactgggaaggacataaaaggtttaatgtcagggtcaaactacattgagcccctgaggacaggggcatctctgggctgagcctactgtctccttcccactgtcctttctccaggccctcagatggcacattagggtgggcgtgctgcgggtgggtatcccacctccagcccacagtgctcagttgtactttttattaagctgtaatatctatttttgtttttgtctttttcctttattctttttgtaaatatatatataatgagtttcattaaaatagattatccca

SEQ ID NO: 402910 - DNA, 995 bp, Homo sapiens
ctcatttcagttcacttcctagagcatctgtgcccactgggacacaaccactaatttgtcactgaacctcctgggcctgtctcagattgggattaacataaaagagtggagctctactgaatactctacatggactgagagccgctggaaagatatccgtgcccggatatttctcatcgccagcaaagagcttgagttgatcaccctgacagtgggcttcggcatcctcatcttctccctcatcgtcacctactgcatcaatgccaaagctgatgtccttttcattgctccccgggagccaggagctgtgtcatactgaggaggaccccagcttttcttgccagctcagcagttcacttcctagagcatctgtcccactgggacacaaccactaatttgtcactggaacctccctgggcctgtctcagattgggattaacataaaagagtggaactatccaaaagagacagggagaaataaataaattgcctcccttcctccgctcccctttcccatcaccccttccccatttcctcttccttctctactcatgccagattttgggattacaaatagaagcttcttgctcctgtttaactccctagttacccaccctaatttgcccttcaggacccttctactttttccttcctgccctgtacctctctctgctcctcacccccacccctgtacccagccaccttcctgactgggaaggacataaaaggtttaatgtcagggtcaaactacattgagcccctgaggacaggggcatctctgggctgagcctactgtctccttcccactgtcctttctccaggccctcagatggcacattagggtgggcgtgctgcgggtgggtatcccacctccagcccacagtgctcagttgtactttttattaagctgtaatatctatttttgtttttgtctttttcctttattctttttgtaaatatatatataatgagtttcattaaaatagattatccca

SEQ ID NO: 402911 - DNA, 1365 bp, Homo sapiens
atttttagtagagatgggtttcaccatgttggtcaggctagtcttaaactcctgacctcaggtgatccacctttcttggcctcccaaagtgctgggattataggcgtgagccactgcacccggccaggaggcctttcttcacagatagtttgagtaggtgttcattctggagagcccctgtggatcccagaactctttcacagcttcaactcccggctggcattccccatctggcacagctgggatgagtcagtctaatgtaccgagctcctgtcacaagtcagtaatgtaagtgccgcaagggaaccaaagccatgggccctcctttcaaaatgcctaaaatctaagtaatacaagatggaagcaagaacagagatgctttacttctcttttcaaatggggagacaaagtctgtaggctggagagatgttgcccatgattattccatagttggtgcttagagccagcatccgaattcccatggctccaaaccccaaacagttatccaaaaaactgcactgagttctgagaatgcctttgtcctttcctgccctccctccccctgcttgatcaccctgacagtgggcttcggcatcctcatcttctccctcatcgtcacctactgcatcaatgccaaagctgatgtccttttcattgctccccgggagccaggagctgtgtcatactgaggaggaccccagcttttcttgccagctcagcagttcacttcctagagcatctgtcccactgggacacaaccactaatttgtcactggaacctccctgggcctgtctcagattgggattaacataaaagagtggaactatccaaaagagacagggagaaataaataaattgcctcccttcctccgctcccctttcccatcaccccttccccatttcctcttccttctctactcatgccagattttgggattacaaatagaagcttcttgctcctgtttaactccctagttacccaccctaatttgcccttcaggacccttctactttttccttcctgccctgtacctctctctgctcctcacccccacccctgtacccagccaccttcctgactgggaaggacataaaaggtttaatgtcagggtcaaactacattgagcccctgaggacaggggcatctctgggctgagcctactgtctccttcccactgtcctttctccaggccctcagatggcacattagggtgggcgtgctgcgggtgggtatcccacctccagcccacagtgctcagttgtactttttattaagctgtaatatctatttttgtttttgtctttttcctttattctttttgtaaatatatatataatgagtttcattaaaatagattatccca

SEQ ID NO: 402912 - DNA, 1349 bp, Homo sapiens
  misc_feature (3)..(3): n is a, c, g, or t
  misc_feature (7)..(8): n is a, c, g, or t
  misc_feature (12)..(12): n is a, c, g, or t
  misc_feature (14)..(16): n is a, c, g, or t
tcngcgnnttcngnnngcgcctggaaacacgaacttccggtctcttaggctccgggccacagagacggtgtcagtggtagcctagagaggccgctaacagacaggagccgaacgggggcttccgctcagcagagaggcaagatggctacggcagggggtggctctggggctgacccgggaagtcggggtctccttcgccttctgtctttctgcgtcctactagcaggtttgtgcaggggaaactcagtggagaggaagatatatatccccttaaataaaacagctccctgtgttcgcctgctcaacgccactcatcagattggctgccagtcttcaattagtggagacacaggggttatccacgtagtagagaaagaggaggacctacagtgggtattgactgatggccccaaccccccttacatggttctgctggagagcaagcattttaccagggatttaatggagaagctgaaagggagaaccagccgaattgctggtcttgcagtgtccttgaccaagcccagtcctgcctcaggcttctctcctagtgtacagtgcccaaatgatgggtttggtgtttactccaattcctatgggccagagtttgctcactgcagagaaatacagtggaattcgctgggcaatggtttggcttatgaagactttagtttccccatctttcttcttgaagatgaaaatgaaaccaaagtcatcaagcagtgctatcaagatcacaacctgagtcagaatggctcagcaccaaccttcccactatgtgccatgcagctcttttcacacatgcatgctgtcatcagcactgccacctgcatgcggcgcagctccatccaaagcaccttcagcatcaacccagaaatcgtctgtgaccccctgtctgattacaatgtgtggagcatgctaaagcctataaatacaactgggacattaaagcctgacgacagggttgtggttgctgccacccggctggatagtcgttcctttttctggaatgtggccccaggggctgaaagcgcagtggcttcctttgtcacccagctggctgctgctgaagctttgcaaaaggcacctgatgtgaccaccctgccccgcaatgtcatgtttgtcttctttcaaggggaaacttttgactacattggcagctcgaggatggtctacgatatggagaagggcaagtttcccgtgcagttagagaatgttgactcatttgtggagctgggacaggtggccttaagaacttcattagagctttggatgcacacagatcctgtttctcagaaaaatgagtctgtacggaaccagctcaggtggtgtgggtccgagctcgattg

SEQ ID NO: 402913 - DNA, 1653 bp, Homo sapiens
  misc_feature (3)..(3): n is a, c, g, or t
  misc_feature (7)..(8): n is a, c, g, or t
  misc_feature (12)..(12): n is a, c, g, or t
  misc_feature (14)..(16): n is a, c, g, or t
tcngcgnnttcngnnngcgcctggaaacacgaacttccggtctcttaggctccgggccacagagacggtgtcagtggtagcctagagaggccgctaacagacaggagccgaacgggggcttccgctcagcagagaggcaagatggctacggcagggggtggctctggggctgacccgggaagtcggggtctccttcgccttctgtctttctgcgtcctactagcaggtttgtgcaggggaaactcagtggagaggaagatatatatccccttaaataaaacagctccctgtgttcgcctgctcaacgccactcatcagattggctgccagtcttcaattagtggagacacaggggttatccacgtagtagagaaagaggaggacctacagtgggtattgactgatggccccaaccccccttacatggttctgctggagagcaagcattttaccagggatttaatggagaagctgaaagggagaaccagccgaattgctggtcttgcagtgtccttgaccaagcccagtcctgcctcaggcttctctcctagtgtacagtgcccaaatgatgggtttggtgtttactccaattcctatgggccagagtttgctcactgcagagaaatacagtggaattcgctgggcaatggtttggcttatgaagactttagtttccccatctttcttcttgaagatgaaaatgaaaccaaagtcatcaagcagtgctatcaagatcacaacctgagtcagaatggctcagcaccaaccttcccactatgtgccatgcagctcttttcacacatgcatgctgtcatcagcactgccacctgcatgcggcgcagctccatccaaagcaccttcagcatcaacccagaaatcgtctgtgaccccctgtctgattacaatgtgtggagcatgctaaagcctataaatacaactgggacattaaagcctgacgacagggttgtggttgctgccacccggctggatagtcgttcctttttctggaatgtggccccaggggctgaaagcgcagtggcttcctttgtcacccagctggctgctgctgaagctttgcaaaaggcacctgatgtgaccaccctgccccgcaatgtcatgtttgtcttctttcaaggggaaacttttgactacattggcagctcgaggatggtctacgatatggagaagggcaagtttcccgtgcagttagagaatgttgactcatttgtggagctgggacaggtggccttaagaacttcattagagctttggatgcacacagatcctgtttctcagaaaaatgagtctgtacggaaccagggcctgtgagacagggtaagagacaggattggattgggtgttggccaaaggatgaacaccacagctgttgttgctgctgggaagaatcaggaactcagtgacattccattggttccctggactgggtagttctctgatcatttgttgcctagcagactaccactgcccattaaggataggtgagtgactagctcccttcttgccttgctgccccatggatccaattgtcaaggctgctctacccaagtcctggctgtgtcacactcgctgcccaacttgtcctccactttcctcattgcttgttcaaaaccttcccttccctctaggtccacc

SEQ ID NO: 402914 - DNA, 547 bp, Homo sapiens
caacaccctaggctcactaaacattctactactcactctacatatttaccacaacacaatgggtcccatcaccccttccccatttcctcttccttctctactcatgccagattttgggattacaaatagaagcttcttgctcctgtttaactccctagttacccaccctaatttgcccttcaggacccttctactttttccttcctgccctgtacctctctctgctcctcacccccacccctgtacccagccaccttcctgactgggaaggacataaaaggtttaatgtcagggtcaaactacattgagcccctgaggacaggggcatctctgggctgagcctactgtctccttcccactgtcctttctccaggccctcagatggcacattagggtgggcgtgctgcgggtgggtatcccacctccagcccacagtgctcagttgtactttttattaagctgtaatatctatttttgtttttgtctttttcctttattctttttgtaaatatatatataatgagtttcattaaaatagattatccca

SEQ ID NO: 402915 - DNA, 924 bp, Homo sapiens
  misc_feature (3)..(3): n is a, c, g, or t
  misc_feature (7)..(8): n is a, c, g, or t
  misc_feature (12)..(12): n is a, c, g, or t
  misc_feature (14)..(16): n is a, c, g, or t
tcngcgnnttcngnnngcgcctggaaacacgaacttccggtctcttaggctccgggccacagagacggtgtcagtggtagcctagagaggccgctaacagacaggagccgaacgggggcttccgctcagcagagaggcaagatggctacggcagggggtggctctggggctgacccgggaagtcggggtctccttcgccttctgtctttctgcgtcctactagcaggtttgtgcaggggaaactcagtggagaggaagatatatatccccttaaataaaacagctccctgtgttcgcctgctcaacgccactcatcagattggctgccagtcttcaattagtggagacacaggggttatccacgtagtagagaaagaggaggacctacagtgggtattgactgatggccccaaccccccttacatggttctgctggagagcaagcattttaccagggatttaatggagaagctgaaagggagaaccagccgaattgctggtcttgcagtgtccttgaccaagcccagtcctgcctcaggcttctctcctagtgtacagtgcccaaatgatgggtttggtgtttactccaattcctatgggccagagtttgctcactgcagagaaatacagtggaattcgctgggcaatggtttggcttatgaagactttagtttccccatctttcttcttgaagatgaaaatgaaaccaaagtcatcaagcagtgctatcaagatcacaacctgagtcagaatggctcagcaccaaccttcccactatgtgccatgcagctcttttcacacatgcatgctgtcatcagcactgccacctccaaagttcacaccacatggtgaccaaagaacactgccttcacctggccacatcagaaaagcgattcacggtgcacacacacctgtctcagctta

SEQ ID NO: 402916 - DNA, 800 bp, Homo sapiens
  misc_feature (3)..(3): n is a, c, g, or t
  misc_feature (7)..(8): n is a, c, g, or t
  misc_feature (12)..(12): n is a, c, g, or t
  misc_feature (14)..(16): n is a, c, g, or t
tcngcgnnttcngnnngcgcctggaaacacgaacttccggtctcttaggctccgggccacagagacggtgtcagtggtagcctagagaggccgctaacagacaggagccgaacgggggcttccgctcagcagagaggcaagatggctacggcagggggtggctctggggctgacccgggaagtcggggtctccttcgccttctgtctttctgcgtcctactagcaggtttgtgcaggggaaactcagtggagaggaagatatatatccccttaaataaaacagctccctgtgttcgcctgctcaacgccactcatcagattggctgccagtgtgagttgagatggattcatgtttgtggacattgatatttgtctgtgccctagatactaagtaacatccatgtcctgcttaggagatttgacacttatattggactgtatgtaggcagttacagataaccgtctgtcaagctaggcaagataattaataagaactaacatttagtaaatgctgcataccaagctttttacatgtgcatctcatacaaccccaaccacaaccccacaaaataggtcttactgttattgtcactttataaatgatgaaactaaaacttaaagaagttgagtaactttcccaagatcatactggtaataagtgatgatgccaggatctggtggcccgagcactaagctgagagaccttttttttttgacacggagtttcactcttgtcccccaggctgagattgtgccaccatactccagtataggtgacagagtgagacactgtctgaaaa

SEQ ID NO: 402917 - DNA, 419 bp, Homo sapiens
ggagcatgctaaagcctataaatacaactgggacattaaagcctgacgacagggttgtggttgctgccacccgggtgagtgttggcttctgatcaggatgggcagggctggcacaaaaagagctggtaggccccgctctagcatatcagatttcaaagttgctaaattgggaagcctcaaatggggaggaatctgggctgtgggactcctgggttgtctccattgccacaggacaggtatattctcttgactggagcaagaaaggaggtttggggccagttttaaagtatatatcccctgacttttcttctgttgtacctagctggatagtcgttcctttttctggaatgtggccccaggggctgaaagcgcagtggcttcctttgtcacccagctggctgctgctgaagctttgcaaa

SEQ ID NO: 402918 - DNA, 388 bp, Homo sapiens
tttccattgcccttctttctggctgctgccaatcttgggcttttcctatttcacccaccatccacccaccaaatcttcccttccctttggtctgcactcaggtgacgggcctcttcaacattacatcgctgtctccagccccaccaacaccacttatgttgtacagtatgccttggcaaatttgactggcacagtggtcaacctcacccgagagcagtgccaggatccaagtaaagtcccaagtgaaaacaaggatctgtatgagtactcatgggtccagggccctttgcattctaatgagacggaccgactcccccggtgtgtgcgttctactgcacgattagccagggccttgtccccgccgccgtccccgcccgcggccggacag

SEQ ID NO: 402919 - DNA, 3126 bp, Homo sapiens
  misc_feature (3)..(3): n is a, c, g, or t
  misc_feature (7)..(8): n is a, c, g, or t
  misc_feature (12)..(12): n is a, c, g, or t
  misc_feature (14)..(16): n is a, c, g, or t
tcngcgnnttcngnnngcgcctggaaacacgaacttccggtctcttaggctccgggccacagagacggtgtcagtggtagcctagagaggccgctaacagacaggagccgaacgggggcttccgctcagcagagaggcaagatggctacggcagggggtggctctggggctgacccgggaagtcggggtctccttcgccttctgtctttctgcgtcctactagcaggtttgtgcaggggaaactcagtggagaggaagatatatatccccttaaataaaacagctccctgtgttcgcctgctcaacgccactcatcagattggctgccagtcttcaattagtggagacacaggggttatccacgtagtagagaaagaggaggacctacagtgggtattgactgatggccccaaccccccttacatggttctgctggagagcaagcattttaccagggatttaatggagaagctgaaagggagaaccagccgaattgctggtcttgcagtgtccttgaccaagcccagtcctgcctcaggcttctctcctagtgtacagtgcccaaatgatgggtttggtgtttactccaattcctatgggccagagtttgctcactgcagagaaatacagtggaattcgctgggcaatggtttggcttatgaagactttagtttccccatctttcttcttgaagatgaaaatgaaaccaaagtcatcaagcagtgctatcaagatcacaacctgagtcagaatggctcagcaccaaccttcccactatgtgccatgcagctcttttcacacatgcatgctgtcatcagcactgccacctgcatgcggcgcagctccatccaaagcaccttcagcatcaacccagaaatcgtctgtgaccccctgtctgattacaatgtgtggagcatgctaaagcctataaatacaactgggacattaaagcctgacgacagggttgtggttgctgccacccggctggatagtcgttcctttttctggaatgtggccccaggggctgaaagcgcagtggcttcctttgtcacccagctggctgctgctgaagctttgcaaaaggcacctgatgtgaccaccctgccccgcaatgtcatgtttgtcttctttcaaggggaaacttttgactacattggcagctcgaggatggtctacgatatggagaagggcaagtttcccgtgcagttagagaatgttgactcatttgtggagctgggacaggtggccttaagaacttcattagagctttggatgcacacagatcctgtttctcagaaaaatgagtctgtacggaaccagggcctgtgagacagggtaagagacaggattggattgggtgttggccaaaggatgaacaccacagctgttgttgctgctgggaagaatcaggaactcagtgacattccattggttccctggactgggtagttctctgatcatttgttgcctagcagactaccactgcccattaaggataggtggaggatctcctggccacattggagaagagtggtgctggtgtccctgctgtcatcctcaggaggccaaatcagtcccagcctctcccaccatcttccctgcagcgatttcttcgagctcgaaacatctctggcgttgttctggctgaccactctggtgccttccataacaaatattaccagagtatttacgacactgctgagaacattaatgtgagctatcccgaatggctgagccctgaagaggacctgaactttgtaacagacactgccaaggccctggcagatgtggccacggtgctgggacgtgctctgtatgagcttgcaggaggaaccaacttcagcgacacagttcaggctgatccccaaacggttacccgcctgctctatgggttcctgattaaagccaacaactcatggttccagtctatcctcaggcaggacctaaggtcctacttgggtgacgggcctcttcaacattacatcgctgtctccagccccaccaacaccacttatgttgtacagtatgccttggcaaatttgactggcacagtggtcaacctcacccgagagcagtgccaggatccaagtaaagtcccaagtgaaaacaaggatctgtatgagtactcatgggtccagggccctttgcattctaatgagacggaccgactcccccggtgtgtgcgttctactgcacgattagccagggccttgtctcctgcctttgaactgagtcagtggagctctactgaatactctacatggactgagagccgctggaaagatatccgtgcccggatatttctcatcgccagcaaagagcttgagttgatcaccctgacagtgggcttcggcatcctcatcttctccctcatcgtcacctactgcatcaatgccaaagctgatgtccttttcattgctccccgggagccaggagctgtgtcatactgaggaggaccccagcttttcttgccagctcagcagttcacttcctagagcatctgtcccactgggacacaaccactaatttgtcactggaacctccctgggcctgtctcagattgggattaacataaaagagtggaactatccaaaagagacagggagaaataaataaattgcctcccttcctccgctcccctttcccatcaccccttccccatttcctcttccttctctactcatgccagattttgggattacaaatagaagcttcttgctcctgtttaactccctagttacccaccctaatttgcccttcaggacccttctactttttccttcctgccctgtacctctctctgctcctcacccccacccctgtacccagccaccttcctgactgggaaggacataaaaggtttaatgtcagggtcaaactacattgagcccctgaggacaggggcatctctgggctgagcctactgtctccttcccactgtcctttctccaggccctcagatggcacattagggtgggcgtgctgcgggtgggtatcccacctccagcccacagtgctcagttgtactttttattaagctgtaatatctatttttgtttttgtctttttcctttattctttttgtaaatatatatataatgagtttcattaaaatagattatccca

SEQ ID NO: 402920 - DNA, 3233 bp, Homo sapiens
  misc_feature (3)..(3): n is a, c, g, or t
  misc_feature (7)..(8): n is a, c, g, or t
  misc_feature (12)..(12): n is a, c, g, or t
  misc_feature (14)..(16): n is a, c, g, or t
tcngcgnnttcngnnngcgcctggaaacacgaacttccggtctcttaggctccgggccacagagacggtgtcagtggtagcctagagaggccgctaacagacaggagccgaacgggggcttccgctcagcagagaggcaagatggctacggcagggggtggctctggggctgacccgggaagtcggggtctccttcgccttctgtctttctgcgtcctactagcaggtttgtgcaggggaaactcagtggagaggaagatatatatccccttaaataaaacagctccctgtgttcgcctgctcaacgccactcatcagattggctgccagtcttcaattagtggagacacaggggttatccacgtagtagagaaagaggaggacctacagtgggtattgactgatggccccaaccccccttacatggttctgctggagagcaagcattttaccagggatttaatggagaagctgaaagggagaaccagccgaattgctggtcttgcagtgtccttgaccaagcccagtcctgcctcaggcttctctcctagtgtacagtgcccaaatgatgggtttggtgtttactccaattcctatgggccagagtttgctcactgcagagaaatacagtggaattcgctgggcaatggtttggcttatgaagactttagtttccccatctttcttcttgaagatgaaaatgaaaccaaagtcatcaagcagtgctatcaagatcacaacctgagtcagaatggctcagcaccaaccttcccactatgtgccatgcagctcttttcacacatgcatgctgtcatcagcactgccacctgcatgcggcgcagctccatccaaagcaccttcagcatcaacccagaaatcgtctgtgaccccctgtctgattacaatgtgtggagcatgctaaagcctataaatacaactgggacattaaagcctgacgacagggttgtggttgctgccacccggctggatagtcgttcctttttctggaatgtggccccaggggctgaaagcgcagtggcttcctttgtcacccagctggctgctgctgaagctttgcaaaaggcacctgatgtgaccaccctgccccgcaatgtcatgtttgtcttctttcaaggggaaacttttgactacattggcagctcgaggatggtctacgatatggagaagggcaagtttcccgtgcagttagagaatgttgactcatttgtggagctgggacaggtggccttaagaacttcattagagctttggatgcacacagatcctgtttctcagaaaaatgagtctgtacggaaccaggtggaggatctcctggccacattggagaagagtggtgctggtgtccctgctgtcatcctcaggaggccaaatcagtcccagcctctcccaccatcttccctgcagcgatttcttcgagctcgaaacatctctggcgttgttctggctgaccactctggtgccttccataacaaatattaccagagtatttacgacactgctgagaacattaatgtgagctatcccgaatggctgagccctgaagaggacctgaactttgtaacagacactgccaaggccctggcagatgtggccacggtgctgggacgtgctctgtatgagcttgcaggaggaaccaacttcagcgacacagttcaggctgatccccaaacggttacccgcctgctctatgggttcctgattaaagccaacaactcatggttccagtctatcctcaggcaggacctaaggtcctacttgggtgacgggcctcttcaacattacatcgctgtctccagccccaccaacaccacttatgttgtacagtatgccttggcaaatttgactggcacagtggtcaacctcacccgagagcagtgccaggatccaagtaaagtcccaagtgaaaacaaggatgtgagtggtggtgggtgttggaagtgccctggggcccctttcccttgggaaagttggaggttcttctagacctagttagacccaggggattgggatggagaggtggagagatgcagtcctcagcaattgggtgttgaaaagcctgggtgaaaatggaccatctgaagggtaaagggacagcagccagttagctcaattggttagagcatggcactgatagagggtagagggaacgagtgagaagaggatcaccctagccgtgtgttgtggcgcatcttctgtgcagctgtatgagtactcatgggtccagggccctttgcattctaatgagacggaccgactcccccggtgtgtgcgttctactgcacgattagccagggccttgtctcctgcctttgaactgagtcagtggagctctactgaatactctacatggactgagagccgctggaaagatatccgtgcccggatatttctcatcgccagcaaagagcttgagttgatcaccctgacagtgggcttcggcatcctcatcttctccctcatcgtcacctactgcatcaatgccaaagctgatgtccttttcattgctccccgggagccaggagctgtgtcatactgaggaggaccccagcttttcttgccagctcagcagttcacttcctagagcatctgtcccactgggacacaaccactaatttgtcactggaacctccctgggcctgtctcagattgggattaacataaaagagtggaactatccaaaagagacagggagaaataaataaattgcctcccttcctccgctcccctttcccatcaccccttccccatttcctcttccttctctactcatgccagattttgggattacaaatagaagcttcttgctcctgtttaactccctagttacccaccctaatttgcccttcaggacccttctactttttccttcctgccctgtacctctctctgctcctcacccccacccctgtacccagccaccttcctgactgggaaggacataaaaggtttaatgtcagggtcaaactacattgagcccctgaggacaggggcatctctgggctgagcctactgtctccttcccactgtcctttctccaggccctcagatggcacattagggtgggcgtgctgcgggtgggtatcccacctccagcccacagtgctcagttgtactttttattaagctgtaatatctatttttgtttttgtctttttcctttattctttttgtaaatatatatataatgagtttcattaaaatagattatccca

SEQ ID NO: 402921 - DNA, 3046 bp, Homo sapiens
  misc_feature (3)..(3): n is a, c, g, or t
  misc_feature (7)..(8): n is a, c, g, or t
  misc_feature (12)..(12): n is a, c, g, or t
  misc_feature (14)..(16): n is a, c, g, or t
tcngcgnnttcngnnngcgcctggaaacacgaacttccggtctcttaggctccgggccacagagacggtgtcagtggtagcctagagaggccgctaacagacaggagccgaacgggggcttccgctcagcagagaggcaagatggctacggcagggggtggctctggggctgacccgggaagtcggggtctccttcgccttctgtctttctgcgtcctactagcaggcctcttcctggacttcgagcctgaccctctcccactttgtccagatgtctcgtttttcccacaaccccagccacccaccccacagtcgaaaggaacaggtttgtgcaggggaaactcagtggagaggaagatatatatccccttaaataaaacagctccctgtgttcgcctgctcaacgccactcatcagattggctgccagtcttcaattagtggagacacaggggttatccacgtagtagagaaagaggaggacctacagtgggtattgactgatggccccaaccccccttacatggttctgctggagagcaagcattttaccagggatttaatggagaagctgaaagggagaaccagccgaattgctggtcttgcagtgtccttgaccaagcccagtcctgcctcaggcttctctcctagtgtacagtgcccaaatgatgggtttggtgtttactccaattcctatgggccagagtttgctcactgcagagaaatacagtggaattcgctgggcaatggtttggcttatgaagactttagtttccccatctttcttcttgaagatgaaaatgaaaccaaagtcatcaagcagtgctatcaagatcacaacctgagtcagaatggctcagcaccaaccttcccactatgtgccatgcagctcttttcacacatgcatgctgtcatcagcactgccacctgcatgcggcgcagctccatccaaagcaccttcagcatcaacccagaaatcgtctgtgaccccctgtctgattacaatgtgtggagcatgctaaagcctataaatacaactgggacattaaagcctgacgacagggttgtggttgctgccacccggctggatagtcgttcctttttctggaatgtggccccaggggctgaaagcgcagtggcttcctttgtcacccagctggctgctgctgaagctttgcaaaaggcacctgatgtgaccaccctgccccgcaatgtcatgtttgtcttctttcaaggggaaacttttgactacattggcagctcgaggatggtctacgatatggagaagggcaagtttcccgtgcagttagagaatgttgactcatttgtggagctgggacaggtggccttaagaacttcattagagctttggatgcacacagatcctgtttctcagaaaaatgagtctgtacggaaccaggtggaggatctcctggccacattggagaagagtggtgctggtgtccctgctgtcatcctcaggaggccaaatcagtcccagcctctcccaccatcttccctgcagcgatttcttcgagctcgaaacatctctggcgttgttctggctgaccactctggtgccttccataacaaatattaccagagtatttacgacactgctgagaacattaatgtgagctatcccgaatggctgagccctgaagaggacctgaactttgtaacagacactgccaaggccctggcagatgtggccacggtgctgggacgtgctctgtatgagcttgcaggaggaaccaacttcagcgacacagttcaggctgatccccaaacggttacccgcctgctctatgggttcctgattaaagccaacaactcatggttccagtctatcctcaggcaggacctaaggtcctacttgggtgacgggcctcttcaacattacatcgctgtctccagccccaccaacaccacttatgttgtacagtatgccttggcaaatttgactggcacagtggtcaacctcacccgagagcagtgccaggatccaagtaaagtcccaagtgaaaacaaggatctgtatgagtactcatgggtccagggccctttgcattctaatgagacggaccgactcccccggtgtgtgcgttctactgcacgattagccagggccttgtctcctgcctttgaactgagtcagtggagctctactgaatactctacatggactgagagccgctggaaagatatccgtgcccggatatttctcatcgccagcaaagagcttgagttgatcaccctgacagtgggcttcggcatcctcatcttctccctcatcgtcacctactgcatcaatgccaaagctgatgtccttttcattgctccccgggagccaggagctgtgtcatactgaggaggaccccagcttttcttgccagctcagcagttcacttcctagagcatctgtcccactgggacacaaccactaatttgtcactggaacctccctgggcctgtctcagattgggattaacataaaagagtggaactatccaaaagagacagggagaaataaataaattgcctcccttcctccgctcccctttcccatcaccccttccccatttcctcttccttctctactcatgccagattttgggattacaaatagaagcttcttgctcctgtttaactccctagttacccaccctaatttgcccttcaggacccttctactttttccttcctgccctgtacctctctctgctcctcacccccacccctgtacccagccaccttcctgactgggaaggacataaaaggtttaatgtcagggtcaaactacattgagcccctgaggacaggggcatctctgggctgagcctactgtctccttcccactgtcctttctccaggccctcagatggcacattagggtgggcgtgctgcgggtgggtatcccacctccagcccacagtgctcagttgtactttttattaagctgtaatatctatttttgtttttgtctttttcctttattctttttgtaaatatatatataatgagtttcattaaaatagattatccca

SEQ ID NO: 402922 - DNA, 3086 bp, Homo sapiens
  misc_feature (3)..(3): n is a, c, g, or t
  misc_feature (7)..(8): n is a, c, g, or t
  misc_feature (12)..(12): n is a, c, g, or t
  misc_feature (14)..(16): n is a, c, g, or t
tcngcgnnttcngnnngcgcctggaaacacgaacttccggtctcttaggctccgggccacagagacggtgtcagtggtagcctagagaggccgctaacagacaggagccgaacgggggcttccgctcagcagagaggcaagatggctacggcagggggtggctctggggctgacccgggaagtcggggtctccttcgccttctgtctttctgcgtcctactagcagtgtcactgtcaatggcgctacatggactttgtaataaccctttgaggcacatagctgggtgccatgtagaacatgtatctgttacgataagtgtgtgcccaagaaatcagaagaatggactttaatctcattttagaaagtttgtgcaggggaaactcagtggagaggaagatatatatccccttaaataaaacagctccctgtgttcgcctgctcaacgccactcatcagattggctgccagtcttcaattagtggagacacaggggttatccacgtagtagagaaagaggaggacctacagtgggtattgactgatggccccaaccccccttacatggttctgctggagagcaagcattttaccagggatttaatggagaagctgaaagggagaaccagccgaattgctggtcttgcagtgtccttgaccaagcccagtcctgcctcaggcttctctcctagtgtacagtgcccaaatgatgggtttggtgtttactccaattcctatgggccagagtttgctcactgcagagaaatacagtggaattcgctgggcaatggtttggcttatgaagactttagtttccccatctttcttcttgaagatgaaaatgaaaccaaagtcatcaagcagtgctatcaagatcacaacctgagtcagaatggctcagcaccaaccttcccactatgtgccatgcagctcttttcacacatgcatgctgtcatcagcactgccacctgcatgcggcgcagctccatccaaagcaccttcagcatcaacccagaaatcgtctgtgaccccctgtctgattacaatgtgtggagcatgctaaagcctataaatacaactgggacattaaagcctgacgacagggttgtggttgctgccacccggctggatagtcgttcctttttctggaatgtggccccaggggctgaaagcgcagtggcttcctttgtcacccagctggctgctgctgaagctttgcaaaaggcacctgatgtgaccaccctgccccgcaatgtcatgtttgtcttctttcaaggggaaacttttgactacattggcagctcgaggatggtctacgatatggagaagggcaagtttcccgtgcagttagagaatgttgactcatttgtggagctgggacaggtggccttaagaacttcattagagctttggatgcacacagatcctgtttctcagaaaaatgagtctgtacggaaccaggtggaggatctcctggccacattggagaagagtggtgctggtgtccctgctgtcatcctcaggaggccaaatcagtcccagcctctcccaccatcttccctgcagcgatttcttcgagctcgaaacatctctggcgttgttctggctgaccactctggtgccttccataacaaatattaccagagtatttacgacactgctgagaacattaatgtgagctatcccgaatggctgagccctgaagaggacctgaactttgtaacagacactgccaaggccctggcagatgtggccacggtgctgggacgtgctctgtatgagcttgcaggaggaaccaacttcagcgacacagttcaggctgatccccaaacggttacccgcctgctctatgggttcctgattaaagccaacaactcatggttccagtctatcctcaggcaggacctaaggtcctacttgggtgacgggcctcttcaacattacatcgctgtctccagccccaccaacaccacttatgttgtacagtatgccttggcaaatttgactggcacagtggtcaacctcacccgagagcagtgccaggatccaagtaaagtcccaagtgaaaacaaggatctgtatgagtactcatgggtccagggccctttgcattctaatgagacggaccgactcccccggtgtgtgcgttctactgcacgattagccagggccttgtctcctgcctttgaactgagtcagtggagctctactgaatactctacatggactgagagccgctggaaagatatccgtgcccggatatttctcatcgccagcaaagagcttgagttgatcaccctgacagtgggcttcggcatcctcatcttctccctcatcgtcacctactgcatcaatgccaaagctgatgtccttttcattgctccccgggagccaggagctgtgtcatactgaggaggaccccagcttttcttgccagctcagcagttcacttcctagagcatctgtcccactgggacacaaccactaatttgtcactggaacctccctgggcctgtctcagattgggattaacataaaagagtggaactatccaaaagagacagggagaaataaataaattgcctcccttcctccgctcccctttcccatcaccccttccccatttcctcttccttctctactcatgccagattttgggattacaaatagaagcttcttgctcctgtttaactccctagttacccaccctaatttgcccttcaggacccttctactttttccttcctgccctgtacctctctctgctcctcacccccacccctgtacccagccaccttcctgactgggaaggacataaaaggtttaatgtcagggtcaaactacattgagcccctgaggacaggggcatctctgggctgagcctactgtctccttcccactgtcctttctccaggccctcagatggcacattagggtgggcgtgctgcgggtgggtatcccacctccagcccacagtgctcagttgtactttttattaagctgtaatatctatttttgtttttgtctttttcctttattctttttgtaaatatatatataatgagtttcattaaaatagattatccca

SEQ ID NO: 402923 - DNA, 2862 bp, Homo sapiens
tctcccccgcagcacgtcgtgtcgcttcactcccttctctaggcctcttcctggacttcgagcctgaccctctcccactttgtccagatgtctcgtttttcccacaaccccagccacccaccccacagtcgaaaggaacaggtttgtgcaggggaaactcagtggagaggaagatatatatccccttaaataaaacagctccctgtgttcgcctgctcaacgccactcatcagattggctgccagtcttcaattagtggagacacaggggttatccacgtagtagagaaagaggaggacctacagtgggtattgactgatggccccaaccccccttacatggttctgctggagagcaagcattttaccagggatttaatggagaagctgaaagggagaaccagccgaattgctggtcttgcagtgtccttgaccaagcccagtcctgcctcaggcttctctcctagtgtacagtgcccaaatgatgggtttggtgtttactccaattcctatgggccagagtttgctcactgcagagaaatacagtggaattcgctgggcaatggtttggcttatgaagactttagtttccccatctttcttcttgaagatgaaaatgaaaccaaagtcatcaagcagtgctatcaagatcacaacctgagtcagaatggctcagcaccaaccttcccactatgtgccatgcagctcttttcacacatgcatgctgtcatcagcactgccacctgcatgcggcgcagctccatccaaagcaccttcagcatcaacccagaaatcgtctgtgaccccctgtctgattacaatgtgtggagcatgctaaagcctataaatacaactgggacattaaagcctgacgacagggttgtggttgctgccacccggctggatagtcgttcctttttctggaatgtggccccaggggctgaaagcgcagtggcttcctttgtcacccagctggctgctgctgaagctttgcaaaaggcacctgatgtgaccaccctgccccgcaatgtcatgtttgtcttctttcaaggggaaacttttgactacattggcagctcgaggatggtctacgatatggagaagggcaagtttcccgtgcagttagagaatgttgactcatttgtggagctgggacaggtggccttaagaacttcattagagctttggatgcacacagatcctgtttctcagaaaaatgagtctgtacggaaccaggtggaggatctcctggccacattggagaagagtggtgctggtgtccctgctgtcatcctcaggaggccaaatcagtcccagcctctcccaccatcttccctgcagcgatttcttcgagctcgaaacatctctggcgttgttctggctgaccactctggtgccttccataacaaatattaccagagtatttacgacactgctgagaacattaatgtgagctatcccgaatggctgagccctgaagaggacctgaactttgtaacagacactgccaaggccctggcagatgtggccacggtgctgggacgtgctctgtatgagcttgcaggaggaaccaacttcagcgacacagttcaggctgatccccaaacggttacccgcctgctctatgggttcctgattaaagccaacaactcatggttccagtctatcctcaggcaggacctaaggtcctacttgggtgacgggcctcttcaacattacatcgctgtctccagccccaccaacaccacttatgttgtacagtatgccttggcaaatttgactggcacagtggtcaacctcacccgagagcagtgccaggatccaagtaaagtcccaagtgaaaacaaggatctgtatgagtactcatgggtccagggccctttgcattctaatgagacggaccgactcccccggtgtgtgcgttctactgcacgattagccagggccttgtctcctgcctttgaactgagtcagtggagctctactgaatactctacatggactgagagccgctggaaagatatccgtgcccggatatttctcatcgccagcaaagagcttgagttgatcaccctgacagtgggcttcggcatcctcatcttctccctcatcgtcacctactgcatcaatgccaaagctgatgtccttttcattgctccccgggagccaggagctgtgtcatactgaggaggaccccagcttttcttgccagctcagcagttcacttcctagagcatctgtcccactgggacacaaccactaatttgtcactggaacctccctgggcctgtctcagattgggattaacataaaagagtggaactatccaaaagagacagggagaaataaataaattgcctcccttcctccgctcccctttcccatcaccccttccccatttcctcttccttctctactcatgccagattttgggattacaaatagaagcttcttgctcctgtttaactccctagttacccaccctaatttgcccttcaggacccttctactttttccttcctgccctgtacctctctctgctcctcacccccacccctgtacccagccaccttcctgactgggaaggacataaaaggtttaatgtcagggtcaaactacattgagcccctgaggacaggggcatctctgggctgagcctactgtctccttcccactgtcctttctccaggccctcagatggcacattagggtgggcgtgctgcgggtgggtatcccacctccagcccacagtgctcagttgtactttttattaagctgtaatatctatttttgtttttgtctttttcctttattctttttgtaaatatatatataatgagtttcattaaaatagattatccca

SEQ ID NO: 402924 - DNA, 2734 bp, Homo sapiens
  misc_feature (3)..(3): n is a, c, g, or t
  misc_feature (7)..(8): n is a, c, g, or t
  misc_feature (12)..(12): n is a, c, g, or t
  misc_feature (14)..(16): n is a, c, g, or t
tcngcgnnttcngnnngcgcctggaaacacgaacttccggtctcttaggctccgggccacagagacggtgtcagtggtagcctagagaggccgctaacagacaggagccgaacgggggcttccgctcagcagagaggcaagatggctacggcagggggtggctctggggctgacccgggaagtcggggtctccttcgccttctgtctttctgcgtcctactagcaggtttgtgcaggggaaactcagtggagaggaagatatatatccccttaaataaaacagctccctgtgttcgcctgctcaacgccactcatcagattggctgccagtcttcaattagtggagacacaggggttatccacgtagtagagaaagaggaggacctacagtgggtattgactgatggccccaaccccccttacatggttctgctggagagcaagcattttaccagggatttaatggagaagctgaaagggagaaccagccgaattgctggtcttgcagtgtccttgaccaagcccagtcctgcctcaggcttctctcctagtgtacagtgcccaaatgatgggtttggtgtttactccaattcctatgggccagagtttgctcactgcagagaaatacagtggaattcgctgggcaatggtttggcttatgaagactttagtttccccatctttcttcttgaagatgaaaatgaaaccaaagtcatcaagcagtgctatcaagatcacaacctgagtcagaatggctcagcaccaaccttcccactatgtgccatgcagctcttttcacacatgcatgctgtcatcagcactgccacctgcatgcggcgcagctccatccaaagcaccttcagcatcaacccagaaatcgtctgtgaccccctgtctgattacaatgtgtggagcatgctaaagcctataaatacaactgggacattaaagcctgacgacagggttgtggttgctgccacccggctggatagtcgttcctttttctggaatgtggccccaggggctgaaagcgcagtggcttcctttgtcacccagctggctgctgctgaagctttgcaaaaggcacctgatgtgaccaccctgccccgcaatgtcatgtttgtcttctttcaaggggaaacttttgactacattggcagctcgaggatggtctacgatatggagaagggcaagtttcccgtgcagttagagaatgttgactcatttgtggagctgggacaggtggccttaagaacttcattagagctttggatgcacacagatcctgtttctcagaaaaatgagtctgtacggaaccaggtggaggatctcctggccacattggagaagagtggtgctggtgtccctgctgtcatcctcaggaggccaaatcagtcccagcctctcccaccatcttccctgcagcgatttcttcgagctcgaaacatctctggcgttgttctggctgaccactctggtgccttccataacaaatattaccagagtatttacgacactgctgagaacattaatgtgagctatcccgaatggctgagccctgaagaggacctgaactttgtaacagacactgccaaggccctggcagatgtggccacggtgctgggacgtgctctgtatgagcttgcaggaggaaccaacttcagcgacacagttcaggctgatccccaaacggttacccgcctgctctatgggttcctgattaaagccaacaactcatggttccagtctatcctcaggcaggacctaaggtcctacttgggtgacgggcctcttcaacattacatcgctgtctccagccccaccaacaccacttatgttgtacagtatgccttggcaaatttgactggcacagtggtcaacctcacccgagagcagtgccaggatccaagtaaagtcccaagtgaaaacaaggatttgatcaccctgacagtgggcttcggcatcctcatcttctccctcatcgtcacctactgcatcaatgccaaagctgatgtccttttcattgctccccgggagccaggagctgtgtcatactgaggaggaccccagcttttcttgccagctcagcagttcacttcctagagcatctgtcccactgggacacaaccactaatttgtcactggaacctccctgggcctgtctcagattgggattaacataaaagagtggaactatccaaaagagacagggagaaataaataaattgcctcccttcctccgctcccctttcccatcaccccttccccatttcctcttccttctctactcatgccagattttgggattacaaatagaagcttcttgctcctgtttaactccctagttacccaccctaatttgcccttcaggacccttctactttttccttcctgccctgtacctctctctgctcctcacccccacccctgtacccagccaccttcctgactgggaaggacataaaaggtttaatgtcagggtcaaactacattgagcccctgaggacaggggcatctctgggctgagcctactgtctccttcccactgtcctttctccaggccctcagatggcacattagggtgggcgtgctgcgggtgggtatcccacctccagcccacagtgctcagttgtactttttattaagctgtaatatctatttttgtttttgtctttttcctttattctttttgtaaatatatatataatgagtttcattaaaatagattatccca

SEQ ID NO: 402925 - DNA, 2533 bp, Homo sapiens
  misc_feature (3)..(3): n is a, c, g, or t
  misc_feature (7)..(8): n is a, c, g, or t
  misc_feature (12)..(12): n is a, c, g, or t
  misc_feature (14)..(16): n is a, c, g, or t
tcngcgnnttcngnnngcgcctggaaacacgaacttccggtctcttaggctccgggccacagagacggtgtcagtggtagcctagagaggccgctaacagacaggagccgaacgggggcttccgctcagcagagaggcaagatggctacggcagggggtggctctggggctgacccgggaagtcggggtctccttcgccttctgtctttctgcgtcctactagcaggtttgtgcaggggaaactcagtggagaggaagatatatatccccttaaataaaacagctccctgtgttcgcctgctcaacgccactcatcagattggctgccagtcttcaattagtggagacacaggggttatccacgtagtagagaaagaggaggacctacagtgggtattgactgatggccccaaccccccttacatggttctgctggagagcaagcattttaccagggatttaatggagaagctgaaagggagaaccagccgaattgctggtcttgcagtgtccttgaccaagcccagtcctgcctcaggcttctctcctagtgtacagtgcccaaatgatgggtttggtgtttactccaattcctatgggccagagtttgctcactgcagagaaatacagtggaattcgctgggcaatggtttggcttatgaagactttagtttccccatctttcttcttgaagatgaaaatgaaaccaaagtcatcaagcaggaaacttttgactacattggcagctcgaggatggtctacgatatggagaagggcaagtttcccgtgcagttagagaatgttgactcatttgtggagctgggacaggtggccttaagaacttcattagagctttggatgcacacagatcctgtttctcagaaaaatgagtctgtacggaaccaggtggaggatctcctggccacattggagaagagtggtgctggtgtccctgctgtcatcctcaggaggccaaatcagtcccagcctctcccaccatcttccctgcagcgatttcttcgagctcgaaacatctctggcgttgttctggctgaccactctggtgccttccataacaaatattaccagagtatttacgacactgctgagaacattaatgtgagctatcccgaatggctgagccctgaagaggacctgaactttgtaacagacactgccaaggccctggcagatgtggccacggtgctgggacgtgctctgtatgagcttgcaggaggaaccaacttcagcgacacagttcaggctgatccccaaacggttacccgcctgctctatgggttcctgattaaagccaacaactcatggttccagtctatcctcaggcaggacctaaggtcctacttgggtgacgggcctcttcaacattacatcgctgtctccagccccaccaacaccacttatgttgtacagtatgccttggcaaatttgactggcacagtggtcaacctcacccgagagcagtgccaggatccaagtaaagtcccaagtgaaaacaaggatctgtatgagtactcatgggtccagggccctttgcattctaatgagacggaccgactcccccggtgtgtgcgttctactgcacgattagccagggccttgtctcctgcctttgaactgagtcagtggagctctactgaatactctacatggactgagagccgctggaaagatatccgtgcccggatatttctcatcgccagcaaagagcttgagttgatcaccctgacagtgggcttcggcatcctcatcttctccctcatcgtcacctactgcatcaatgccaaagctgatgtccttttcattgctccccgggagccaggagctgtgtcatactgaggaggaccccagcttttcttgccagctcagcagttcacttcctagagcatctgtcccactgggacacaaccactaatttgtcactggaacctccctgggcctgtctcagattgggattaacataaaagagtggaactatccaaaagagacagggagaaataaataaattgcctcccttcctccgctcccctttcccatcaccccttccccatttcctcttccttctctactcatgccagattttgggattacaaatagaagcttcttgctcctgtttaactccctagttacccaccctaatttgcccttcaggacccttctactttttccttcctgccctgtacctctctctgctcctcacccccacccctgtacccagccaccttcctgactgggaaggacataaaaggtttaatgtcagggtcaaactacattgagcccctgaggacaggggcatctctgggctgagcctactgtctccttcccactgtcctttctccaggccctcagatggcacattagggtgggcgtgctgcgggtgggtatcccacctccagcccacagtgctcagttgtactttttattaagctgtaatatctatttttgtttttgtctttttcctttattctttttgtaaatatatatataatgagtttcattaaaatagattatccca

SEQ ID NO: 402926 - DNA, 2929 bp, Homo sapiens
  misc_feature (3)..(3): n is a, c, g, or t
  misc_feature (7)..(8): n is a, c, g, or t
  misc_feature (12)..(12): n is a, c, g, or t
  misc_feature (14)..(16): n is a, c, g, or t
tcngcgnnttcngnnngcgcctggaaacacgaacttccggtctcttaggctccgggccacagagacggtgtcagtggtagcctagagaggccgctaacagacaggagccgaacgggggcttccgctcagcagagaggcaagatggctacggcagggggtggctctggggctgacccgggaagtcggggtctccttcgccttctgtctttctgcgtcctactagcaggtttgtgcaggggaaactcagtggagaggaagatatatatccccttaaataaaacagctccctgtgttcgcctgctcaacgccactcatcagattggctgccagtcttcaattagtggagacacaggggttatccacgtagtagagaaagaggaggacctacagtgggtattgactgatggccccaaccccccttacatggttctgctggagagcaagcattttaccagggatttaatggagaagctgaaagggagaaccagccgaattgctggtcttgcagtgtccttgaccaagcccagtcctgcctcaggcttctctcctagtgtacagtgcccaaatgatgggtttggtgtttactccaattcctatgggccagagtttgctcactgcagagaaatacagtggaattcgctgggcaatggtttggcttatgaagactttagtttccccatctttcttcttgaagatgaaaatgaaaccaaagtcatcaagcagtgctatcaagatcacaacctgagtcagaatggctcagcaccaaccttcccactatgtgccatgcagctcttttcacacatgcatgctgtcatcagcactgccacctgcatgcggcgcagctccatccaaagcaccttcagcatcaacccagaaatcgtctgtgaccccctgtctgattacaatgtgtggagcatgctaaagcctataaatacaactgggacattaaagcctgacgacagggttgtggttgctgccacccggctggatagtcgttcctttttctggaatgtggccccaggggctgaaagcgcagtggcttcctttgtcacccagctggctgctgctgaagctttgcaaaaggcacctgatgtgaccaccctgccccgcaatgtcatgtttgtcttctttcaaggggaaacttttgactacattggcagctcgaggatggtctacgatatggagaagggcaagtttcccgtgcagttagagaatgttgactcatttgtggagctgggacaggtggccttaagaacttcattagagctttggatgcacacagatcctgtttctcagaaaaatgagtctgtacggaaccaggtggaggatctcctggccacattggagaagagtggtgctggtgtccctgctgtcatcctcaggaggccaaatcagtcccagcctctcccaccatcttccctgcagcgatttcttcgagctcgaaacatctctggcgttgttctggctgaccactctggtgccttccataacaaatattaccagagtatttacgacactgctgagaacattaatgtgagctatcccgaatggctgagccctgaagaggacctgaactttgtaacagacactgccaaggccctggcagatgtggccacggtgctgggacgtgctctgtatgagcttgcaggaggaaccaacttcagcgacacagttcaggctgatccccaaacggttacccgcctgctctatgggttcctgattaaagccaacaactcatggttccagtctatcctcaggcaggacctaaggtcctacttgggtgacgggcctcttcaacattacatcgctgtctccagccccaccaacaccacttatgttgtacagtatgccttggcaaatttgactggcacagtggtcaacctcacccgagagcagtgccaggatccaagtaaagtcccaagtgaaaacaaggatctgtatgagtactcatgggtccagggccctttgcattctaatgagacggaccgactcccccggtgtgtgcgttctactgcacgattagccagggccttgtctcctgcctttgaactgagtcagtggagctctactgaatactctacatggactgagagccgctggaaagatatccgtgcccggatatttctcatcgccagcaaagagcttgagttgatcaccctgacagtgggcttcggcatcctcatcttctccctcatcgtcacctactgcatcaatgccaaagctgatgtccttttcattgctccccgggagccaggagctgtgtcatactgaggaggaccccagcttttcttgccagctcagcagttcacttcctagagcatctgtcccactgggacacaaccactaatttgtcactggaacctccctgggcctgtctcagattgggattaacataaaagagtggaactatccaaaagagacagggagaaataaataaattgcctcccttcctccgctcccctttcccatcaccccttccccatttcctcttccttctctactcatgccagattttgggattacaaatagaagcttcttgctcctgtttaactccctagttacccaccctaatttgcccttcaggacccttctactttttccttcctgccctgtacctctctctgctcctcacccccacccctgtacccagccaccttcctgactgggaaggacataaaaggtttaatgtcagggtcaaactacattgagcccctgaggacaggggcatctctgggctgagcctactgtctccttcccactgtcctttctccaggccctcagatggcacattagggtgggcgtgctgcgggtgggtatcccacctccagcccacagtgcctcaagttttgtggtttaaaaaccccccccttttcttttttttttacccccccttttaaaaaaattttttttttaaatatatatataatga

SEQ ID NO: 402927 - DNA, 2860 bp, Homo sapiens
  misc_feature (3)..(3): n is a, c, g, or t
  misc_feature (7)..(8): n is a, c, g, or t
  misc_feature (12)..(12): n is a, c, g, or t
  misc_feature (14)..(16): n is a, c, g, or t
tcngcgnnttcngnnngcgcctggaaacacgaacttccggtctcttaggctccgggccacagagacggtgtcagtggtagcctagagaggccgctaacagacaggagccgaacgggggcttccgctcagcagagaggcaagatggctacggcagggggtggctctggggctgacccgggaagtcggggtctccttcgccttctgtctttctgcgtcctactagcaggtttgtgcaggggaaactcagtggagaggaagatatatatccccttaaataaaacagctccctgtgttcgcctgctcaacgccactcatcagattggctgccagtcttcaattagtggagacacaggggttatccacgtagtagagaaagaggaggacctacagtgggtattgactgatggccccaaccccccttacatggttctgctggagagcaagcattttaccagggatttaatggagaagctgaaagggagaaccagccgaattgctggtcttgcagtgtccttgaccaagcccagtcctgcctcaggcttctctcctagtgtacagtgcccaaatgatgggtttggtgtttactccaattcctatgggccagagtttgctcactgcagagaaatacagtggaattcgctgggcaatggtttggcttatgaagactttagtttccccatctttcttcttgaagatgaaaatgaaaccaaagtcatcaagcagtgctatcaagatcacaacctgagtcagaatggctcagcaccaaccttcccactatgtgccatgcagctcttttcacacatgcatgctgtcatcagcactgccacctgcatgcggcgcagctccatccaaagcaccttcagcatcaacccagaaatcgtctgtgaccccctgtctgattacaatgtgtggagcatgctaaagcctataaatacaactgggacattaaagcctgacgacagggttgtggttgctgccacccggctggatagtcgttcctttttctggaatgtggccccaggggctgaaagcgcagtggcttcctttgtcacccagctggctgctgctgaagctttgcaaaaggcacctgatgtgaccaccctgccccgcaatgtcatgtttgtcttctttcaaggggaaacttttgactacattggcagctcgaggatggtctacgatatggagaagggcaagtttcccgtgcagttagagaatgttgactcatttgtggagctgggacaggtggccttaagaacttcattagagctttggatgcacacagatcctgtttctcagaaaaatgagtctgtacggaaccaggtggaggatctcctggccacattggagaagagtggtgctggtgtccctgctgtcatcctcaggaggccaaatcagtcccagcctctcccaccatcttccctgcagcgatttcttcgagctcgaaacatctctggcgttgttctggctgaccactctggtgccttccataacaaatattaccagagtatttacgacactgctgagaacattaatgtgagctatcccgaatggctgagccctgaagaggacctgaactttgtaacagacactgccaaggccctggcagatgtggccacggtgctgggacgtgctctgtatgagcttgcaggaggaaccaacttcagcgacacagttcaggctgatccccaaacggttacccgcctgctctatgggttcctgattaaagccaacaactcatggttccagtctatcctcaggcaggacctaaggtcctacttgggtgacgggcctcttcaacattacatcgctgtctccagccccaccaacaccacttatgttgtacagtatgccttggcaaatttgactggcacagtggtcaacctcacccgagagcagtgccaggatccaagtaaagtcccaagtgaaaacaaggatctgtatgagtactcatgggtccagggccctttgcattctaatgagacggaccgactcccccggtgtgtgcgttctactgcacgattagccagggccttgtctcctgcctttgaactgagtcagtggagctctactgaatactctacatggactgagagccgctggaaagatatccgtgcccggatatttctcatcgccagcaaagagcttgagttgatcaccctgacagtgggcttcggcatcctcatcttctccctcatcgtcacctactgcatcaatgccaaagctgatgtccttttcattgctccccgggagccaggagctgtgtcatactgaggaggaccccagcttttcttgccagctcagcagttcacttcctagagcatctgtcccactgggacacaaccactaatttgtcactggaacctccctgggcctgtctcagattgggattaacataaaagagtggaactatccaaaagagacagggagaaataaataaattgcctcccttcctccgctcccctttcccatcaccccttccccatttcctcttccttctctactcatgccagattttgggattacaaatagaagcttcttgctcctgtttaactccctagttcagccaccttcctgactgggaaggacataaaaggtttaatgtcagggtcaaactacattgagcccctgaggacaggggcatctctgggctgagcctactgtctccttcccactgtcctttctccaggccctcagatggcacattagggtgggcgtgctgcgggtgggtatcccacctccagcccacagtgctcagttgtactttttattaagctgtaatatctatttttgtttttgtctttttcctttattctttttgtaaatatatatataatgagtttcattaaaatagattatccca

SEQ ID NO: 402928 - DNA, 2638 bp, Homo sapiens
  misc_feature (3)..(3): n is a, c, g, or t
  misc_feature (7)..(8): n is a, c, g, or t
  misc_feature (12)..(12): n is a, c, g, or t
  misc_feature (14)..(16): n is a, c, g, or t
tcngcgnnttcngnnngcgcctggaaacacgaacttccggtctcttaggctccgggccacagagacggtgtcagtggtagcctagagaggccgctaacagacaggagccgaacgggggcttccgctcagcagagaggcaagatggctacggcagggggtggctctggggctgacccgggaagtcggggtctccttcgccttctgtctttctgcgtcctactagcaggtttgtgcaggggaaactcagtggagaggaagatatatatccccttaaataaaacagctccctgtgttcgcctgctcaacgccactcatcagattggctgccagtcttcaattagtggagacacaggggttatccacgtagtagagaaagaggaggacctacagtgggtattgactgatggccccaaccccccttacatggttctgctggagagcaagcattttaccagggatttaatggagaagctgaaagggagaaccagccgaattgctggtcttgcagtgtccttgaccaagcccagtcctgcctcaggcttctctcctagtgtacagtgcccaaatgatgggtttggtgtttactccaattcctatgggccagagtttgctcactgcagagaaatacagtggaattcgctgggcaatggtttggcttatgaagactttagtttccccatctttcttcttgaagatgaaaatgaaaccaaagtcatcaagcagtgctatcaagatcacaacctgagtcagaatggctcagcaccaaccttcccactatgtgccatgcagctcttttcacacatgcatgctgtcatcagcactgccacctgcatgcggcgcagctccatccaaagcaccttcagcatcaacccagaaatcgtctgtgaccccctgtctgattacaatgtgtggagcatgctaaagcctataaatacaactgggacattaaagcctgacgacagggttgtggttgctgccacccggctggatagtcgttcctttttctggaatgtggccccaggggctgaaagcgcagtggcttcctttgtcacccagctggctgctgctgaagctttgcaaaaggcacctgatgtgaccaccctgccccgcaatgtcatgtttgtcttctttcaaggggaaacttttgactacattggcagctcgaggatggtctacgatatggagaagggcaagtttcccgtgcagttagagaatgttgactcatttgtggagctgggacaggtggccttaagaacttcattagagctttggatgcacacagatcctgtttctcagaaaaatgagtctgtacggaaccaggtggaggatctcctggccacattggagaagagtggtgctggtgtccctgctgtcatcctcaggaggccaaatcagtcccagcctctcccaccatcttccctgcagcgatttcttcgagctcgaaacatctctggcgttgttctggctgaccactctggtgccttccataacaaatattaccagagtatttacgacactgctgagaacattaatgtgagctatcccgaatggctgagccctgaagaggacctgaactttgtaacagacactgccaaggccctggcagatgtggccacggtgctgggacgtgctctgtatgagcttgcaggaggaaccaacttcagcgacacagttcaggctgatccccaaacggttacccgcctgctctatgggttcctgattaaagccaacaactcatggttccagtctatcctcaggcaggacctaaggtcctacttgggtgacgggcctcttcaacattacatcgctgtctccagccccaccaacaccacttatgttgtacagtatgccttggcaaatttgactggcacagtggtcaacctcacccgagagcagtgccaggatccaagtaaagtcccaagtgaaaacaaggatctgtatgagtactcatgggtccagggccctttgcattctaatgagacggaccgactcccccggtgtgtgcgttctactgcacgattagccagggccttgtctcctgcctttgaactgagtcagtggagctctactgaatactctacatggactgagagccgctggaaagatatccgtgcccggatatttctcatcgccagcaaagagcttgagttgatcaccctgacagtgggcttcggcatcctcatcttctccctcatcgtcacctactgcatcaatgccaaagctgatgtccttttcattgctccccgggagccaggagctgtgtcatactgaggaggaccccagcttttcttgccagctcagcagttcacttcctagagcatctgtcccactgggacacaaccactaatttgtcactggaacctccctgggcctgtctcagattgggattaacataaaagagtggaactatccaaaagagacagggagaaataaataaattgcctcccttcctccgctcccctttcccatcaccccttccccatttcctcttccttctctactcatgccagattttgggattacaaatagaagcttcttgctcctgtttaactccctagttacccaccctaatttgcccttcaggacccttctacttttccgccgccccctcggccgattaacaccggctcgacctagc

SEQ ID NO: 402929 - DNA, 1268 bp, Homo sapiens
tttccattgcccttctttctggctgctgccaatcttgggcttttcctatttcacccaccatccacccaccaaatcttcccttccctttggtctgcactcaggtgacgggcctcttcaacattacatcgctgtctccagccccaccaacaccacttatgttgtacagtatgccttggcaaatttgactggcacagtggtcaacctcacccgagagcagtgccaggatccaagtaaagtcccaagtgaaaacaaggatctgtatgagtactcatgggtccagggccctttgcattctaatgagacggaccgactcccccggtgtgtgcgttctactgcacgattagccagggccttgtctcctgcctttgaactgagtcagtggagctctactgaatactctacatggactgagagccgctggaaagatatccgtgcccggatatttctcatcgccagcaaagagcttgagttgatcaccctgacagtgggcttcggcatcctcatcttctccctcatcgtcacctactgcatcaatgccaaagctgatgtccttttcattgctccccgggagccaggagctgtgtcatactgaggaggaccccagcttttcttgccagctcagcagttcacttcctagagcatctgtcccactgggacacaaccactaatttgtcactggaacctccctgggcctgtctcagattgggattaacataaaagagtggaactatccaaaagagacagggagaaataaataaattgcctcccttcctccgctcccctttcccatcaccccttccccatttcctcttccttctctactcatgccagattttgggattacaaatagaagcttcttgctcctgtttaactccctagttacccaccctaatttgcccttcaggacccttctactttttccttcctgccctgtacctctctctgctcctcacccccacccctgtacccagccaccttcctgactgggaaggacataaaaggtttaatgtcagggtcaaactacattgagcccctgaggacaggggcatctctgggctgagcctactgtctccttcccactgtcctttctccaggccctcagatggcacattagggtgggcgtgctgcgggtgggtatcccacctccagcccacagtgctcagttgtactttttattaagctgtaatatctatttttgtttttgtctttttcctttattctttttgtaaatatatatataatgagtttcattaaaatagattatccca

SEQ ID NO: 402930 - DNA, 1077 bp, Homo sapiens
atacaatcgagctcgtacccagcagcatagatattaccgtgtgttgtggcgcatcttctgtgcagctgtatgagtactcatgggtccagggccctttgcattctaatgagacggaccgactcccccggtgtgtgcgttctactgcacgattagccagggccttgtctcctgcctttgaactgagtcagtggagctctactgaatactctacatggactgagagccgctggaaagatatccgtgcccggatatttctcatcgccagcaaagagcttgagttgatcaccctgacagtgggcttcggcatcctcatcttctccctcatcgtcacctactgcatcaatgccaaagctgatgtccttttcattgctccccgggagccaggagctgtgtcatactgaggaggaccccagcttttcttgccagctcagcagttcacttcctagagcatctgtcccactgggacacaaccactaatttgtcactggaacctccctgggcctgtctcagattgggattaacataaaagagtggaactatccaaaagagacagggagaaataaataaattgcctcccttcctccgctcccctttcccatcaccccttccccatttcctcttccttctctactcatgccagattttgggattacaaatagaagcttcttgctcctgtttaactccctagttacccaccctaatttgcccttcaggacccttctactttttccttcctgccctgtacctctctctgctcctcacccccacccctgtacccagccaccttcctgactgggaaggacataaaaggtttaatgtcagggtcaaactacattgagcccctgaggacaggggcatctctgggctgagcctactgtctccttcccactgtcctttctccaggccctcagatggcacattagggtgggcgtgctgcgggtgggtatcccacctccagcccacagtgctcagttgtactttttattaagctgtaatatctatttttgtttttgtctttttcctttattctttttgtaaatatatatataatgagtttcattaaaatagattatccca

SEQ ID NO: 402931 - DNA, 1000 bp, Homo sapiens
tcgagctcggctacccttaatttgcaggatgagacggaccgactcccccggtgtgtgcgttctactgcacgattagccagggccttgtctcctgcctttgaactgagtcagtggagctctactgaatactctacatggactgagagccgctggaaagatatccgtgcccggatatttctcatcgccagcaaagagcttgagttgatcaccctgacagtgggcttcggcatcctcatcttctccctcatcgtcacctactgcatcaatgccaaagctgatgtccttttcattgctccccgggagccaggagctgtgtcatactgaggaggaccccagcttttcttgccagctcagcagttcacttcctagagcatctgtcccactgggacacaaccactaatttgtcactggaacctccctgggcctgtctcagattgggattaacataaaagagtggaactatccaaaagagacagggagaaataaataaattgcctcccttcctccgctcccctttcccatcaccccttccccatttcctcttccttctctactcatgccagattttgggattacaaatagaagcttcttgctcctgtttaactccctagttacccaccctaatttgcccttcaggacccttctactttttccttcctgccctgtacctctctctgctcctcacccccacccctgtacccagccaccttcctgactgggaaggacataaaaggtttaatgtcagggtcaaactacattgagcccctgaggacaggggcatctctgggctgagcctactgtctccttcccactgtcctttctccaggccctcagatggcacattagggtgggcgtgctgcgggtgggtatcccacctccagcccacagtgctcagttgtactttttattaagctgtaatatctatttttgtttttgtctttttcctttattctttttgtaaatatatatataatgagtttcattaaaatagattatccca

SEQ ID NO: 402932 - DNA, 2008 bp, Homo sapiens
  misc_feature (3)..(3): n is a, c, g, or t
  misc_feature (7)..(8): n is a, c, g, or t
  misc_feature (12)..(12): n is a, c, g, or t
  misc_feature (14)..(16): n is a, c, g, or t
tcngcgnnttcngnnngcgcctggaaacacgaacttccggtctcttaggctccgggccacagagacggtgtcagtggtagcctagagaggccgctaacagacaggagccgaacgggggcttccgctcagcagagaggcaagatggctacggcagggggtggctctggggctgacccgggaagtcggggtctccttcgccttctgtctttctgcgtcctactagcaggtttgtgcaggggaaactcagtggagaggaagatatatatccccttaaataaaacagctccctgtgttcgcctgctcaacgccactcatcagattggctgccagtcttcaattagtggagacacaggggttatccacgtagtagagaaagaggaggacctacagtgggtattgactgatggccccaaccccccttacatggttctgctggagagcaagcattttaccagggatttaatggagaagctgaaagggagaaccagccgaattgctggtcttgcagtgtccttgaccaagcccagtcctgcctcaggcttctctcctagtgtacagtgcccaaatgatgggtttggtgtttactccaattcctatgggccagagtttgctcactgcagagaaatacagtggaattcgctgggcaatggtttggcttatgaagactttagtttccccatctttcttcttgaagatgaaaatgaaaccaaagtcatcaagcagtgctatcaagatcacaacctgagtcagaatggctcagcaccaaccttcccactatgtgccatgcagctcttttcacacatgcatgctgtcatcagcactgccacctgcatgcggcgcagctccatccaaagcaccttcagcatcaacccagaaatcgtctgtgaccccctgtctgattacaatgtgtggagcatgctaaagcctataaatacaactgggacattaaagcctgacgacagggttgtggttgctgccacccggctggatagtcgttcctttttctggaatgtggccccaggggctgaaagcgcagtggcttcctttgtcacccagctggctgctgctgaagctttgcaaaaggcacctgatgtgaccaccctgccccgcaatgtcatgtttgtcttctttcaaggggaaacttttgactacattggcagctcgaggatggtctacgatatggagaagggcaagtttcccgtgcagttagagaatgttgactcatttgtggagctgggacaggtggccttaagaacttcattagagctttggatgcacacagatcctgtttctcagaaaaatgagtctgtacggaaccaggtggaggatctcctggccacattggagaagagtggtgctggtgtccctgctgtcatcctcaggaggccaaatcagtcccagcctctcccaccatcttccctgcagcgatttcttcgagctcgaaacatctctggcgttgttctggctgaccactctggtgccttccataacaaatattaccagagtatttacgacactgctgagaacattaatgtgagctatcccgaatggctgagccctgaagaggacctgaactttgtaacagacactgccaaggccctggcagatgtggccacggtgctgggacgtgctctgtatgagcttgcaggaggaaccaacttcagcgacacagttcaggctgatccccaaacggttacccgcctgctctatgggttcctgattaaagccaacaactcatggttccagtctatcctcaggcaggacctaaggtcctacttgggtgacgggcctcttcaacattacatcgctgtctccagccccaccaacaccacttatgttgtacagtatgccttggcaaatttgactggcacagtggtcaacctcacccgagagcagtgccaggatccaagtaaagtcccaagtgaaaacaaggatctgtatgagtactcacaggtccagggcagaggaccagtcgacgcggccgcgaatttagtagtagtagtcgacc

SEQ ID NO: 402933 - DNA, 1362 bp, Homo sapiens
  misc_feature (3)..(3): n is a, c, g, or t
  misc_feature (7)..(8): n is a, c, g, or t
  misc_feature (12)..(12): n is a, c, g, or t
  misc_feature (14)..(16): n is a, c, g, or t
  misc_feature (1271)..(1271): n is a, c, g, or t
  misc_feature (1276)..(1276): n is a, c, g, or t
tcngcgnnttcngnnngcgcctggaaacacgaacttccggtctcttaggctccgggccacagagacggtgtcagtggtagcctagagaggccgctaacagacaggagccgaacgggggcttccgctcagcagagaggcaagatggctacggcagggggtggctctggggctgacccgggaagtcggggtctccttcgccttctgtctttctgcgtcctactagcaggtttgtgcaggggaaactcagtggagaggaagatatatatccccttaaataaaacagctccctgtgttcgcctgctcaacgccactcatcagattggctgccagtcttcaattagtggagacacaggggttatccacgtagtagagaaagaggaggacctacagtgggtattgactgatggccccaaccccccttacatggttctgctggagagcaagcattttaccagggatttaatggagaagctgaaagggagaaccagccgaattgctggtcttgcagtgtccttgaccaagcccagtcctgcctcaggcttctctcctagtgtacagtgcccaaatgatgggtttggtgtttactccaattcctatgggccagagtttgctcactgcagagaaatacagtggaattcgctgggcaatggtttggcttatgaagactttagtttccccatctttcttcttgaagatgaaaatgaaaccaaagtcatcaagcagtgctatcaagatcacaacctgagtcagaatggctcagcaccaaccttcccactatgtgccatgcagctcttttcacacatgcatgctgtcatcagcactgccacctgcatgcggcgcagctccatccaaagcaccttcagcatcaacccagaaatcgtctgtgaccccctgtctgattacaatgtgtggagcatgctaaagcctataaatacaactgggacattaaagcctgacgacagggttgtggttgctgccacccggctggatagtcgttcctttttctggaatgtggccccaggggctgaaagcgcagtggcttcctttgtcacccagctggctgctgctgaagctttgcaaaaggcacctgatgtgaccaccctgccccgcaatgtcatgtttgtcttctttcaaggggaaacttttgactacattggcagctcgaggatggtctacgatatggagaagggcaagtttcccgtgcagttagagaatgttgactcatttgtggagctgggacaggtggccttaagaacttcattagagcttgngactntacttggatcctggcactgctctcgggtgaggttgaccactgtgccagtcaaaattgccaagcatactgtacaaacataagtgtgt

SEQ ID NO: 402934 - DNA, 439 bp, Homo sapiens
ccaactgaaagattcttctgccgtcacctggttcctaagtacttggtgtcccagtaaccagtccccctattccccatccttcccttcaggtgtttactccaattcctatgggccagagtttgctcactgcagagaaatacagtggaattcgctgggcaatggtttggcttatgaagactttagtttccccatctttcttcttgaagatgaaaatgaaaccaaagtcatcaagcaggtaatgacactgccagctcctagcaattccagttagaaagaagattatttttctagccaggtgtggtggtgtgtgcacgtagtcccagccacccgggaggctgagacaggaggatcacttgaggccgggaggcagaggtttcagtgagctgagatggcaccattgcactccagcctgggtgacagagcaaggccctgtgtcaca

SEQ ID NO: 402935 - DNA, 541 bp, Homo sapiens
ccagaagccagtggccagtagaactctcatccagcacaccgcgtcagcagcttggaacaagcaacagaaaccaaacacacagtggaaaatcccagaacccttcagcctcagtgcagcacagcctgacccccgacatgctggaaacgagacgtcctttctccaggaggtgaagcggctcattccttcctacagaacctccaagcctttagcaaactctgatgtgaaccaaataaaccaaacagacaagcgaaaggcttctcttggagagatgtaagaaatgaggtgggtctggtgtactttcctgcttcccaggcacaaagcaaaagtatgtttgagaatttcctatgacttatgctcagaaactcgactttcctgagttagggaactgtcgagcctaatctcacccactgtttctcactggtccttacctggtagttataattactcttagcacctggtattttctcttaaagcttttcctcatgagcactggatgttcaggtttcttcagtctcccttatctgttttggactcttcttta

SEQ ID NO: 402936 - DNA, 626 bp, Homo sapiens
attcttgctgttgaattgattcttagtgtttatttgcaaaacctcaaatgtgtatctaaagtcttgaatgctttctcatagttattcattgtatactcagtagatatgaaatatcaattttacaggctaccaaaatggtatttaatggtggctgacaggatagtgtttaaggacaatatgtattggatacttaaatttttctattacctgattcttggcacagatcattgaatttaagttatactgagattgcagaagatctgcctgcctcaataaccccagctatgctgcatgtttatttagtcctggttccttcctgtgccttctgctttctaagcatgtacagaagaaaataaaacaattatttggtttctaccttaacatctgcttgcatcaggaaagatgtctaaaaaaaatttgagggacatttttgcggacacttcctgaagcctggaccagttttatgtgatttgttgacatcctttttttttttctttacccttttctaatgcctgcttcttcaattatccttaaagacccagggttttaccacactgcaacttaaaatttgagggtaaatttggtaaatcttgagctccttaaaagatgatctgttttatacccat

SEQ ID NO: 402937 - DNA, 426 bp, Homo sapiens
ggaggatttgcaggatccatttagaaagatcctcccttacttccacaagcatggcctttggctcttaaatacctgtgctggggttttgtaattatagaaacaacaggaaccaaaactcattaatgttgagctacaaaccagagggaagcttctttctcaaaacagggctcaggcctagaaaaatctagttttctgaaatcgctagccagcaacagcactgagatggccatcccagaaacaaggccaacacagaagcacccataaaggctgctggaggttgggacaaagagatccttgctgtccttacagaccccctgacttccaaggagctcccctctcacccagcctggcctgccttctccacagggtagctgatcgtcagcatcatcttcaatggtgttgtcaagagcactcagtgctcctgcc

SEQ ID NO: 402938 - DNA, 462 bp, Homo sapiens
ggacgacagagatgaagtctaatattgagggtggcattgctgtctggaaacatgggacacgtggaaggacaggtattccctttatgtgtcaacttgtctcctcttctcctctaaaacttgaccagactaatagcccaccaacagagctgtggtccagcatctactcagaccaaaaagctacagcatctataagttgtctaaattatctggtctagaatttcaggtctcccacatctgtcaccttcccttacataccttgtgacccagctaccttgtaggacttgctcctccctgtaggtacccttgtggatccccaacacatatgtcctttttattagtctgttctcatgctgcttataaagacacacctgagaccgggcaatttatgaagaaaaagaggtttaagggatgtacagttccacgtggctggggaggtttcaccttctgccatgattgtgtggc

SEQ ID NO: 402939 - DNA, 348 bp, Homo sapiens
ctcagcctcccagttagctgggacttcaggtgcatgacaccatacctggctaaattttttgtagagacagagttttgccatgttgcccatgctggcttcgaactcctggactcaagtgatccacctgcttcagcctcccaaaaggctcggattacaggtgtgagccaccgcaccccgcctgatgttaaaacttaatctccaatgtggcagtattgatagatggcgtctttaagaggtgattgggtcatgaggattctgcactcatgaataaattaattcatggatctattggttaatagatgaatgggttatcataggagtggaaatagtgactttataagaagagga

SEQ ID NO: 402940 - DNA, 529 bp, Homo sapiens
gagatgcctgttgaactggaaagaaaagccaccaattcgtgatgccctgaaatgctcctgtgggtggcagcaggtggggagtgtggatgtcaggtacaggccgccgtgtctgagcgagggtggactacacactagggagcctctgggccactgggtgacactctgagaagtgtcacttgaaggtggcaccagcgcacttggaaggcattgagtatctgcagtcacagggcccctcctcacgatggaatgtccatacccagcacttcccctggagttctgttgagatgctgaaatgacctcataatcattattatgatgtttctgatgatttctaaacttgagcaaacttaaagcagagaatgcagaggtcttttccagatgtttctagtctttgtcacccaccccagcgaatgtcagggcaaactcagaactgcaaggctgcccaagagtccacctgatcatctggggctgggcagtaatgcacgcagtgtagcacatggtacacttgttttcacccaacaatgactgt

SEQ ID NO: 402941 - DNA, 247 bp, Homo sapiens
aagaccagtcctaataccgtttatgtagttttatgtaagagaagaggtaactggaaaatggcttctcagaacaatgaataaatattttggttctggttaattaaaactgccatagtttctttaattagaaaattatgctgttttcgagccaggtgtgaatgaaccccacagtaaagccagctttaagtgactcgatgtgaccttatcctttacagttagaaaacgtttccatttaagactttttttc

SEQ ID NO: 402942 - DNA, 508 bp, Homo sapiens
gaccagtgtgaaggcaaagatccacatctgccattccctccccaggctctagaaattgcatcaggtacaaacttagcaggttgatcactatcctagctcccatctcttcctggctgcctttgttaacaaaagtgagactgattttctttgtaagtatcaatgctttttgaatcatcttataaacaaagcatattttaagtttattacttcttccttctaacaggcaagaatttaatattcttccaaggctggtaagaactgtgcttaagacattccaccgaagtctcagagtctcatctaacattttttattcctttttaatcaatagagatggggcctcactatgttgcccaggcagatctcaaactcctggccccaagcgatcctaccacctcagcctcacaaagtgcagtgattataggcataagccactgtgcccagccccaacaaattatttattcaaagccacctcactaaaattccacttaaacacacaggttaattcact

SEQ ID NO: 402943 - DNA, 376 bp, Homo sapiens
cgcacagaggtgaatgatttcccaggcgaggctggctttttctcctggtgtctctgtacccttagcacccgccactccccagcctgcccagggggcctggaggactgcctctcacatgtgcacgcacaggacagcctgtcctgtgcggtggcggtcacagcattttctctacctttcttgaaagtgaggcctgcagagactgaaggcgcttggagggaaggttgtcacactcacggtggggagtgacagcttctgggcagaacaggagtcatgcacgtgcagaagcgctggtctgggggcagttttcaggcagctgccaaccaagcctgatgcctgtgggatgggggactgttgttgcatcctcgtggaaagtcag

SEQ ID NO: 402944 - DNA, 436 bp, Homo sapiens
ttttggtagcgacagggtctcaccctgtcggcgcagggtggtctcgaactccaagcctcaagtgagcctcctgcctcagcctctcagtgttgtattataggtgcatggcctcaagtattatttaagaaataattattaagaaatacattatgcggctgggtgcagtggttcatgctgtaatcccagcactttgggaggccaaggcgggtggatcacttgaggtcaggagtttcgagaccagcctggaaaacatagggaaaccccatctcttataaaaaatagaaaaattagctggacatggtggcgcatgcctacagtcccagctattgggaggctgaggcaggagaattgcttgaacctgggagctagaggttgcagtgagctaagatcacaccactgcactccagcctaggcaacagagtgagactccatctca

SEQ ID NO: 402945 - DNA, 608 bp, Homo sapiens
tatttttatttccctagtaatttgccctggcagactcgggggtcaaggacctggtgttgcaaaattccagtagttaccatgtccagaagatatactgtaaattgtgcttccagaagttgggtcatacaatggtacaaatggaaactttgatttattattttgttgcttcttgttaactaattttagaagactgagagtgggggtgtccatgctttagatccttcaaagaagggattaatgaaaatttgttgttgctttttggtaaaaactactcattgagctaacagctaaaaaactgaatttcaatattaccataaatttgaagacaaaatgtttccttgtggaggaggagtttgggcaaagtataaataagtaattaaaattgtgctcaactaaagagtttattgtggagggaaaagtgatctcgtgttcataagtggaaattaaatgtttttatagagtggtgcagttattgcgacagtgcaaattatattaatagctaatagagaattcaaataaaatgtttctaaattataaaggcctaccccttttaattgagttttgtgtgattgtcacatgaatgaaataaaatctaagtgtttctcatt

SEQ ID NO: 402946 - DNA, 367 bp, Homo sapiens
ggttcgaccttgtttatttcccatcactcatagataactctactgcctgataatcagtgccttgaaaaccattgcttcagcccgggcgtggtggctcatacctgtaatcacagcactttgggaggccaaggagggcagatcacaaggtcaggagtttgagaccagcctggccaacatagtgaaaccccttctatactaaaaatacaaaaattagccaggcatgctggtacacgcctgtaatcccagctacttgggagactgaggcaggagaatcgctggaacccgggagacggaggttgcagtgagccaagattgtgccattgcactccagcctagaagacaagagtgagactttgcctcaaaaaaa

SEQ ID NO: 402947 - DNA, 588 bp, Homo sapiens
gggagtatagtcatgtgccacaatgcccagcgaattttttaatttttagtagagacaggttttgctatgttgcccaggctggtcttgaactcctgggctcaagtgatcctcttctttgacctcccagtgttggcttttaaaaagattcgtctgtaagtatttctgcttgtctttaaatgatgaagtctgttttgttttgttttgttctgtttctttttttctttttttgagatagggtcttgctgtgtcacccaggctggagtgtagagacgtgatcacaactcactgcaacctcagtctcctgggctcacacgatcctcctgcctcagcctcctgcatagctacaggcgcaagctgccacacccgactaatttttttatattttagtagagactgggtttcaccatgtcacccaggctggtcttgaactcctgagctcaggcagtctgcccgcctcggcctcccaactacttgggagactgaggcaggagaatcgctggaacccgggagacggaggttgcagtgagccaagattgtgccattgcactccagcctagaagacaagagtgagactttgcctcaaaaaaa

SEQ ID NO: 402948 - DNA, 476 bp, Homo sapiens
cgccgccgccctcccccctcctctctctcggccgctcgtgcgctcactctccccgttgactgctcgtgactggttccgtgcgctgctctcttctcttgcattgccttcttcgttctctctctccttgttgtttcttttcttttctctttctgctcttttttttgtttttttttgttctttttttttttttttttttttttttttttttttgcagggttatctgtactttgtttaactgaaaaaaatgtagaaatatatgtaaagaatttaagacaagagtactgaatggatgatttgtcataggctttcccctttctttctgttctagcagcaggaaaagtttctctatatcctctccctctacctgtaacaattttgttttctactgttaattacattgtgtatttatagttctatgcttactgttgtgcatatactggcaataaaactgtacataacattacttgaaaaagtta

SEQ ID NO: 402949 - DNA, 6310 bp, Homo sapiens
gcaggccgagcccagtggcgcaggcactgagctgtacttatttgctgtgctatttgacctcttggtttcagagagctccctggaccatctaatggctatgggagatgataaaagcttcgatgatgaagaatcagtggatggaaataggccatcatcagctgcatcagccttcaaggttcctgcacctaaaacatccggaaatcctgccaacagtgcaaggaagcctggttcagcaggtggccctaaggttggaggtgcttctaaggaaggaggtgctggagcagttgatgaagatgattttataaaagcttttacagatgtcccttctattcagatttattctagtcgagaactcgaagaaacattaaataaaatcagggaaattttgtcagatgataaacatgactgggatcagcgtgccaatgcactgaagaaaattcgatcactgcttgttgctggagctgcacagtatgattgcttttttcaacatttacgattgttggatggagcacttaaactttcagctaaggatcttagatcccaggtggttagagaagcttgtattactgtagcccacctttcaacagttttgggaaacaagtttgatcatggcgctgaagccattgtacctacactttttaatctcgtccccaatagtgcaaaagtcatggcaacttctggatgtgcagcaatcagatttatcattcggcatactcatgtacccagacttatacctttaataacaagcaattgcacatcaaaatcagttcccgtgaggagacgttcatttgaatttttagatttattgttgcaagagtggcagactcattcattggaaagacatgcagccgtcttggttgaaactattaaaaagggaattcatgatgctgacgctgaggccagagtggaggcaagaaagacatacatgggtcttagaaaccactttcctggtgaagctgaaacattatataattcccttgagccatcttatcagaagagtcttcaaacttacttaaagagttctggcagtgtagcatctcttccacaatcagacaggtcctcatccagctcacaggaaagtctcaatcgccctttttcttccaaatggtctacagcaaatccatcaactgtggctggaagagtatcagcaggcagcagcaaagccagttcccttccaggaagcctgcagcgttcacgaagtgacattgatgtgaatgctgctgcaggtgccaaggcacatcatgctgctggacagtctgtgcgaagggggcgcttaggtgcaggtgccctgaatgcaggttcctatgcgtcactagaggatacttctgacaagctggatggaacagcatctgaagatggccgggtgagagcaaaactttcagcaccacttgctggcatgggaaatgccaaggcagattctagaggaagaagtcgaacaaaaatggtgtctcaatcacagcctggtagccggtctgggtctccaggaagagttctgaccacaacagccctgtccactgtgagctctggtgttcaaagagtcctggtcaattcagcctcagcacaaaaaagaagcaagataccacggagccagggctgtagcagagaggctagtccatctaggctttcagtggcccgaagcagtcgtattcctcgaccaagtgtgagtcaaggatgcagccgggaagctagtcgggagagcagcagagacacaagtcctgttcgctcttttcagcccctcgcctccagacaccattccagatcaactggtgccctctacgcccccgaagtgtatggggcctcaggtccaggttatgggatcagccaatcaagtcgactgtcgtcttctgttagtgccatgcgagtcctgaacacaggttctgatgtggaggaggcggtggcagatgccttgaaaaaaccagctcgaagaagatatgaatcatatggaatgcattcagatgatgacgccaacagcgatgcatctagtgcttgttcagaacgctcctatagttctcgaaatggtagtattcctacatatatgaggcagacggaagatgtggcagaagtcctcaatagatgtgctagttccaattggtcagaaaggaaagaaggcctcctaggtctgcagaacttattaaaaaatcagagaacactaagtcgagttgaactgaaaagattatgtgaaattttcacaagaatgtttgctgaccctcatggcaagagagtattcagcatgtttttggagactctagtggatttcatacaagtccacaaagatgatcttcaagattggttgtttgtactgctgacacaactactaaaaaaaatgggtgctgatttgcttggatctgttcaggcgttcaatattctaatgagatttacagttgatcagacccagacaccaagcttaaaggtgaaggttgctatccttaaatacatagaaactctggccaaacagatggatccaggagattttataaattccagtgaaactcgcctagcagtgtctcgggtcatcacttggacaacagaacccaaaagttctgatgttcggaaggcagcacagtcagtgctgatttcattatttgaactcaataccccagagtttacaatgttattaggagctttaccaaaaacttttcaggatggtgctaccaagcttcttcataatcaccttcgaaacactggcaatggaacccagagttccatggggagtcctttgacaagaccaacaccacgatcaccagctaactggtccagtcctcttacttctcctaccaatacatcacagaatactttatctccaagtgcatttgattatgacacagaaaatatgaactctgaagatatttatagctctcttagaggtgtcactgaagcaatccagaatttcagcttccgtagccaagaagatatgaatgagccattgaaaagggattctaaaaaagatgatggcgattcaatgtgtggtggtcctgggatgtctgacccaagagcaggaggtgatgctactgactcaagtcaaacagctcttgataataaagcttcattgctccattcaatgcctactcactcctctccacgctctcgagactataatccatataactattcagatagcatcagtcccttcaacaagtctgccctcaaggaagccatgtttgatgatgatgctgaccagtttcctgacgatctttccctagatcattctgacctagttgcagagttgttgaaggagctgtctaaccataatgagcgtgtagaagaaagaaaaattgccctctatgaacttatgaaactgacacaggaagaatcttttagtgtttgggatgaacacttcaaaacaatattgcttttattgcttgaaacgcttggagataaagagcctacaatcagggctttggcattaaaggttttaagagaaatcctaaggcatcaaccagcaagatttaaaaactatgcagaattgactgtcatgaaaacattggaagcacataaagatcctcataaggaggtggtgagatctgctgaggaagcggcatcagtgttggccacttcaattagtccagagcagtgcatcaaagtgctttgtcctatcattcaaactgcagactacccaattaatctggctgcaatcaaaatgcaaacaaaagtgatagagagagtgtccaaggaaaccctaaacctgcttttgccagagattatgccaggtctaatacagggttatgataattcagagagcagtgttcggaaagcttgtgtcttctgcctggtggctgttcatgcggtaattggtgatgaactaaaaccacatctcagtcaacttactggcagtaaaatgaagctactgaatctttacatcaaacgtgcacaaacaggttctggaggagctgatcccactactgatgtttctggacaaagttagtgaagctcatcacagcgaaccaggtctctcaaaagaaaggacagatagaccaccctcatcaatgaaaggaagttctcaaacacatcctttggaacttactattgtttcccagttttagttttttgtttcgtttcgttttgtattttctgtaacagaggactatcctcagtctgcatgtaacttttatgatagttattccaaattcaagaagaagcagtattaacatcaattgatcgacacaaagtaatttttaatttaattcatcatttcacatgtttgtactttgtcttcccattaacctttgccagtgttatgattgtataaatttttttaaatgctggttaaacaggaatgcttaaagctttaaaagtttaacagtctaaaacatttttgcttttattcaactgcagaataatatttttattgctactttgagttttgtttcgtatcatgtcctatgctagaaatatttaaatgatgtgaaacaaagcaggactaatttgaactacagctggactccgtttgtgtgatggtgatacatgtcattagttgcaacttctttggggtgatctatagtttgaaaactaaaacctcaaagacagatgttacagaatcagccagttctgtaaaactgatattgtctattggttattgatcttgccatctttatttaaaaccatgtcccttctatgatcccttaagaaagctgcaccaaatcatctgcctgttttttcttgatacttactgaaatagaaggttttattgcagggtttattttggtttgtttatatctttgttgtgaatgatgcttttttgtatttattaatatcaaattcacttatgaataaacttgataatggaaacggacaaaaaaaatcaagtgcgtgtgtgtccttgaccgtcttctgtttctcacgtaataaacaaattatcgagacatgggagtgaccagcaccttttctttaaatggtggaacctggtttccttttaccatgaaattgtcttacttgaaaatattgatcctgatgagagagaagatggtgccaaggctgtctttgtataatgggctcaaattctctacctcttcagggctaatacttttaactgagctgctgcctatagtgtcttttggaaaactacttaaagggtgattttctgttactttttagcaaatttttttaatcacctcttgctacacccattcttttcatgtgcagccgactcaaaaattaccagttttggtgaaaggctaaattagataatttggaaccaggatactaatgatttctcatctttacttttttttaatcctaatataaagtgaatttgattgaaaaggcaaatagctattagggaagcagtttgccattgttgcagagttatctgtactttgtttaactgaaaaaaatgtagaaatatatgtaaagaatttaagacaagagtactgaatggatgatttgtcataggctttcccctttctttctgttctagcagcaggaaaagtttctctatatcctctccctctacctgtaacaattttgttttctactgttaattacattgtgtatttatagttctatgcttactgttgtgcatatactggcaataaaactgtacataacattacttgaaaaagttaataatgtatatcagtttttctgtctcactgtgtaacaagtcactcagttttattttaactttagacggtcttgtatcagtggtggtctcttgaattttgtaagttcatctgaggagaaaagatttttcaggtgtagctaccacaatcaaaggtatatagctacatacgcatgtatatattacagcttatctgtaagaagaaaatgcattttaaacacaactcttctcagtagcattttatgacctttggatatgtttgtaatcatttcgaatcaaaatattgatttaattttgacctctggtttaagatactgctttaactactgttgacaaccaagtagagtgacttaagctgaacagtaactaactggaaaattagataagcacctggcatctaatggcaggcaggcactcaagaaatgaattaactacataatggaaaagtatggtttaatgtgtccaaatgaaagctagtagatgtaaacatggaaaaattgtgtttacaattttataatctcagttgataagactataagaaagctgattatttaaatcactatatacaatacacccttaatttgttcattccagaaacatactgagatgtcagctacttaaaaatggtcacaaaaagctactgtttatatttttcctcctgctattctctcccaaattaattattaataagtgttgttcatttactgcactgctgagaactaattaaaattatatattccagattgtaaaaca

SEQ ID NO: 402950 - DNA, 5661 bp, Homo sapiens
gcaggccgagcccagtggcgcaggcactgagctgtacttatttgctgtgctatttgacctcttggtttcagagagctccctggaccatctaatggctatgggagatgataaaagcttcgatgatgaagaatcagtggatggaaataggccatcatcagctgcatcagccttcaaggttcctgcacctaaaacatccggaaatcctgccaacagtgcaaggaagcctggttcagcaggtggccctaaggttggaggtgcttctaaggaaggaggtgctggagcagttgatgaagatgattttataaaagcttttacagatgtcccttctattcagatttattctagtcgagaactcgaagaaacattaaataaaatcagggaaattttgtcagatgataaacatgactgggatcagcgtgccaatgcactgaagaaaattcgatcactgcttgttgctggagctgcacagtatgattgcttttttcaacatttacgattgttggatggagcacttaaactttcagctaaggatcttagatcccaggtggttagagaagcttgtattactgtagcccacctttcaacagttttgggaaacaagtttgatcatggcgctgaagccattgtacctacactttttaatctcgtccccaatagtgcaaaagtcatggcaacttctggatgtgcagcaatcagatttatcattcggcatactcatgtacccagacttatacctttaataacaagcaattgcacatcaaaatcagttcccgtgaggagacgttcatttgaatttttagatttattgttgcaagagtggcagactcattcattggaaagacatgcagccgtcttggttgaaactattaaaaagggaattcatgatgctgacgctgaggccagagtggaggcaagaaagacatacatgggtcttagaaaccactttcctggtgaagctgaaacattatataattcccttgagccatcttatcagaagagtcttcaaacttacttaaagagttctggcagtgtagcatctcttccacaatcagacaggtcctcatccagctcacaggaaagtctcaatcgccctttttcttccaaatggtctacagcaaatccatcaactgtggctggaagagtatcagcaggcagcagcaaagccagttcccttccaggaagcctgcagcgttcacgaagtgacattgatgtgaatgctgctgcaggtgccaaggcacatcatgctgctggacagtctgtgcgaagggggcgcttaggtgcaggtgccctgaatgcaggttcctatgcgtcactagaggatacttctgacaagctggatggaacagcatctgaagatggccgggtgagagcaaaactttcagcaccacttgctggcatgggaaatgccaaggcagattctagaggaagaagtcgaacaaaaatggtgtctcaatcacagcctggtagccggtctgggtctccaggaagagttctgaccacaacagccctgtccactgtgagctctggtgttcaaagagtcctggtcaattcagcctcagcacaaaaaagaagcaagataccacggagccagggctgtagcagagaggctagtccatctaggctttcagtggcccgaagcagtcgtattcctcgaccaagtgtgagtcaaggatgcagccgggaagctagtcgggagagcagcagagacacaagtcctgttcgctcttttcagcccctcgcctccagacaccattccagatcaactggtgccctctacgcccccgaagtgtatggggcctcaggtccaggttatgggatcagccaatcaagtcgactgtcgtcttctgttagtgccatgcgagtcctgaacacaggttctgatgtggaggaggcggtggcagatgccttgaaaaaaccagctcgaagaagatatgaatcatatggaatgcattcagatgatgacgccaacagcgatgcatctagtgcttgttcagaacgctcctatagttctcgaaatggtagtattcctacatatatgaggcagacggaagatgtggcagaagtcctcaatagatgtgctagttccaattggtcagaaaggaaagaaggcctcctaggtctgcagaacttattaaaaaatcagagaacactaagtcgagttgaactgaaaagattatgtgaaattttcacaagaatgtttgctgaccctcatggcaagagagtattcagcatgtttttggagactctagtggatttcatacaagtccacaaagatgatcttcaagattggttgtttgtactgctgacacaactactaaaaaaaatgggtgctgatttgcttggatctgttcaggcgttcaatattctaatgagatttacagttgatcagacccagacaccaagcttaaaggtgaaggttgctatccttaaatacatagaaactctggccaaacagatggatccaggagattttataaattccagtgaaactcgcctagcagtgtctcgggtcatcacttggacaacagaacccaaaagttctgatgttcggaaggcagcacagtcagtgctgatttcattatttgaactcaataccccagagtttacaatgttattaggagctttaccaaaaacttttcaggatggtgctaccaagcttcttcataatcaccttcgaaacactggcaatggaacccagagttccatggggagtcctttgacaagaccaacaccacgatcaccagctaactggtccagtcctcttacttctcctaccaatacatcacagaatactttatctccaagtgcatttgattatgacacagaaaatatgaactctgaagatatttatagctctcttagaggtgtcactgaagcaatccagaatttcagcttccgtagccaagaagatatgaatgagccattgaaaagggattctaaaaaagatgatggcgattcaatgtgtggtggtcctgggatgtctgacccaagagcaggaggtgatgctactgactcaagtcaaacagctcttgataataaagcttcattgctccattcaatgcctactcactcctctccacgctctcgagactataatccatataactattcagatagcatcagtcccttcaacaagtctgccctcaaggaagccatgtttgatgatgatgctgaccagtttcctgacgatctttccctagatcattctgacctagttgcagagttgttgaaggagctgtctaaccataatgagcgtgtagaagaaagaaaaattgccctctatgaacttatgaaactgacacaggaagaatcttttagtgtttgggatgaacacttcaaaacaatattgcttttattgcttgaaacgcttggagataaagagcctacaatcagggctttggcattaaaggttttaagagaaatcctaaggcatcaaccagcaagatttaaaaactatgcagaattgactgtcatgaaaacattggaagcacataaagatcctcataaggaggtagatacccaatagtgggattgctggatcaaatggagttctacttttagttctgtaaggactgtatttctaagagaaagcaactgagcaatagcattaggtggtgagatctgctgaggaagcggcatcagtgttggccacttcaattagtccagagcagtgcatcaaagtgctttgtcctatcattcaaactgcagactacccaattaatctggctgcaatcaaaatgcaaacaaaagtgatagagagagtgtccaaggaaaccctaaacctgcttttgccagagattatgccaggtctaatacagggttatgataattcagagagcagtgttcggaaagcttgtgtcttctgcctggtggctgttcatgcggtaattggtgatgaactaaaaccacatctcagtcaacttactggcagtaaaatgaagctactgaatctttacatcaaacgtgcacaaacaggttctggaggagctgatcccactactgatgtttctggacaaagttagtgaagctcatcacagcgaaccaggtctctcaaaagaaaggacagatagaccaccctcatcaatgaaaggaagttctcaaacacatcctttggaacttactattgtttcccagttttagttttttgtttcgtttcgttttgtattttctgtaacagaggactatcctcagtctgcatgtaacttttatgatagttattccaaattcaagaagaagcagtattaacatcaattgatcgacacaaagtaatttttaatttaattcatcatttcacatgtttgtactttgtcttcccattaacctttgccagtgttatgattgtataaatttttttaaatgctggttaaacaggaatgcttaaagctttaaaagtttaacagtctaaaacatttttgcttttattcaactgcagaataatatttttattgctactttgagttttgtttcgtatcatgtcctatgctagaaatatttaaatgatgtgaaacaaagcaggactaatttgaactacagctggactccgtttgtgtgatggtgatacatgtcattagttgcaacttctttggggtgatctatagtttgaaaactaaaacctcaaagacagatgttacagaatcagccagttctgtaaaactgatattgtctattggttattgatcttgccatctttatttaaaaccatgtcccttctatgatcccttaagaaagctgcaccaaatcatctgcctgttttttcttgatacttactgaaatagaaggttttattgcagggtttattttggtttgtttatatctttgttgtgaatgatgcttttttgtatttattaatatcaaattcacttatgaataaacttgataatggaaacggacaaaaaaaatcaagtgcgtgtgtgtccttgaccgtcttctgtttctcacgtaataaacaaattatcgagacatgggagtgaccagcaccttttctttaaatggtggaacctggtttccttttaccatgaaattgtcttacttgaaaatattgatcctgatgagagagaagatggtgccaaggctgtctttgtataatgggctcaaattctctacctcttcagggctaatacttttaactgagctgctgcctatagtgtcttttggaaaactacttaaagggtgattttctgttactttttagcaaatttttttaatcacctcttgctacacccattcttttcatgtgcagccgactcaaaaattaccagttttggtgaaaggctaaattagataatttggaaccaggatactaatgatttctcatctttacttttttttaatcctaatataaagtgaatttgattgaaaaggcaaatagctattagggaagcagtttgccattgttgcagagttatctgtactttgtttaactgaaaaaaatgtagaaatatatgtaaagaatttaagacaagagtactgaatggatgatttgtcataggctttcccctttctttctgttctagcagcaggaaaagtttctctatatcctctccctctacctgtaacaattttgttttctactgttaattacattgtgtatttatagttctatgcttactgttgtgcatatactggcaataaaactgtacataacattacttgaaaaagtta

SEQ ID NO: 402951 - DNA, 5397 bp, Homo sapiens
gcaggccgagcccagtggcgcaggcactgagctgtacttatttgctgtgctatttgacctcttggtttcagagagctccctggaccatctaatggctatgggagatgataaaagcttcgatgatgaagaatcagtggatggaaataggccatcatcagctgcatcagccttcaaggttcctgcacctaaaacatccggaaatcctgccaacagtgcaaggaagcctggttcagcaggtggccctaaggttggaggtgcttctaaggaaggaggtgctggagcagttgatgaagatgattttataaaagcttttacagatgtcccttctattcagatttattctagtcgagaactcgaagaaacattaaataaaatcagggaaattttgtcagatgataaacatgactgggatcagcgtgccaatgcactgaagaaaattcgatcactgcttgttgctggagctgcacagtatgattgcttttttcaacatttacgattgttggatggagcacttaaactttcagctaaggatcttagatcccaggtggttagagaagcttgtattactgtagcccacctttcaacagttttgggaaacaagtttgatcatggcgctgaagccattgtacctacactttttaatctcgtccccaatagtgcaaaagtcatggcaacttctggatgtgcagcaatcagatttatcattcggcatactcatgtacccagacttatacctttaataacaagcaattgcacatcaaaatcagttcccgtgaggagacgttcatttgaatttttagatttattgttgcaagagtggcagactcattcattggaaagacatgcagccgtcttggttgaaactattaaaaagggaattcatgatgctgacgctgaggccagagtggaggcaagaaagacatacatgggtcttagaaaccactttcctggtgaagctgaaacattatataattcccttgagccatcttatcagaagagtcttcaaacttacttaaagagttctggcagtgtagcatctcttccacaatcagacaggtcctcatccagctcacaggaaagtctcaatcgccctttttcttccaaatggtctacagcaaatccatcaactgtggctggaagagtatcagcaggcagcagcaaagccagttcccttccaggaagcctgcagcgttcacgaagtgacattgatgtgaatgctgctgcaggtgccaaggcacatcatgctgctggacagtctgtgcgaagggggcgcttaggtgcaggtgccctgaatgcaggttcctatgcgtcactagaggatacttctgacaagctggatggaacagcatctgaagatggccgggtgagagcaaaactttcagcaccacttgctggcatgggaaatgccaaggcagattctagaggaagaagtcgaacaaaaatggtgtctcaatcacagcctggtagccggtctgggtctccaggaagagttctgaccacaacagccctgtccactgtgagctctggtgttcaaagagtcctggtcaattcagcctcagcacaaaaaagaagcaagataccacggagccagggctgtagcagagaggctagtccatctaggctttcagtggcccgaagcagtcgtattcctcgaccaagtgtgagtcaaggatgcagccgggaagctagtcgggagagcagcagagacacaagtcctgttcgctcttttcagcccctcgcctccagacaccattccagatcaactggtgccctctacgcccccgaagtgtatggggcctcaggtccaggttatgggatcagccaatcaagtcgactgtcgtcttctgttagtgccatgcgagtcctgaacacaggttctgatgtggaggaggcggtggcagatgccttgaaaaaaccagctcgaagaagatatgaatcatatggaatgcattcagatgatgacgccaacagcgatgcatctagtgcttgttcagaacgctcctatagttctcgaaatggtagtattcctacatatatgaggcagacggaagatgtggcagaagtcctcaatagatgtgctagttccaattggtcagaaaggaaagaaggcctcctaggtctgcagaacttattaaaaaatcagagaacactaagtcgagttgaactgaaaagattatgtgaaattttcacaagaatgtttgctgaccctcatggcaagagagtattcagcatgtttttggagactctagtggatttcatacaagtccacaaagatgatcttcaagattggttgtttgtactgctgacacaactactaaaaaaaatgggtgctgatttgcttggatctgttcaggcgttcaatattctaatgagatttacagttgatcagacccagacaccaagcttaaaggtgaaggttgctatccttaaatacatagaaactctggccaaacagatggatccaggagattttataaattccagtgaaactcgcctagcagtgtctcgggtcatcacttggacaacagaacccaaaagttctgatgttcggaaggcagcacagtcagtgctgatttcattatttgaactcaataccccagagtttacaatgttattaggagctttaccaaaaacttttcaggatggtgctaccaagcttcttcataatcaccttcgaaacactggcaatggaacccagagttccatggggagtcctttgacaagaccaacaccacgatcaccagctaactggtccagtcctcttacttctcctaccaatacatcacagaatactttatctccaagtgcatttgattatgacacagaaaatatgaactctgaagatatttatagctctcttagaggtgtcactgaagcaatccagaatttcagcttccgtagccaagaagatatgaatgagccattgaaaagggattctaaaaaagatgatggcgattcaatgtgtggtggtcctgggatgtctgacccaagagcaggaggtgatgctactgactcaagtcaaacagctcttgataataaagcttcattgctccattcaatgcctactcactcctctccacgctctcgagactataatccatataactattcagatagcatcagtcccttcaacaagtctgccctcaaggaagccatgtttgatgatgatgctgaccagtttcctgacgatctttccctagatcattctgacctagttgcagagttgttgaaggagctgtctaaccataatgagcgtgtagaagaaagaaaaattgccctctatgaacttatgaaactgacacaggaagaatcttttagtgtttgggatgaacacttcaaaacaatattgcttttattgcttgaaacgcttggagataaagagcctacaatcagggctttggcattaaaggttttaagagaaatcctaaggcatcaaccagcaagatttaaaaactatgcagaattgactgtcatgaaaacattggaagcacataaagatcctcataaggaggtggtgagatctgctgaggaagcggcatcagtgttggccacttcaattagtccagagcagtgcatcaaagtgctttgtcctatcattcaaactgcagactacccaattaatctggctgcaatcaaaatgcaaacaaaagtgatagagagagtgtccaaggaaaccctaaacctgcttttgccagagattatgccaggtctaatacagggttatgataattcagagagcagtgttcggaaagcttgtgtcttctgcctggtggctgttcatgcggtaattggtgatgaactaaaaccacatctcagtcaacttactggcagtaaaatgaagctactgaatctttacatcaaacgtgcacaaacaggttctggaggagctgatcccactactgatgtttctggacaaagttagtgaagctcatcacagcgaaccaggtctctcaaaagaaaggacagatagaccaccctcatcaatgaaaggaagttctcaaacacatcctttggaacttactattgtttcccagttttagttttttgtttcgtttcgttttgtattttctgtaacagaggactatcctcagtctgcatgtaacttttatgatagttattccaaattcaagaagaagcagtattaacatcaattgatcgacacaaagtaatttttaatttaattcatcatttcacatgtttgtactttgtcttcccattaacctttgccagtgttatgattgtataaatttttttaaatgctggttaaacaggaatgcttaaagctttaaaagtttaacagtctaaaacatttttgcttttattcaactgcagaataatatttttattgctactttgagttttgtttcgtatcatgtcctatgctagaaatatttaaatgatgtgaaacaaagcaggactaatttgaactacagctggactccgtttgtgtgatggtgatacatgtcattagttgcaacttctttggggtgatctatagtttgaaaactaaaacctcaaagacagatgttacagaatcagccagttctgtaaaactgatattgtctattggttattgatcttgccatctttatttaaaaccatgtcccttctatgatcccttaagaaagctgcaccaaatcatctgcctgttttttcttgatacttactgaaatagaaggttttattgcagggtttattttggtttgtttatatctttgttgtgaatgatgcttttttgtatttattaatatcaaattcacttatgaataaacttgataatggaaacggacaaaaaaaatcaagtgcgtgtgtgtccttgaccgtcttctgtttctcacgtaataaacaaattatcgagacatgggagtgaccagcaccttttctttaaatggtggaacctggtttccttttaccatgaaattgtcttacttgaaaatattgatcctgatgagagagaagatggtgccaaggctgtctttgtataatgggctcaaattctctacctcttcagggctaatacttttaactgagctgctgcctatagtgtcttttggaaaactacttaaagggtgattttctgttactttttagcaaatttttttaatcacctcttgctacacccattcttttcatgtgcagccgactcaaaaattaccagttttggtgaaaggctaaattagataatttggaaccaggatactaatgatttctcatctttacttttttaatcttatattaaggatttgtggaaggaatagtttacggagcagtgcatgtgcgagtattgtcttgtactgaacagtggattttttgattgcaggttggggttggagtccttttggtaagaattttctccccgaaaggggaggttcgggtggagataaaaaagggcctggt

SEQ ID NO: 402952 - DNA, 1622 bp, Homo sapiens
taataatatatgttgactcacattaataacatcaccattttatcaattacataataaaacaaattgtcaacgtatccaaatattaagttacacagctcaaaaggcatataaaatattagatgtctgctcaattcattagcagaaacccatttcttttttgcaagagaggttgggaaggaaaaaaaaaatcacactttcaaacaaaaataagttggtaaacacacttctgataagtatgggaaaaaaattacaagaggtgtttccctttgtcttcccattaacctttgccagtgttatgattgtataaatttttttaaatgctggttaaacaggaatgcttaaagctttaaaagtttaacagtctaaaacatttttgcttttattcaactgcagaataatatttttattgctactttgagttttgtttcgtatcatgtcctatgctagaaatatttaaatgatgtgaaacaaagcaggactaatttgaactacagctggactccgtttgtgtgatggtgatacatgtcattagttgcaacttctttggggtgatctatagtttgaaaactaaaacctcaaagacagatgttacagaatcagccagttctgtaaaactgatattgtctattggttattgatcttgccatctttatttaaaaccatgtcccttctatgatcccttaagaaagctgcaccaaatcatctgcctgttttttcttgatacttactgaaatagaaggttttattgcagggtttattttggtttgtttatatctttgttgtgaatgatgcttttttgtatttattaatatcaaattcacttatgaataaacttgataatggaaacggacaaaaaaaatcaagtgcgtgtgtgtccttgaccgtcttctgtttctcacgtaataaacaaattatcgagacatgggagtgaccagcaccttttctttaaatggtggaacctggtttccttttaccatgaaattgtcttacttgaaaatattgatcctgatgagagagaagatggtgccaaggctgtctttgtataatgggctcaaattctctacctcttcagggctaatacttttaactgagctgctgcctatagtgtcttttggaaaactacttaaagggtgattttctgttactttttagcaaatttttttaatcacctcttgctacacccattcttttcatgtgcagccgactcaaaaattaccagttttggtgaaaggctaaattagataatttggaaccaggatactaatgatttctcatctttacttttttttaatcctaatataaagtgaatttgattgaaaaggcaaatagctattagggaagcagtttgccattgttgcagagttatctgtactttgtttaactgaaaaaaatgtagaaatatatgtaaagaatttaagacaagagtactgaatggatgatttgtcataggctttcccctttctttctgttctagcagcaggaaaagtttctctatatcctctccctctacctgtaacaattttgttttctactgttaattacattgtgtatttatagttctatgcttactgttgtgcatatactggcaataaaactgtacataacattacttgaaaaagtta

SEQ ID NO: 402953 - DNA, 896 bp, Homo sapiens
ctggccccccttgcagatctatgcaggtttattttggtttgtttatatctttgttgtgaatgatgcttttttgtatttattaatatcaaattcacttatgaataaacttgataatggaaacggacaaaaaaaatcaagtgcgtgtgtgtccttgaccgtcttctgtttctcacgtaataaacaaattatcgagacatgggagtgaccagcaccttttctttaaatggtggaacctggtttccttttaccatgaaattgtcttacttgaaaatattgatcctgatgagagagaagatggtgccaaggctgtctttgtataatgggctcaaattctctacctcttcagggctaatacttttaactgagctgctgcctatagtgtcttttggaaaactacttaaagggtgattttctgttactttttagcaaatttttttaatcacctcttgctacacccattcttttcatgtgcagccgactcaaaaattaccagttttggtgaaaggctaaattagataatttggaaccaggatactaatgatttctcatctttacttttttttaatcctaatataaagtgaatttgattgaaaaggcaaatagctattagggaagcagtttgccattgttgcagagttatctgtactttgtttaactgaaaaaaatgtagaaatatatgtaaagaatttaagacaagagtactgaatggatgatttgtcataggctttcccctttctttctgttctagcagcaggaaaagtttctctatatcctctccctctacctgtaacaattttgttttctactgttaattacattgtgtatttatagttctatgcttactgttgtgcatatactggcaataaaactgtacataacattacttgaaaaagtta

SEQ ID NO: 402954 - DNA, 662 bp, Homo sapiens
gctcggtaccgactttcagtagtagggagaaaagatttttcaggtgtagctaccacaatcaaaggtatatagctacatacgcatgtatatattacagcttatctgtaagaagaaaatgcattttaaacacaactcttctcagtagcattttatgacctttggatatgtttgtaatcatttcgaatcaaaatattgatttaattttgacctctggtttaagatactgctttaactactgttgacaaccaagtagagtgacttaagctgaacagtaactaactggaaaattagataagcacctggcatctaatggcaggcaggcactcaagaaatgaattaactacataatggaaaagtatggtttaatgtgtccaaatgaaagctagtagatgtaaacatggaaaaattgtgtttacaattttataatctcagttgataagactataagaaagctgattatttaaatcactatatacaatacacccttaatttgttcattccagaaacatactgagatgtcagctacttaaaaatggtcacaaaaagctactgtttatatttttcctcctgctattctctcccaaattaattattaataagtgttgttcatttactgcactgctgagaactaattaaaattatatattccagattgtaaaaca

SEQ ID NO: 402955 - DNA, 5615 bp, Homo sapiens
gcaggccgagcccagtggcgcaggcactgagctgtacttatttgctgtgctatttgacctcttggtttcagagagctccctggaccatctaatggctatgggagatgataaaagcttcgatgatgaagaatcagtggatggaaataggccatcatcagctgcatcagccttcaaggttcctgcacctaaaacatccggaaatcctgccaacagtgcaaggaagcctggttcagcaggtggccctaaggttggaggtgcttctaaggaaggaggtgctggagcagttgatgaagatgattttataaaagcttttacagatgtcccttctattcagatttattctagtcgagaactcgaagaaacattaaataaaatcagggaaattttgtcagatgataaacatgactgggatcagcgtgccaatgcactgaagaaaattcgatcactgcttgttgctggagctgcacagtatgattgcttttttcaacatttacgattgttggatggagcacttaaactttcagctaaggatcttagatcccaggtggttagagaagcttgtattactgtagcccacctttcaacagttttgggaaacaagtttgatcatggcgctgaagccattgtacctacactttttaatctcgtccccaatagtgcaaaagtcatggcaacttctggatgtgcagcaatcagatttatcattcggcatactcatgtacccagacttatacctttaataacaagcaattgcacatcaaaatcagttcccgtgaggagacgttcatttgaatttttagatttattgttgcaagagtggcagactcattcattggaaagacatgcagccgtcttggttgaaactattaaaaagggaattcatgatgctgacgctgaggccagagtggaggcaagaaagacatacatgggtcttagaaaccactttcctggtgaagctgaaacattatataattcccttgagccatcttatcagaagagtcttcaaacttacttaaagagttctggcagtgtagcatctcttccacaatcagacaggtcctcatccagctcacaggaaagtctcaatcgccctttttcttccaaatggtctacagcaaatccatcaactgtggctggaagagtatcagcaggcagcagcaaagccagttcccttccaggaagcctgcagcgttcacgaagtgacattgatgtgaatgctgctgcaggtgccaaggcacatcatgctgctggacagtctgtgcgaagggggcgcttaggtgcaggtgccctgaatgcaggttcctatgcgtcactagaggatacttctgacaagctggatggaacagcatctgaagatggccgggtgagagcaaaactttcagcaccacttgctggcatgggaaatgccaaggcagattctagaggaagaagtcgaacaaaaatggtgtctcaatcacagcctggtagccggtctgggtctccaggaagagttctgaccacaacagccctgtccactgtgagctctggtgttcaaagagtcctggtcaattcagcctcagcacaaaaaagaagcaagataccacggagccagggctgtagcagagaggctagtccatctaggctttcagtggcccgaagcagtcgtattcctcgaccaagtgtgagtcaaggatgcagccgggaagctagtcgggagagcagcagagacacaagtcctgttcgctcttttcagcccctcgcctccagacaccattccagatcaactggtgccctctacgcccccgaagtgtatggggcctcaggtccaggttatgggatcagccaatcaagtcgactgtcgtcttctgttagtgccatgcgagtcctgaacacaggttctgatgtggaggaggcggtggcagatgccttgaaaaaaccagctcgaagaagatatgaatcatatggaatgcattcagatgatgacgccaacagcgatgcatctagtgcttgttcagaacgctcctatagttctcgaaatggtagtattcctacatatatgaggcagacggaagatgtggcagaagtcctcaatagatgtgctagttccaattggtcagaaaggaaagaaggcctcctaggtctgcagaacttattaaaaaatcagagaacactaagtcgagttgaactgaaaagattatgtgaaattttcacaagaatgtttgctgaccctcatggcaagagagtattcagcatgtttttggagactctagtggatttcatacaagtccacaaagatgatcttcaagattggttgtttgtactgctgacacaactactaaaaaaaatgggtgctgatttgcttggatctgttcaggcaaaagttcagaaagcccttgatgttacaagagagtcttttccaaatgatcttcagttcaatattctaatgagatttacagttgatcagacccagacaccaagcttaaaggtgaaggttgctatccttaaatacatagaaactctggccaaacagatggatccaggagattttataaattccagtgaaactcgcctagcagtgtctcgggtcatcacttggacaacagaacccaaaagttctgatgttcggaaggcagcacagtcagtgctgatttcattatttgaactcaataccccagagtttacaatgttattaggagctttaccaaaaacttttcaggatggtgctaccaagcttcttcataatcaccttcgaaacactggcaatggaacccagagttccatggggagtcctttgacaagaccaacaccacgatcaccagctaactggtccagtcctcttacttctcctaccaatacatcacagaatactttatctccaagtgcatttgattatgacacagaaaatatgaactctgaagatatttatagctctcttagaggtgtcactgaagcaatccagaatttcagcttccgtagccaagaagatatgaatgagccattgaaaagggattctaaaaaagatgatggcgattcaatgtgtggtggtcctgggatgtctgacccaagagcaggaggtgatgctactgactcaagtcaaacagctcttgataataaagcttcattgctccattcaatgcctactcactcctctccacgctctcgagactataatccatataactattcagatagcatcagtcccttcaacaagtctgccctcaaggaagccatgtttgatgatgatgctgaccagtttcctgacgatctttccctagatcattctgacctagttgcagagttgttgaaggagctgtctaaccataatgagcgtgtagaagaaagaaaaattgccctctatgaacttatgaaactgacacaggaagaatcttttagtgtttgggatgaacacttcaaaacaatattgcttttattgcttgaaacgcttggagataaagagcctacaatcagggctttggcattaaaggttttaagagaaatcctaaggcatcaaccagcaagatttaaaaactatgcagaattgactgtcatgaaaacattggaagcacataaagatcctcataaggaggtggtgagatctgctgaggaagcggcatcagtgttggccacttcaattagtccagagcagtgcatcaaagtgctttgtcctatcattcaaactgcagactacccaattaatctggctgcaatcaaaatgcaaacaaaagtgatagagagagtgtccaaggaaaccctaaacctgcttttgccagagattatgccaggtctaatacagggttatgataattcagagagcagtgttcggaaagcttgtgtcttctgcctggtggctgttcatgcggtaattggtgatgaactaaaaccacatctcagtcaacttactggcagtaaaatgaagctactgaatctttacatcaaacgtgcacaaacaggttctggaggagctgatcccactactgatgtttctggacaaagttagtgaagctcatcacagcgaaccaggtctctcaaaagaaaggacagatagaccaccctcatcaatgaaaggaagttctcaaacacatcctttggaacttactattgtttcccagttttagttttttgtttcgtttcgttttgtattttctgtaacagaggactatcctcagtctgcatgtaacttttatgatagttattccaaattcaagaagaagcagtattaacatcaattgatcgacacaaagtaatttttaatttaattcatcatttcacatgtttgtactttgtcttcccattaacctttgccagtgttatgattgtataaatttttttaaatgctggttaaacaggaatgcttaaagctttaaaagtttaacagtctaaaacatttttgcttttattcaactgcagaataatatttttattgctactttgagttttgtttcgtatcatgtcctatgctagaaatatttaaatgatgtgaaacaaagcaggactaatttgaactacagctggactccgtttgtgtgatggtgatacatgtcattagttgcaacttctttggggtgatctatagtttgaaaactaaaacctcaaagacagatgttacagaatcagccagttctgtaaaactgatattgtctattggttattgatcttgccatctttatttaaaaccatgtcccttctatgatcccttaagaaagctgcaccaaatcatctgcctgttttttcttgatacttactgaaatagaaggttttattgcagggtttattttggtttgtttatatctttgttgtgaatgatgcttttttgtatttattaatatcaaattcacttatgaataaacttgataatggaaacggacaaaaaaaatcaagtgcgtgtgtgtccttgaccgtcttctgtttctcacgtaataaacaaattatcgagacatgggagtgaccagcaccttttctttaaatggtggaacctggtttccttttaccatgaaattgtcttacttgaaaatattgatcctgatgagagagaagatggtgccaaggctgtctttgtataatgggctcaaattctctacctcttcagggctaatacttttaactgagctgctgcctatagtgtcttttggaaaactacttaaagggtgattttctgttactttttagcaaatttttttaatcacctcttgctacacccattcttttcatgtgcagccgactcaaaaattaccagttttggtgaaaggctaaattagataatttggaaccaggatactaatgatttctcatctttacttttttttaatcctaatataaagtgaatttgattgaaaaggcaaatagctattagggaagcagtttgccattgttgcagagttatctgtactttgtttaactgaaaaaaatgtagaaatatatgtaaagaatttaagacaagagtactgaatggatgatttgtcataggctttcccctttctttctgttctagcagcaggaaaagtttctctatatcctctccctctacctgtaacaattttgttttctactgttaattacattgtgtatttatagttctatgcttactgttgtgcatatactggcaataaaactgtacataacattacttgaaaaagtta

SEQ ID NO: 402956 - DNA, 4781 bp, Homo sapiens
gcaggccgagcccagtggcgcaggcactgagctgtacttatttgctgtgctatttgacctcttggtttcagagagctccctggaccatctaatggctatgggagatgataaaagcttcgatgatgaagaatcagtggatggaaataggccatcatcagctgcatcagccttcaaggttcctgcacctaaaacatccggaaatcctgccaacagtgcaaggaagcctggttcagcaggtggccctaaggttggaggtgcttctaaggaaggaggtgctggagcagttgatgaagatgattttataaaagcttttacagatgtcccttctattcagatttattctagtcgagaactcgaagaaacattaaataaaatcagggaaattttgtcagatgataaacatgactgggatcagcgtgccaatgcactgaagaaaattcgatcactgcttgttgctggagctgcacagtatgattgcttttttcaacatttacgattgttggatggagcacttaaactttcagctaaggatcttagatcccaggtggttagagaagcttgtattactgtagcccacctttcaacagttttgggaaacaagtttgatcatggcgctgaagccattgtacctacactttttaatctcgtccccaatagtgcaaaagtcatggcaacttctggatgtgcagcaatcagatttatcattcggcatactcatgtacccagacttatacctttaataacaagcaattgcacatcaaaatcagttcccgtgaggagacgttcatttgaatttttagatttattgttgcaagagtggcagactcattcattggaaagacatgcagccgtcttggttgaaactattaaaaagggaattcatgatgctgacgctgaggccagagtggaggcaagaaagacatacatgggtcttagaaaccactttcctggtgaagctgaaacattatataattcccttgagccatcttatcagaagagtcttcaaacttacttaaagagttctggcagtgtagcatctcttccacaatcagacaggtcctcatccagctcacaggaaagtctcaatcgccctttttcttccaaatggtctacagcaaatccatcaactgtggctggaagagtatcagcaggcagcagcaaagccagttcccttccaggaagcctgcagcgttcacgaagtgacattgatgtgaatgctgctgcaggtgccaaggcacatcatgctgctggacagtctgtgcgaagggggcgcttaggtgcaggtgccctgaatgcaggttcctatgcgtcactagaggatacttctgacaagctggatggaacagcatctgaagatggccgggtgagagcaaaactttcagcaccacttgctggcatgggaaatgccaaggcagattctagaggaagaagtcgaacaaaaatggtgtctcaatcacagcctggtagccggtctgggtctccaggaagagttctgaccacaacagccctgtccactgtgagctctggtgttcaaagagtcctggtcaattcagcctcagcacaaaaaagaagcaagataccacggagccagggctgtagcagagaggctagtccatctaggctttcagtggcccgaagcagtcgtattcctcgaccaagtgtgagtcaaggatgcagccgggaagctagtcgggagagcagcagagacacaagtcctgttcgctcttttcagcccctcggtccaggttatgggatcagccaatcaagtcgactgtcgtcttctgttagtgccatgcgagtcctgaacacaggttctgatgtggaggaggcggtggcagatgccttgaaaaaaccagctcgaagaagatatgaatcatatggaatgcattcagatgatgacgccaacagcgatgcatctagtgcttgttcagaacgctcctatagttctcgaaatggtagtattcctacatatatgaggcagacggaagatgtggcagaagtcctcaatagatgtgctagttccaattggtcagaaaggaaagaaggcctcctaggtctgcagaacttattaaaaaatcagagaacactaagtcgagttgaactgaaaagattatgtgaaattttcacaagaatgtttgctgaccctcatggcaagagagtattcagcatgtttttggagactctagtggatttcatacaagtccacaaagatgatcttcaagattggttgtttgtactgctgacacaactactaaaaaaaatgggtgctgatttgcttggatctgttcaggcaaaagttcagaaagcccttgatgttacaagagagtcttttccaaatgatcttcagttcaatattctaatgagatttacagttgatcagacccagacaccaagcttaaaggtgaaggttgctatccttaaatacatagaaactctggccaaacagatggatccaggagattttataaattccagtgaaactcgcctagcagtgtctcgggtcatcacttggacaacagaacccaaaagttctgatgttcggaaggcagcacagtcagtgctgatttcattatttgaactcaataccccagagtttacaatgttattaggagctttaccaaaaacttttcaggatggtgctaccaagcttcttcataatcaccttcgaaacactggcaatggaacccagagttccatggggagtcctttgacaagaccaacaccacgatcaccagctaactggtccagtcctcttacttctcctaccaatacatcacagaatactttatctccaagtgcatttgattatgacacagaaaatatgaactctgaagatatttatagctctcttagaggtgtcactgaagcaatccagaatttcagcttccgtagccaagaagatatgaatgagccattgaaaagggattctaaaaaagatgatggcgattcaatgtgtggtggtcctgggatgtctgacccaagagcaggaggtgatgctactgactcaagtcaaacagctcttgataataaagcttcattgctccattcaatgcctactcactcctctccacgctctcgagactataatccatataactattcagatagcatcagtcccttcaacaagtctgccctcaaggaagccatgtttgatgatgatgctgaccagtttcctgacgatctttccctagatcattctgacctagttgcagagttgttgaaggagctgtctaaccataatgagcgtgtagaagaaagaaaaattgccctctatgaacttatgaaactgacacaggaagaatcttttagtgtttgggatgaacacttcaaaacaatattgcttttattgcttgaaacgcttggagataaagagcctacaatcagggctttggcattaaaggttttaagagaaatcctaaggcatcaaccagcaagatttaaaaactatgcagaattgactgtcatgaaaacattggaagcacataaagatcctcataaggaggtggtgagatctgctgaggaagcggcatcagtgttggccacttcaattagtccagagcagtgcatcaaagtgctttgtcctatcattcaaactgcagactacccaattaatctggctgcaatcaaaatgcaaacaaaagtgatagagagagtgtccaaggaaaccctaaacctgcttttgccagagattatgccaggtctaatacagggttatgataattcagagagcagtgttcggaaagcttgtgtcttctgcctggtggctgttcatgcggtaattggtgatgaactaaaaccacatctcagtcaacttactggcagtaaaatgaagctactgaatctttacatcaaacgtgcacaaacaggttctggaggagctgatcccactactgatgtttctggacaaagttagtgaagctcatcacagcgaaccaggtctctcaaaagaaaggacagatagaccaccctcatcaatgaaaggaagttctcaaacacatcctttggaacttactattgtttcccagttttagttttttgtttcgtttcgttttgtattttctgtaacagaggactatcctcagtctgcatgtaacttttatgatagttattccaaattcaagaagaagcagtattaacatcaattgatcgacacaaagtaatttttaatttaattcatcatttcacatgtttgtactttgtcttcccattaacctttgccagtgttatgattgtataaatttttttaaatgctggttaaacaggaatgcttaaagctttaaaagtttaacagtctaaaacatttttgcttttattcaactgcagaataatatttttattgctactttgagttttgtttcgtatcatgtcctatgctagaaatatttaaatgatgtgaaacaaagcaggactaatttgaactacagctggactccgtttgtgtgatggtgatacatgtcattagttgcaacttctttggggtgatctatagtttgaaaactaaaacctcaaagacagatgttacagaatcagccagttctgtaaaactgatattgtctattggttattgatcttgccatctttatttaaaaccatgtcccttctatgatcccttaagaaagctgcaccaaatcatctgcctgttttttcttgatacttactgaaatagaaggttttattgcagggtttattttggtttgtttatatctttgttgtgaatgatgcttttttgtatttattaatatcaaattcacttatgaataaacttgataatggaaacggac

SEQ ID NO: 402957 - DNA, 2361 bp, Homo sapiens
gcaggccgagcccagtggcgcaggcactgagctgtacttatttgctgtgctatttgacctcttggtttcagagagctccctggaccatctaatggctatgggagatgataaaagcttcgatgatgaagaatcagtggatggaaataggccatcatcagctgcatcagccttcaaggttcctgcacctaaaacatccggaaatcctgccaacagtgcaaggaagcctggttcagcaggtggccctaaggttggaggtgcttctaaggaaggaggtgctggagcagttgatgaagatgattttataaaagcttttacagatgtcccttctattcagatttattctagtcgagaactcgaagaaacattaaataaaatcagggaaattttgtcctatcattcaaactgcagactacccaattaatctggctgcaatcaaaatgcaaacaaaagtgatagagagagtgtccaaggaaaccctaaacctgcttttgccagagattatgccaggtctaatacagggttatgataattcagagagcagtgttcggaaagcttgtgtcttctgcctggtggctgttcatgcggtaattggtgatgaactaaaaccacatctcagtcaacttactggcagtaaaatgaagctactgaatctttacatcaaacgtgcacaaacaggttctggaggagctgatcccactactgatgtttctggacaaagttagtgaagctcatcacagcgaaccaggtctctcaaaagaaaggacagatagaccaccctcatcaatgaaaggaagttctcaaacacatcctttggaacttactattgtttcccagttttagttttttgtttcgtttcgttttgtattttctgtaacagaggactatcctcagtctgcatgtaacttttatgatagttattccaaattcaagaagaagcagtattaacatcaattgatcgacacaaagtaatttttaatttaattcatcatttcacatgtttgtactttgtcttcccattaacctttgccagtgttatgattgtataaatttttttaaatgctggttaaacaggaatgcttaaagctttaaaagtttaacagtctaaaacatttttgcttttattcaactgcagaataatatttttattgctactttgagttttgtttcgtatcatgtcctatgctagaaatatttaaatgatgtgaaacaaagcaggactaatttgaactacagctggactccgtttgtgtgatggtgatacatgtcattagttgcaacttctttggggtgatctatagtttgaaaactaaaacctcaaagacagatgttacagaatcagccagttctgtaaaactgatattgtctattggttattgatcttgccatctttatttaaaaccatgtcccttctatgatcccttaagaaagctgcaccaaatcatctgcctgttttttcttgatacttactgaaatagaaggttttattgcagggtttattttggtttgtttatatctttgttgtgaatgatgcttttttgtatttattaatatcaaattcacttatgaataaacttgataatggaaacggacaaaaaaaatcaagtgcgtgtgtgtccttgaccgtcttctgtttctcacgtaataaacaaattatcgagacatgggagtgaccagcaccttttctttaaatggtggaacctggtttccttttaccatgaaattgtcttacttgaaaatattgatcctgatgagagagaagatggtgccaaggctgtctttgtataatgggctcaaattctctacctcttcagggctaatacttttaactgagctgctgcctatagtgtcttttggaaaactacttaaagggtgattttctgttactttttagcaaatttttttaatcacctcttgctacacccattcttttcatgtgcagccgactcaaaaattaccagttttggtgaaaggctaaattagataatttggaaccaggatactaatgatttctcatctttacttttttttaatcctaatataaagtgaatttgattgaaaaggcaaatagctattagggaagcagtttgccattgttgcagagttatctgtactttgtttaactgaaaaaaatgtagaaatatatgtaaagaatttaagacaagagtactgaatggatgatttgtcataggctttcccctttctttctgttctagcagcaggaaaagtttctctatatcctctccctctacctgtaacaattttgttttctactgttaattacattgtgtatttatagttctatgcttactgttgtgcatatactggcaataaaactgtacataacattacttgaaaaagtta

SEQ ID NO: 402958 - DNA, 527 bp, Homo sapiens
ccaccaccactccattccccagctgcccaccccaattccctaacagataattctccctaatgtttattgcctttctgcttatttattagccaggctatgtcaaaatgtatgctaaatcaatgttgtagcacagctcagctgtgaggattgatttcttttatttaaggtgaaacaagtttagtttggagcccagagcaaaattctaacgtgctgaaaacatgctgcctggcaagattcctgggaaggattcctaagaatcctcccaaaagctggagcccctctgggaaagcagccttcaaggcacatggttcccaaggtaccaccagcaaatccaaggaggacaagagagagggaaggttcagggctgagtccctcccatgtgcccagtaagagcaaaacagaaaccaccacctcagcaatgttggggagggtatgtgtgtcctccctcccactccctagctcagattactaaatacagaaactgaggcacagaagtgttgagaaactcacccaagccacatagctaa

SEQ ID NO: 402959 - DNA, 444 bp, Homo sapiens
cactttgttagcctcaccgctataattagtttcaatctcctagattgcatagcacaacttatgccagtaacaccaaaaatacacacacacacacacacacacacatgcacacacaacataaacacatgtaaatgtaactaaaacctaccagaaatcatatatcttgttcagaagtgttttaataagtcaaatgcatgaaaaatagctaattatataaaatttatctttttaaaattgcattgaaatggctgatagaagaggatacaaagggaccctccccacattgatcctccccacctcccagcctttacccagagatagttgtagaattagtcctatagggcaggaatggaaaggccaggctcatccatgtgaggagagagcaggtaagttgtgggttttttgaggggaatctactgtttcatttaaaaaatgtcaacataa

SEQ ID NO: 402960 - DNA, 282 bp, Homo sapiens
tgagttccaactggtcaaatcaggaacaatttgagcaccaaaataaataagtgtccaaggctgaatgtgaaagcacctttgtcacatatggaccagttcccctccacaaaggaagttttgttctgcagctccgttcagcaacccatcaagtgcttggttctctaccttttgacaacagaggatattgttatgattttgagtttttgcctattagtgaagaatgatacctctgtgtaattttaatttccatttatcatactataaaataatttgaacattttt

SEQ ID NO: 402961 - DNA, 817 bp, Homo sapiens
cctgggcaacaaaagtccgtctcaaaaaaaaaaaatagtgcctattagaatcagattagaggctgtaggggctagagccaataattcaggacagtactggcaccaagctccttgttggcttgaagacatcaacacagtccttgatcccaagagagctatggaggctgcaacagcagcaggacaaggctgccttccctgaggtttggttaaaaacacatcgctcaagtgtgtcctcaagagccagttatggccctgtgttaataggcctcactgggaatactatgtggcagtggatgcagcgagagctaccttttcagtataaggtattttcagcatacctgagggacttccagagagtccttggcaggggctcagcgattgacagttcacgctaagatactggttgacagtctccccttatccctagctgaaaaagaggagccccttagggcctcccagagacagacaagctgagcccaactcagcacagtatgaagtagccaatcagctgcttgcccaaggaaactgtttttaccagttttagcgaaatagcactggacagttgccaatcactaacactgtgtgtgattgcacccaagtatttccctccatcagtgaggcagtacagtggggcctctgtatgtgtttgactaaattgcatttctgttttgctggagaaaagaccaaactgaaagaggcaggcttctctttgtgctcctgatacgacgttgccacagttaatccgttctgatctctgctttgattaacagaattagagaaataaactgtccaggatgatctgtatacgtcaggaaaa

SEQ ID NO: 402962 - DNA, 258 bp, Homo sapiens
caagccgcccaacaagtcaaggagccaagaaaactgcccaggaagtagtgccaggatgaacatctccagggtccataggaggcatccagaaataccacctacccaaactgagacaaaaacttcattttcatcatcatcgtcatcatcaaaatcatggatcattaccaccaccacatcacttacaagcgggttgtaagaaagtcatactctttcttatttgcccacgtttcttgaaattattactttattaaactacat

SEQ ID NO: 402963 - DNA, 583 bp, Homo sapiens
ctgcactattttggggaccttatggagtgccagtggtgttcccgagggagtaccgtgggcagctcctggctggattgattcccacctctgttgcaggacagtgcccggcccataccaagttcatcctgtgtgttgagtgcagtggcgtgatcgaccgagtgagtgaggaactcaggcctagggatttgctggctcccatttgggctctgccatttctggttgctatgagcctcccatcactgtgcttgactttcatctcccaagtcacccagcaatacctgtggcatctgtccaaatactggtggtggtctcaccgaacccacaccaggtcatacctctgaaatctttgcctaacatccatctcccaacctccattggctcctcagcacctgtgtgtataaatccaggtggttggcacctgttcctggcatctctgcaggatccaggccctgccttcctctccagtcttatttcttgcaggcaccaccccccgctgcatctccaccctctggatgggtgcaccatactaagctcttgcagtgacgggcagatgttttattgttttacactctgtgcttctgtt

SEQ ID NO: 402964 - DNA, 702 bp, Homo sapiens
tctttatgcttttttattcctgtggaatttatgtgttgatgaatgtgtgtacttatgtaaaatgagggaaaagtgaagaaattggggtgaatggctaaataggggtcataaaaatgagcacaaattctgttgaagatggctcttgaagtgcagctccgaggcatcctgtctgccccacacacatgacagccaccgatttcaagggctgatcatcggaaggctctctggaggagtctgaagcagtgcgattgggatcagctctgtcactctactgatcccagggtacatttctgagattctaaagctgtttctcaatgtaggtccataggacatctgtatcttgaatcacatttttcagcctatgaatctgcaattttccattgctatccaagtgactttacattaaggttggagacgattgtctatctcatttgagcctttcatgcattttgaattgcaccgactgggatcctgtgaaggccatgaccacactctgtactcactgctttataaaagtcatctcagtgactggtttctgtatctttttcttttaccctctccatcttgtgcagagtcatgaagggcctggggcccagagatgctgaaagctggcccgaggtccacaaccagcaagcggaggagataataacattgggacttttggcttctgagaatgcgttcctctgccttacagaaaggaaa

SEQ ID NO: 402965 - DNA, 500 bp, Homo sapiens
caggcatggtggctcttgcctgtaatcccagcactttgggaagccaaggtgggtggatccctgaggtcaggagtttgagacctgcctggccaacatggtgaaaccccgtctctactaaaaaaaaaatacaaaaaattagccaggcatgggggcgggtgcctgtaatcccagccgcttgggaggctgaggcaggagaatcgcttgaacctgggaggtggaggttgcagtgagtcaagatcccgccattgcactccagcctgggcaacaagagtgaaacgccatctcaaaataaataaataaattttctccatagttcctatttagtgtcattttctttttgaaataacaaatctagtcctgcacccagatttagtatcattttagagtttataaaattgatttgctttatgattccaattttgaaatatcaagtttaaagctttaaaattatattttttcttttgggccacattacatggctcttgcctgtaatcccagca

SEQ ID NO: 402966 - DNA, 478 bp, Homo sapiens
tttttagtttgtcattgtattgtttatttgtaaaaggtctttttatattctagatatgagtcttttgtcagataaactattgagaaactttttctcccaaactagcctgttttctcattttcataatggtatcttttggtgagcagagatttttaattttgctaaagtctaatttatcaattttaaagtttatggtcaatgatttttttgtttcttgtctaagaaatctttgctttcttcaaacttacagtctcttatgtttcttttagaagctttataattctggattttatgtattggtctatgatccagacataagtactctatgtatggactgagatacaagttagagttcatttttcccccatatgtttacccagtaattccagattcatccagttgtcccagcaccaacttttaaaaaatttcaatagtttttgaggtacagatggtttttggttacagggatgagctcttt

SEQ ID NO: 402967 - DNA, 384 bp, Homo sapiens
atattacttaagtcgatgcagtctgacaagacctagcttgacacaattataaagcctgcgttgctcaatcagccagatccaaacaactctctattctttcttcaaatgtgtgtggcttgctggatgcaagatcagaatgcagacaacaacctagcttctatgcacccgctggctcacagggaactctgaaataagctggcatctgaaacacaccctacaggaacaggatagggcttgaggctaaaaccccagtttgcagtggcagaagaaaacaagaagaaaggaaaaaagggctgtcaacaaatgcaggcagaatgagcaaaggacacacttatgtataaattctgccgaatggttcaaaacaactcagtaaccaggtagcat

SEQ ID NO: 402968 - DNA, 722 bp, Homo sapiens
tatgcatgcacactcacacatgcatacacacatatgcacacacatgcatgcaaactcacatgcatgtccacacatacagacacatgtgtgcacacatgcacactcactcacacacacgctagtccaagtcctcctggggccagtcccagcacagtctgaatgcagtgaaaaccttcacagagaaggtggctggccccagccacagtcgtgctgggacacagagacgcgcagggcatgacctcaccctccaaaggctcactgtcccatcaggagtcacatcacagatcaagctgaacctgtcttccctccagagccccacactccagtctgcaggcccctgggtgggccttgcactctcgctcaggcctttgcacctgctgtgccctttttaagaaatgcccttccccgctgctggctccctcttagctcttgtgggctcgtcaacacctcctgttgtgcccctcggttgggctccctcagcccctccttccctcctcctccaggatgtggaggtgtcagagcccccatgcactggctcctggagaacagggctgattgctttcatctgtgtgtgcccgggcctgctacacataacaaggcctggaaaggcctccgaagagaggggccgttgatgcaagtttggaagaatcatgagccatgaagaaggtgaatggtgagggatggggcagtccagacagaggggacagctcaggcaaaggcac

SEQ ID NO: 402969 - DNA, 272 bp, Homo sapiens
aggatttgctttatatgctgctttggggctcctcatcgcccatgctgtaaaagctattttctacctgtcaatgcctgattgcttttctgctgtgccagcaacaaagtgtttgttttgaggaattattatgtgcagacacagccccaacaagcccctcacccacccaacctcatttctgcaagatcattgctgaaacacagacctatttatgtcttaggcgcccagtactgggcttgacttgtacgttcttaataaatacttaatgatggact

SEQ ID NO: 402970 - DNA, 1206 bp, Homo sapiens
agagcaaaatgtagcaaattagcttatcacattctcacatgagtctatttgtggcttctttggactggcctcaacctgctattctagagatacttagctaattccagatcttaagtctctggtcttaaggttcttgggaaatgtatataaattccatctcttcacctctttaaagtggtaatgtatccactgcactaggtgtgtggtttgccagactaggacaaatccctgaggaccctggagctaccatcttgggagcaagttaggaccatcttatggtttttgtgggaatttgcaggctgtagatgtagggatttcgaacccaaggttatgagggtaggtgaagtatggaaactctagaatcaggttgaaaagatttgtattttgcaggggtagccgattcctggtatttgaccatgctcccttctcctccattcggggggaaaagtgtgaaatgaagctacatggacctcacaaaaacctgttccgactctttctgcggcagaacactcagggcgcccaggccgagttcctcttccgcacggagactcagtgagatggggctgggcagaggagctgggggtgggggaagatgggcagccgagaaaagaagtgagaccaaggcagaaaatgtgtccagaagacagccacagcctcatttagcccattctggactggggaccaccatagagaaattcaaactcctaaaactaatggataacttgcaggagattggggtgggagagggtacaaagtcaccaccgaggcttagcatctattttatactctttactcaagaaggacaaggtctgtgtagtatcagaaaggagaaggactggtatggagtgagcaaggaattggaatactggtatctgtgagcacatgcctccatgcctgaggcagaaacccttctatgccccagctggtgggcacagatgtgaataagacaagtgctgggtgacttttactttctgtgctcccatcttccaaaccagtcctctattgaccagaaatccatagtgttgagaatgctgatttgctcatgttttcaataataataaaataaaatacattcacacagacatacatttttgagagtattaatagtacctataaaatctggaacacagtgcctgcaataatgaacatgtaaaagcctgtagctgttattgctattataaaagatatatgaacagtcatttaaaa

SEQ ID NO: 402971 - DNA, 563 bp, Homo sapiens
gggttgcgctctgaatcactcaggtcgccaggccgagtctctgtccgcacggagactcaaagtgaaaagcttcggtggatctcagccttggccatgccaagagaggagttggaccttctggagtgttacaggatatgggggacaatataacatccatcacagagttcctcctactgggatttcccgttggcccaaggattcagatgctcctctttgggctcttctccctgttctacgtcttcaccctgctggggaacgggaccatactggggctcatctcactggactccagactgcacgcccccatgtacttcttcctctcacacctgggcggtcgtcgacatcgcctacgcctgcaacacggtgccccggatgctggtgaacctcctgcatccagccaagcccatctcctttgcgggccgatgatgcagacctttctgttttccacttttgctgtcacagaatgtctcctcctggtggtgatgtcctatgatctgtacgtgggccatctgccaccccctccgatatttgggccatcatgacctggagagtctgcatcaccc

SEQ ID NO: 402972 - DNA, 2348 bp, Homo sapiens
  misc_feature (1860)..(1860): n is a, c, g, or t
  misc_feature (1894)..(1894): n is a, c, g, or t
  misc_feature (1897)..(1897): n is a, c, g, or t
cctggcccccggccacagctagatcaacagagtctttcacttccaccagcaggagtaagagcgaagtgtcccctggcatggctttcagcaacatgacaaacttcctatgcccctcttcccctaccactccctggactccggagctccagggacccacctctaaggatgaagcaggggtctcagaacaccctgaggcccctgcgagagaacctttgagaaggacaacccctcagcaaggagccagtggcccagggaggtcacctgtgggccaagcaaggcagccagaaaaacccagccatctgcacctggagaaggcgtccagctggccccacaggcgggactcagggaggccaccaggggacagcagtggacaggctgtggctcctagtgagggggccaacaagcacaagggctggagccggcagggcctgcgcagaccttccatcttgcctgagggctcttcagattcaagaggtccagccgtggagaaacatccgggaccctcagacactgttgtttttcgggagaaaaaaccaaaggaggtgatgggaggcttttcaagacgctgctccaaactcatcaactcctcccagctgctttaccaggagtatagtgatgttgtcctgaataaggagatccagagccagcagcggctggagagcctgtccgagacacccgggcctagctctccgcggcagcctcggaaggccctggtctcctccgagtcgtacctgcagcggctctccatggcctccagcggctccctctggcaggaaatccccgtggtgcgcaacagcaccgtgctgctctccatgacccatgaagaccaaaagctgcaagaggtcaaatttgagctgattgtgtcagaggcctcctacctgcgcagtctaaacatagctgtggatcatttccaactttcaacttcactccgggccacactttccaaccaggagcaccaatggctcttctctcgtttacaggatgtgcgagacgtcagcgccacgttcctttcagacctggaagagaactttgagaacaatatcttctccttccaagtatgtgacgtagtcctgaaccacgccccagacttccgccgggtctacctgccttatgtcaccaaccagacctatcaggaacgcaccttccagagcctgatgaatagcaacagcaatttccgggaggtcttggagaagctggagagcgaccccgtctgccagcgcctttccctcaagtcctttctgattctgcccttccaacgcatcacccgcctcaaactgctgctccagaacattctgaagagaacacagcctggctcctcggaggaggcagaggccacgaaggcacaccacgccctggagcagctgatccgggactgcaataacaatgtccagagtatgcgacggacagaggagctaatctacctgagccagaagattgagtttgagtgcaaaatattcccgctcatttctcagtcacgctggctggtgaaaagtggggagctgacagccttggagttcagtgcttccccagggctacgaaggaagctgaacacgcgtccagtccacctgcacctcttcaatgactgtctgctgctgtctcggccccgagagggtagccgattcctggtatttgaccatgctcccttctcctccattcggggggaaaagtgtgaaatgaagctacatggacctcacaaaaacctgttccgactctttctgcggcagaacactcagggcgcccaggccgagttcctcttccgcacggagactcaaagtgaaaagcttcggtggatctcagccttggccatgccaagagaggagttggaccttctggagtgttacaactccccccaggtacagngccttcgagctacaagcccgagagaatgatgaantgncactggagaaagccgacgtggtgatggtgactcagcagagcagtgacggctggctggagggcgtgaggctctcagacggggagcgaggctggtttcctgtgcagcaggtggagttcatttccaacccagaggtccgtgcacagaacctgaaggaagctcatcgagtcaagactgccaaactacagctggtggaacagcaagcctaagtcttctctgagaggagtttcgtgagctgaagaacaagctgctcatggcaagggctggccccagaaccctgcaagagaggccttctgtggatggagaactaggccttctcaaagctcaaggacaaaatccagctaacccagtccctcggcccaggctcctttcgtgcttgtgcttggtgcggggggattcgacggactttgccctggactctggaacctttcatcatcacacgggggacctgggg

SEQ ID NO: 402973 - DNA, 2275 bp, Homo sapiens
cctggcccccggccacagctagatcaacagagtctttcacttccaccagcaggagtaagagcgaagtgtcccctggcatggctttcagcaacatgacaaacttcctatgcccctcttcccctaccactccctggactccggagctccagggacccacctctaaggatgaagcaggggtctcagaacaccctgaggcccctgcgagagaacctttgagaaggacaacccctcagcaaggagccagtggcccagggaggtcacctgtgggccaagcaaggcagccagaaaaacccagccatctgcacctggagaaggcgtccagctggccccacaggcgggactcagggaggccaccaggggacagcagtggacaggctgtggctcctagtgagggggccaacaagcacaagggctggagccggcagggcctgcgcagaccttccatcttgcctgagggctcttcagattcaagaggtccagccgtggagaaacatccgggaccctcagacactgttgtttttcgggagaaaaaaccaaaggaggtgatgggaggcttttcaagacgctgctccaaactcatcaactcctcccagctgctttaccaggagtatagtgatgttgtcctgaataaggagatccagagccagcagcggctggagagcctgtccgagacacccgggcctagctctccgcggcagcctcggaaggccctggtctcctccgagtcgtacctgcagcggctctccatggcctccagcggctccctctggcaggaaatccccgtggtgcgcaacagcaccgtgctgctctccatgacccatgaagaccaaaagctgcaagaggtcaaatttgagctgattgtgtcagaggcctcctacctgcgcagtctaaacatagctgtggatcatttccaactttcaacttcactccgggccacactttccaaccaggagcaccaatggctcttctctcgtttacaggatgtgcgagacgtcagcgccacgttcctttcagacctggaagagaactttgagaacaatatcttctccttccaagtatgtgacgtagtcctgaaccacgccccagacttccgccgggtctacctgccttatgtcaccaaccagacctatcaggaacgcaccttccagagcctgatgaatagcaacagcaatttccgggaggtcttggagaagctggagagcgaccccgtctgccagcgcctttccctcaagtcctttctgattctgcccttccaacgcatcacccgcctcaaactgctgctccagaacattctgaagagaacacagcctggctcctcggaggaggcagaggccacgaaggcacaccacgccctggagcagctgatccgggactgcaataacaatgtccagagtatgcgacggacagaggagctaatctacctgagccagaagattgagtttgagtgcaaaatattcccgctcatttctcagtcacgctggctggtgaaaagtggggagctgacagccttggagttcagtgcttccccagggctacgaaggaagctgaacacgcgtccagtccacctgcacctcttcaatgactgtctgctgctgtctcggccccgagagggtagccgattcctggtatttgaccatgctcccttctcctccattcggggggaaaagtgtgaaatgaagctacatggacctcacaaaaacctgttccgactctttctgcggcagaacactcagggcgcccaggccgagttcctcttccgcacggagactcaaagtgaaaagcttcggtggatctcagccttggccatgccaagagaggagttggaccttctggagtgttacaggatatgggggacaatataacatccatcacagagttcctcctactgggatttcccgttggcccaaggattcagatgctcctctttgggctcttctccctgttctacgtcttcaccctgctggggaacgggaccatactggggctcatctcactggactccagactgcacgcccccatgtacttcttcctctcacacctgggcggtcgtcgacatcgcctacgcctgcaacacggtgccccggatgctggtgaacctcctgcatccagccaagcccatctcctttgcgggccgatgatgcagacctttctgttttccacttttgctgtcacagaatgtctcctcctggtggtgatgtcctatgatctgtacgtgggccatctgccaccccctccgatatttgggccatcatgacctggagagtctgcatcaccc

SEQ ID NO: 402974 - DNA, 386 bp, Homo sapiens
gttcctttcagacctggaagagaactttgagaacaatatcttctccttccaagtatgtgacgtagtcctgaaccacgccccagacttccgccgggtctacctgccttatgtcaccaaccagacctatcaggaacgcaccttccagagcctgatgtgagactcatcccccatttaatccccatgtaggccctgaggtgaccatgcaccagtccccagcccagagggctatcccaagagcacactttccccattccgccctctgtattggttaccccagcatcacatctgagcgccctgtacatcagctcccaccgctctttcccagcccacagatactccactgacctcccttccccgcaccttcactgcatcccccattgctcccc

SEQ ID NO: 402975 - DNA, 2425 bp, Homo sapiens
cctggcccccggccacagctagatcaacagagtctttcacttccaccagcaggagtaagagcgaagtgtcccctggcatggctttcagcaacatgacaaacttcctatgcccctcttcccctaccactccctggactccggagctccagggacccacctctaaggatgaagcaggggtctcagaacaccctgaggcccctgcgagagaacctttgagaaggacaacccctcagcaaggagccagtggcccagggaggtcacctgtgggccaagcaaggcagccagaaaaacccagccatctgcacctggagaaggcgtccagctggccccacaggcgggactcagggaggccaccaggggacagcagtggacaggctgtggctcctagtgagggggccaacaagcacaagggctggagccggcagggcctgcgcagaccttccatcttgcctgagggctcttcagattcaagaggtccagccgtggagaaacatccgggaccctcagacactgttgtttttcgggagaaaaaaccaaaggaggtgatgggaggcttttcaagacgctgctccaaactcatcaactcctcccagctgctttaccaggagtatagtgatgttgtcctgaataaggagatccagagccagcagcggctggagagcctgtccgagacacccgggcctagctctccgcggcagcctcggaaggccctggtctcctccgagtcgtacctgcagcggctctccatggcctccagcggctccctctggcaggaaatccccgtggtgcgcaacagcaccgtgctgctctccatgacccatgaagaccaaaagctgcaagaggtcaaatttgagctgattgtgtcagaggcctcctacctgcgcagtctaaacatagctgtggatcatttccaactttcaacttcactccgggccacactttccaaccaggagcaccaatggctcttctctcgtttacaggatgtgcgagacgtcagcgccacgttcctttcagacctggaagagaactttgagaacaatatcttctccttccaagtatgtgacgtagtcctgaaccacgccccagacttccgccgggtctacctgccttatgtcaccaaccagacctatcaggaacgcaccttccagagcctgatgaatagcaacagcaatttccgggaggtcttggagaagctggagagcgaccccgtctgccagcgcctttccctcaagtcctttctgattctgcccttccaacgcatcacccgcctcaaactgctgctccagaacattctgaagagaacacagcctggctcctcggaggaggcagaggccacgaaggcacaccacgccctggagcagctgatccgggactgcaataacaatgtccagagtatgcgacggacagaggagctaatctacctgagccagaagattgagtttgagtgcaaaatattcccgctcatttctcagtcacgctggctggtgaaaagtggggagctgacagccttggagttcagtgcttccccagggctacgaaggaagctgaacacgcgtccagtccacctgcacctcttcaatgactgtctgctgctgtctcggccccgagagggtagccgattcctggtatttgaccatgctcccttctcctccattcggggggaaaagtgtgaaatgaagctacatggacctcacaaaaacctgttccgactctttctgcggcagaacactcagggcgcccaggccgagttcctcttccgcacggagactcagtgagatggggctgggcagaggagctgggggtgggggaagatgggcagccgagaaaagaagtgagaccaaggcagaaaatgtgtccagaagacagccacagcctcatttagcccattctggactggggaccaccatagagaaattcaaactcctaaaactaatggataacttgcaggagattggggtgggagagggtacaaagtcaccaccgaggcttagcatctattttatactctttactcaagaaggacaaggtctgtgtagtatcagaaaggagaaggactggtatggagtgagcaaggaattggaatactggtatctgtgagcacatgcctccatgcctgaggcagaaacccttctatgccccagctggtgggcacagatgtgaataagacaagtgctgggtgacttttactttctgtgctcccatcttccaaaccagtcctctattgaccagaaatccatagtgttgagaatgctgatttgctcatgttttcaataataataaaataaaatacattcacacagacatacatttttgagagtattaatagtacctataaaatctggaacacagtgcctgcaataatgaacatgtaaaagcctgtagctgttattgctattataaaagatatatgaacagtcatttaaaa

SEQ ID NO: 402976 - DNA, 1691 bp, Homo sapiens
cctggcccccggccacagctagatcaacagagtctttcacttccaccagcaggagtaagagcgaagtgtcccctggcatggctttcagcaacatgacaaacttcctatgcccctcttcccctaccactccctggactccggagctccagggacccacctctaaggatgaagcaggggtctcagaacaccctgaggcccctgcgagagaacctttgagaaggacaacccctcagcaaggagccagtggcccagggaggtcacctgtgggccaagcaaggcagccagaaaaacccagccatctgcacctggagaaggcgtccagctggccccacaggcgggactcagggaggccaccaggggacagcagtggacaggctgtggctcctagtgagggggccaacaagcacaagggctggagccggcagggcctgcgcagaccttccatcttgcctgagggctcttcagattcaagaggtccagccgtggagaaacatccgggaccctcagacactgttgtttttcgggagaaaaaaccaaaggaggtgatgggaggcttttcaagacgctgctccaaactcatcaactcctcccagctgctttaccaggagtatagtgatgttgtcctgaataaggagatccagagccagcagcggctggagagcctgtccgagacacccgggcctagctctccgcggcagcctcggaaggccctggtctcctccgagtcgtacctgcagcggctctccatggcctccagcggctccctctggcaggaaatccccgtggtgcgcaacagcaccgtgctgctctccatgacccatgaagaccaaaagctgcaagaggtcaaatttgagctgattgtgtcagaggcctcctacctgcgcagtctaaacatagctgtggatcatttccaactttcaacttcactccgggccacactttccaaccaggagcaccaatggctcttctctcgtttacaggatgtgcgagacgtcagcgccacgttcctttcagacctggaagagaactttgagaacaatatcttctccttccaagtatgtgacgtagtcctgaaccacgccccagacttccgccgggtctacctgccttatgtcaccaaccagacctatcaggaacgcaccttccagagcctgatgaatagcaacagcaatttccgggaggtcttggagaagctggagagcgaccccgtctgccagcgcctttccctcaagtcctttctgattctgcccttccaacgcatcacccgcctcaaactgctgctccagaacattctgaagagaacacagcctggctcctcggaggaggcagaggccacgaaggcacaccacgccctggagcagctgatccgggactgcaataacaatgtccagagtatgcgacggacagaggagctaatctacctgagccagaagattgagtttgagtgcaaaatattcccgctcatttctcagtcacgctggctggtgaaaagtggggagctgacagccttggagttcagtgcttccccagggctacgaaggaagctgaacacgcgtccagtccacctgcacctcttcaatgactgtctgctgctgtctcggccccgagagtcagtgactggagtggcaggccagggcacaagaggggaaggggatgaggaaagaggggggtctgaaagggagagagaaggg

SEQ ID NO: 402977 - DNA, 179 bp, Homo sapiens
gtgaattgctgctcctccttccaagttggaaattgaagagatgttgtgtagttgtaaatgctgaatgcagtgactgaatgttcactacatttttggtttacagcaatagtagatgtattaactatacttgcacaataatcactattttatttttgttcaagtataggccttggaacttt

SEQ ID NO: 402978 - DNA, 331 bp, Homo sapiens
tagatcatgagtgttgactccattaggacttctaatttcactaagtgatgcaatcatttttaaaatttacttttattttaccatctttattagtcttttaatccaatgctttatgcttagttcctaaattacttgcaggaaagatagatcaagattagaaacaaaaatagcaatcggaaattctgtacagaagagagaatacaataagaaaatttaccttgggaggccatggtgggtggtcacctgaggtcaggagttcaagaccagcctggccaaagtggtgaaactccgtctctactaaaaatacaaaaattagccaggtgtggtggca

SEQ ID NO: 402979 - DNA, 294 bp, Homo sapiens
aggcctgggacagtttcttcatccttatgtctcagtttactcttatcaaaatgagaatagtatatgcttctcagggtattctgagggttcgctacatgaatacacttgaagtaggtaggacactcagtgtctgggatgcaggaaaggccagacaaacattagctgttgtggctgttgttgttttatatcagttgtcaaaaagaatagctggtcaggagagggaggcagcagtgagctatgatcatgccactgcactctagcctgggtgacaaagcaagatcctttctttaaaaa

SEQ ID NO: 402980 - DNA, 532 bp, Homo sapiens
accctccccactcccccacgtatcttttagagtgatggaaaatcacctggcgccgaagaaccatcattggacaggaatatagaaggcaagctacatggcagacaggccgtgagtccttcctggtacagcaatcggccacatcgctaatcacagccgtcctttctgctgagctaggacttggcctcaacatcattctgaagccagtgctccaggaatccagtgctcatcagtcagcatcaggacccgagagcaaacctgttttccgttgctgaagaggtaggagcacaaactggcacttttataaccagagttcaagctcagcaggctggggaagggtctccctgcctggggagctgtgctgcccctgccgtttgcacacagtatcctgggagggaggtttgggcaccaagccatgacacgttagcttggcctcctggccaccccgagtgctctgtggctgaggctactgttggttgccaaaatattggcccagaggccttttggcggttagggccatagaactgcatagaac

SEQ ID NO: 402981 - DNA, 418 bp, Homo sapiens
ctcgacttgcagagtagcactttccagtgctttagtgactacttcctgtatgaaagcattcatacaggcattcaaaagtatgtctcagtgaaataatagattgctacatcactgacctttagtatcatttcaaagtttaaattccatgagtaccaagggtatgtgatgaagtaatagctctagcaaacgattttgttctccaaatgaaaaacgaatgacttctaacagagtcccattctgtgagctgaggactcctagtgggcgttgtaataataactcttctgaaaataatttttcagatgcatgtatatgctgttgtgattaacaaaatacagtttcatttaaagtattgcaaaagttacaaggacttttagttatgcattttttcaatgaaaagatttccaaaatatcactaact

SEQ ID NO: 402982 - DNA, 277 bp, Homo sapiens
taagaccttcagtgtatactaaacttgaagtggggcagcaggaattctgcctttatctctagaatatcaagtctatcctctgaaactttcacttgtagatttctcacttttgactttaaactgcctgagggcaggagcagtgtttgtgtttgctggctgcctgtcacccgttgagcacaatgctgggctcagcaggcacttaagaaatatttgcagtcaggacagtggccacacctgtaatcccagctactcaggtggccagtgcaggaggatctct

SEQ ID NO: 402983 - DNA, 643 bp, Homo sapiens
aggacgaccttgtctgagatctgttgatctgtgtaatcatgcaaagacttagggaatagtatcaagagcaagagcgagctgaggtgaaaaggtcctaaagtggaaatgagcttggtgagttcaaggaacattgctagagaaggtgggccaggaggaaatgagtgaacagagatgagcagaggacaggtaatcctgttgcaccctgagatctttggtgaggatttgaattttattctcagtggaacagaaagcccttggaaggcgctctgggctgtgtcttgaatagtggcgatggatctgcatgactgcatcacattctttcttctgcccacttccttgaacttgtggtccttggtatatacttcaaaagttgctgaccagagttagggatgaaacctgtggttatggaacacaggaatgctctgtgaacccatgacccacctttcgtgggcaacattcttgaagcagctagactagcccactgtggatgacctgtgacttgcaggatttgcagacctgtcacatcctatgacttgcagatcttatttctaaacttgcttcctgaaggatgtagtacacctgtgtctctgcctttgcgtaaatcaaacaaagctgtctcatcgtaactgagatcgttttcaat

SEQ ID NO: 402984 - DNA, 581 bp, Homo sapiens
cggccgcggcgcgaccccagccggtgccgggacagccccgcagcctgggccgccgctccccctccccggagcccggaatggatccgtcccggaaataaataaataaacccgcggctgctccgggtgtgtgctgcgcgcacctgaggccgacctgtgattcaccgcgggagggatggcagtgacaacgctccggggaagtccacagtgactcctccgccaggacgccgctggttgtataggaaaagcacgcggacgggaagccacactcaccgaaaacctcagtaaactaaatttatgagtttacatctgttccatcaatgaccacggtgcacacctgtttggcttcatggccggcaactacagatctaggtaatggtgagccccgatgtggaaagacactacctggcatttatgtggcaaatgctacaagtattgccccttcaagtacgttagaccttgaaagggcagaatgaagggggctgaatgttcttgttattcattttgaagaaaggcatggtatttaaatatctccccctatccatgaatgtttgtataaagtacataaagaaaaaatataattt

SEQ ID NO: 402985 - DNA, 541 bp, Homo sapiens
cggccgcggcgcgaccccagccggtgccgggacagccccgcagcctgggccgccgctccccctccccggagcccggaatggatccgtcccggaaataaataaataaacccgcggctgctccgggtgtgtgctgcgcgcacctgaggccgacctgtgattcaccgcgggagggatggcagtgacaacgctccggggaagtccacagtgactcctccgccaggacgccgctggttgtataggaaaagcacgcggacgggaagccacactcaccgaaaacctcagtaaactaaatttatgagtttacatctgttccatcaatgaccacggtgcacacctgtttggcttcatggccggcaactacagatctaggtatccaagatcaagagggacaattacatattataagccgcacagagaagagtaatcaaggtggacatgaacttgtgctatataagttatgggttgaagaactctgtggaaagtagagaagaaaaaatttagggaacaagcagtagttgaatacagctatgtgaaactatga

SEQ ID NO: 402986 - DNA, 529 bp, Homo sapiens
gacatgctcacatcctggaaagctgagctggaccttgtggctgggatggcctcaaagttgattatgttgtagggtttcttctgtagaagcatccgctgatcagctgcatgtgtggggtcatactgtgcccgagcccagggaataccagtggctcctgtgtgtggaagcctggcgtgggtgcagggcttcttcaccatctccctgcaaagtcagctgcatcgtgcatgtcacctggacttactaataacatcaaacatatcttccctatccagtggcttgtacacaaagttaaatctgtagaagaagcagaatgtgttttaaagaatcaactggcaccttgaaatgttaagcattgtatactgactgagctatgatggtggtagtctggtgactcccaagggggaaaagtaactttgtgtggtttttcagggaatacatattcttgaatacctgcaagaaatagcatagctgctgtggcttaaatatacatgctcctatgaggctataagccttctctagtagaaataaa

SEQ ID NO: 402987 - DNA, 395 bp, Homo sapiens
catgtctctacaaaaaatacaaaaaattagcctgttgtggtggtgtcagctacttgagaggctaaggtgagaaagttgcttgagcctgggaggtcaagactgcagccaacatattttgagcacttttagtggtagctactattttaagcacttcacaggtattacttgatttaaccttcaaggcaacttggcaaaaggtcttattatttttgcttgtttgattgttttatagatttgttcatttaacagatatttactaagtacctttaagtgctaagcactattctacacactggtttatattagggaacgaaaaaaaaaccttgttctcatggagtttagagtctagcaaggaatgataaataataaacataatagtaaattttatagtgtcg

SEQ ID NO: 402988 - DNA, 2573 bp, Homo sapiens
ttgctcgagatccattgtgctctaaagaagacagcggcctcagcctgcgcaccccaggagcgtggatgactacggccaccccgggcgcgcacccctttcccaccaccccagcatctctgcagcccaggacacccgcctcccccacaccccgcatccggtgtgtctccgcctggcccggccggcgcggcaggcgggccaggggaccaactgcacggcctcacctgctcttctccaccatccagacgttcagctacagctggtgggggtgagggactctgctccgtggccgccagtgtgggcttcccgggctagctctgcggcgaggtgggggagccgagtacgagccggcagaggtggggccggctgagggcggaagcggcggcgacgcgattacgaaacccgtccggctcggagccgggcgcactgctcccctctggactgcggaggcactgcactgcgcgggacgtgggagggtgcctctgcagcccctcaaggccgccgcccctgcggggagaactggagaatgcggacacctagatgaggccctggcacccaagctggggcccccggaatctcacgttccctttactcgccaggcatttcggggcaaaacgaagcggagccccccaaacccccagacctaaccaagttcagagattcgcagaagcacgccccccaccccaaatttattgtgctctacccaaaatggaataggactaggtttatttacccattgtgagggtagagaggcgagtctggaggagcagggattgggagaaggggtggaaaaatactctgattcttaaaaatactttgtaacctaaagtccttaaattgtggaagaaaggaatactcctcctttccattgtagtctagagttaagatttcaaatccataaattagaggacctaaaattagagggcaattaactgctcattcattgggcccccagtcagcacgggggtgctggaagagatcgggaataatagcgcagaccaatgagcctagggagatgctttcatcgtctctccttccctcaagtgttctggaacctatcatttgaattagccgagtcaggcaggagggggcggggaatccttccgcccttcttaggaggggctgcattgcagggggagagtgaactgacagactcagtcactgaagagggaaaaggagtgagaagacaaagccgtcaaagccccaacagctttgtatttctccagcccggcgcagaccccggagctcccgaggcactccctccatctttggaacacgccagtaattgattgataacaggaagctatgagggaccctgtgagtagccagtacagttcctttcttttctggaggatgcccatcccagaactggatctgtcggagctggaaggcctgggtctgtcagatacagccacctacaaggtcaaagacagcagcgttggcaaaatgatcgggcaagcaactgcagcagaccaggagaaaaaccctgaaggtgatggcctccttgagtacagcaccttcaacttctggagagctcccattgccagcatccactccttcgaactggacttgctctaaggccaagacttctctctcccatcaccttgccctcattgtcttccctctcaagccccttcctttccactcctttcccattttaatcttgttctctccctactgtgttggtggtgctgatgaatctgccagagttgagttctatgtatttatttatctatctgtctactccatttctctcaaaagccctcaagtcacaaagtaaatggttcaagcaatggagtactgggtcacagggattcctcctttcccccccaaatattaactccagaaactaggcctgactggggacacctgagagtagtatagtagtgcaaaatggaagactgatttttgactctattataatcagcttcagagattccttaaaccttcctaatttcctgctccagggcagtaaacacaaatatttcttcaaggggtgatgaaaacctcggaagttttaatttgaggttatctgctacaaaacagtatttctaaaaggctaaagtgataagtctcttgcttttttttgatcctgctcttatattcttttttttcctcagagaaatcaggagggtagttagaggtataaaacaggaggaaatattatggaaaatgaaaatagggaaaataattgaatcattttagaagtagctaatttcttttctcaaaagagtgtcccttcttcacacctactcactttacaactttgctcctaactgtgggttgaaaactctagctaaagaaagttatcaaatcttaacatgcattcctactattatgatagtttttaaggtttcaattcaatcttctgaacggcataagtcctattttagccttacctcctgcatttgcaatacgtaatactgatcagtgggcacagttcttcagctacattgagaccctgaaatgaacaattatattctgactcgacatcttgtccccaatccttccaaaaatattgatggtgatttgtgctaccatttactcgtttatttaataaagacattcaatcccag

SEQ ID NO: 402989 - DNA, 2883 bp, Homo sapiens
ttgctcgagatccattgtgctctaaagaagacagcggcctcagcctgcgcaccccaggagcgtggatgactacggccaccccgggcgcgcacccctttcccaccaccccagcatctctgcagcccaggacacccgcctcccccacaccccgcatccggtgtgtctccgcctggcccggccggcgcggcaggcgggccaggggaccaactgcacggcctcacctgctcttctccaccatccagacgttcagctacagctggtgggggtgagggactctgctccgtggccgccagtgtgggcttcccgggctagctctgcggcgaggtgggggagccgagtacgagccggcagaggtggggccggctgagggcggaagcggcggcgacgcgattacgaaacccgtccggctcggagccgggcgcactgctcccctctggactgcggaggcactgcactgcgcgggacgtgggagggtgcctctgcagcccctcaaggccgccgcccctgcggggagaactggagaatgcggacacctagatgaggccctggcacccaagctggggcccccggaatctcacgttccctttactcgccaggcatttcggggcaaaacgaagcggagccccccaaacccccagacctaaccaagttcagagattcgcagaagcacgccccccaccccaaatttattgtgctctacccaaaatggaataggactaggtttatttacccattgtgagggtagagaggcgagtctggaggagcagggattgggagaaggggtggaaaaatactctgattcttaaaaatactttgtaacctaaagtccttaaattgtggaagaaaggaatactcctcctttccattgtagtctagagttaagatttcaaatccataaattagaggacctaaaattagagggcaattaactgctcattcattgggcccccagtcagcacgggggtgctggaagagatcgggaataatagcgcagaccaatgagcctagggagatgctttcatcgtctctccttccctcaagtgttctggaacctatcatttgaattagccgagtcaggcaggagggggcggggaatccttccgcccttcttaggaggggctgcattgcagggggagagtgaactgacagactcagtcactgaagagggaaaaggagtgagaagacaaagccgtcaaagccccaacagctttgtatttctccagcccggcgcagaccccggagctcccgaggcactccctccatctttggaacacgccagtaattgattgataacaggaagctatgagggaccctgtgagtagccagtacagttcctttcttttctggaggatgcccatcccagaactggatctgtcggagctggaaggcctgggtctgtcagatacagccacctacaaggtcaaagacagcagcgttggcaaaatgatcgggcaagcaactgcagcagaccaggagaaaaaccctgaaggtgatggcctccttgagtacagcaccttcaacttctggagagctcccattgccagcatccactccttcgaactggacttgctctaaggccaagacttctctctcccatcaccttgccctcattgtcttccctctcaagccccttcctttccactcctttcccattttaatcttgttctctccctactgtgttggtggtgctgatgaatctgccagagttgagttctatgtatttatttatctatctgtctactccatttctctcaaaagccctcaagtcacaaagtaaatggttcaagcaatggagtactgggtcacagggattcctcctttcccccccaaatattaactccagaaactaggcctgactggggacacctgagagtagtatagtagtgcaaaatggaagactgatttttgactctattataatcagcttcagagattccttaaaccttcctaatttcctgctccagggcagtaaacacaaatatttcttcaaggggtgatgaaaacctcggaagttttaatttgaggttatctgctacaaaacagtatttctaaaaggctaaagtgataagtctcttgcttttttttgatcctgctcttatattcttttttttcctcagagaaatcaggagggtagttagaggtataaaacaggaggaaatattatggaaaatgaaaatagggaaaataattgaatcattttagaagtagctaatttcttttctcaaaagagtgtcccttcttcacacctactcactttacaactttgctcctaactgtgggttgaaaactctagctaaagaaagttatcaaatcttaacatgcattcctactattatgatagtttttaaggtttcaattcaatcttctgaacggcataagtcctattttagccttacctcctgcatttgcaatacgtaatactgatcagtgggcacagttcttcagctacattgagaccctgaaatgaacaattatattctgactcgacatcttgtccccaatccttccaaaaatattgatggtgatttgtgctaccatttactcgtttatttaataaagacattcaatcccagaaaaaaaaaaaaaaaaaaaaaaaattttggggggcggccggcaccaggaaaaagtttttcaaaaccaccgtgtggggccgcggcccccagtaggtaatggaacattgcgcacaagctggccaaagaatccgggtcagacaagatggggtttccacaaaaaaagccgggacaccgggcgtcggaacaacctaggttccgggtcctcgtccaccggtgcaggctatccccccccggcggggagaaaacaaacaaaaagaaaacgagccacaaaacgacaaaaacacacagagacacagagcaaaggatgcaa

SEQ ID NO: 402990 - DNA, 2519 bp, Homo sapiens
ttgctcgagatccattgtgctctaaagaagacagcggcctcagcctgcgcaccccaggagcgtggatgactacggccaccccgggcgcgcacccctttcccaccaccccagcatctctgcagcccaggacacccgcctcccccacaccccgcatccggtgtgtctccgcctggcccggccggcgcggcaggcgggccaggggaccaactgcacggcctcacctgctcttctccaccatccagacgttcagctacagctggtgggggtgagggactctgctccgtggccgccagtgtgggcttcccgggctagctctgcggcgaggtgggggagccgagtacgagccggcagaggtggggccggctgagggcggaagcggcggcgacgcgattacgaaacccgtccggctcggagccgggcgcactgctcccctctggactgcggaggcactgcactgcgcgggacgtgggagggtgcctctgcagcccctcaaggccgccgcccctgcggggagaactggagaatgcggacacctagatgaggccctggcacccaagctggggcccccggaatctcacgttccctttactcgccaggcatttcggggcaaaacgaagcggagccccccaaacccccagacctaaccaagttcagagattcgcagaagcacgccccccaccccaaatttattgtgctctacccaaaatggaataggactaggtttatttacccattgtgagggtagagaggcgagtctggaggagcagggattgggagaaggggtggaaaaatactctgattcttaaaaatactttgtaacctaaagtccttaaattgtggaagaaaggaatactcctcctttccattgtagtctagagttaagatttcaaatccataaattagaggacctaaaattagagggcaattaactgctcattcattgggcccccagtcagcacgggggtgctggaagagatcgggaataatagcgcagaccaatgagcctagggagatgctttcatcgtctctccttccctcaagtgttctggaacctatcatttgaattagccgagtcaggcaggagggggcggggaatccttccgcccttcttaggaggggctgcattgcagggggagagtgaactgacagactcagtcactgaagagggaaaaggagtgagaagacaaagccgtcaaagccccaacagctttgtatttctccagcccggcgcagaccccggagctcccgaggcactccctccatctttggaacacgccagtaattgattgataacaggaagctatgagggaccctgtgagtagccagtacagttcctttcttttctggaggatgcccatcccagaactggatctgtcggagctggaaggcctgggtctgtcagatacagccacctacaaggtcaaagacagcagcgttggcaaaatgatcgggcaagcaactgcagcagaccaggagaaaaaccctgaaggtgatggcctccttgagtacagcaccttcaacttctggagagctcccattgccagcatccactccttcgaactggacttgctctaaggccaagacttctctctcccatcaccttgccctcattgtcttccctctcaagccccttcctttccactcctttcccattttaatcttgttctctccctactgtgttggtggtgctgatgaatctgccagagttgagttctatgtatttatttatctatctgtctactccatttctctcaaaagccctcaagtcacaaagtaaatggttcaagcaatggagtactgggtcacagggattcctcctttcccccccaaatattaactccagaaactaggcctgactggggacacctgagagtagtatagtagtgcaaaatggaagactgatttttgactctattataatcagcttcagagattccttaaaccttcctaatttcctgctccagggcagtaaacacaaatatttcttcaaggggtgatgaaaacctcggaagttttaatttgaggttatctgctacaaaacagtatttctaaaaggctaaagtgataagtctcttgcttttttttgatcctgctcttatattcttttttttcctcagagaaatcaggagggtagttagaggtataaaaaagtagctaatttcttttctcaaaagagtgtcccttcttcacacctactcactttacaactttgctcctaactgtgggttgaaaactctagctaaagaaagttatcaaatcttaacatgcattcctactattatgatagtttttaaggtttcaattcaatcttctgaacggcataagtcctattttagccttacctcctgcatttgcaatacgtaatactgatcagtgggcacagttcttcagctacattgagaccctgaaatgaacaattatattctgactcgacatcttgtccccaatccttccaaaaatattgatggtgatttgtgctaccatttactcgtttatttaataaagacattcaatcccag

SEQ ID NO: 402991 - DNA, 1808 bp, Homo sapiens
ttgctcgagatccattgtgctctaaagaagacagcggcctcagcctgcgcaccccaggagcgtggatgactacggccaccccgggcgcgcacccctttcccaccaccccagcatctctgcagcccaggacacccgcctcccccacaccccgcatccggtgtgtctccgcctggcccggccggcgcggcaggcgggccaggggaccaactgcacggcctcacctgctcttctccaccatccagacgttcagctacagctggtgggggtgagggactctgctccgtggccgccagtgtgggcttcccgggctagctctgcggcgaggtgggggagccgagtacgagccggcagaggtggggccggctgagggcggaagcggcggcgacgcgattacgaaacccgtccggctcggagccgggcgcactgctcccctctggactgcggaggcactgcactgcgcgggacgtgggagggtgcctctgcagcccctcaaggccgccgcccctgcggggagaactggagaatgcggacacctagatgaggccctggcacccaagctggggcccccggaatctcacgttccctttactcgccaggcatttcggggcaaaacgaagcggagccccccaaacccccagacctaaccaagttcagagattcgcagaagcacgccccccaccccaaatttattgtgctctacccaaaatggaataggactaggtttatttacccattgtgagggtagagaggcgagtctggaggagcagggattgggagaaggggtggaaaaatactctgattcttaaaaatactttgtaacctaaagtccttaaattgtggaagaaaggaatactcctcctttccattgtagtctagagttaagatttcaaatccataaattagaggacctaaaattagagggcaattaactgctcattcattgggcccccagtcagcacgggggtgctggaagagatcgggaataatagcgcagaccaatgagcctagggagatgctttcatcgtctctccttccctcaagtgttctggaacctatcatttgaattagccgagtcaggcaggagggggcggggaatccttccgcccttcttaggaggggctgcattgcagggggagagtgaactgacagactcagtcactgaagagggaaaaggagtgagaagacaaagccgtcaaagccccaacagctttgtatttctccagcccggcgcagaccccggagctcccgaggcactccctccatctttggaacacgccagtaattgattgataacaggaagctatgagggaccctgtgagtagccagtacagttcctttcttttctggaggatgcccatcccagaactggatctgtcggagctggaaggcctgggtctgtcagatacagccacctacaaggtcaaagacagcagcgttggcaaaatgatcgggcaagcaactgcagcagaccaggagaaaaaccctgaaggtgatggcctccttgagtacagcaccttcaacttctggagagctcccattgccagcatccactccttcgaactggacttgctctaaggccaagacttctctctcccatcaccttgccctcattgtcttccctctcaagccccttcctttccactcctttcccattttaatcttgttctctccctactgtgttggtggtgctgatgaatctgccagagttgagttctatgtatttatttatctatctgtctactccatttctctcaaaagccctcaagtcacaaagtaaatggttcaagcaatggagtactgggtcacag

SEQ ID NO: 402992 - DNA, 1577 bp, Homo sapiens
  misc_feature (102)..(102): n is a, c, g, or t
  misc_feature (122)..(122): n is a, c, g, or t
agcgggcgtaggagcaatccgttccggcctgtcttagcgcaggggctgcattgcacgtggtacatgtgcatggtgaccagtacgtcagagcatccactgtgnacagataggagaagaatggnagtgtgcagtacagtcacacctagactgatcaaaaggccccgaacgagctatcggtagtctgtcttcctgagaaccaggtccagtactcccaggtagtgtccgcgtcaggtctactgccatcctatctactggagacgatcggccagggaagctcgaattgatctaacatggaagcgcgaagctatgagggaccctgtgagtagccagtacagttcctttcttttctggaggatgcccatcccagaactggatctgtcggagctggaaggcctgggtctgtcagatacagccacctacaaggtcaaagacagcagcgttggcaaaatgatcgggcaagcaactgcagcagaccaggagaaaaaccctgaaggtgatggcctccttgagtacagcaccttcaacttctggagagctcccattgccagcatccactccttcgaactggacttgctctaaggccaagacttctctctcccatcaccttgccctcattgtcttccctctcaagccccttcctttccactcctttcccattttaatcttgttctctccctactgtgttggtggtgctgatgaatctgccagagttgagttctatgtatttatttatctatctgtctactccatttctctcaaaagccctcaagtcacaaagtaaatggttcaagcaatggagtactgggtcacagggattcctcctttcccccccaaatattaactccagaaactaggcctgactggggacacctgagagtagtatagtagtgcaaaatggaagactgatttttgactctattataatcagcttcagagattccttaaaccttcctaatttcctgctccagggcagtaaacacaaatatttcttcaaggggtgatgaaaacctcggaagttttaatttgaggttatctgctacaaaacagtatttctaaaaggctaaagtgataagtctcttgcttttttttgatcctgctcttatattcttttttttcctcagagaaatcaggagggtagttagaggtataaaacaggaggaaatattatggaaaatgaaaatagggaaaataattgaatcattttagaagtagctaatttcttttctcaaaagagtgtcccttcttcacacctactcactttacaactttgctcctaactgtgggttgaaaactctagctaaagaaagttatcaaatcttaacatgcattcctactattatgatagtttttaaggtttcaattcaatcttctgaacggcataagtcctattttagccttacctcctgcatttgcaatacgtaatactgatcagtgggcacagttcttcagctacattgagaccctgaaatgaacaattatattctgactcgacatcttgtccccaatccttccaaaaatattgatggtgatttgtgctaccatttactcgtttatttaataaagacattcaatcccag

SEQ ID NO: 402993 - DNA, 2519 bp, Homo sapiens
ttgctcgagatccattgtgctctaaagaagacagcggcctcagcctgcgcaccccaggagcgtggatgactacggccaccccgggcgcgcacccctttcccaccaccccagcatctctgcagcccaggacacccgcctcccccacaccccgcatccggtgtgtctccgcctggcccggccggcgcggcaggcgggccaggggaccaactgcacggcctcacctgctcttctccaccatccagacgttcagctacagctggtgggggtgagggactctgctccgtggccgccagtgtgggcttcccgggctagctctgcggcgaggtgggggagccgagtacgagccggcagaggtggggccggctgagggcggaagcggcggcgacgcgattacgaaacccgtccggctcggagccgggcgcactgctcccctctggactgcggaggcactgcactgcgcgggacgtgggagggtgcctctgcagcccctcaaggccgccgcccctgcggggagaactggagaatgcggacacctagatgaggccctggcacccaagctggggcccccggaatctcacgttccctttactcgccaggcatttcggggcaaaacgaagcggagccccccaaacccccagacctaaccaagttcagagattcgcagaagcacgccccccaccccaaatttattgtgctctacccaaaatggaataggactaggtttatttacccattgtgagggtagagaggcgagtctggaggagcagggattgggagaaggggtggaaaaatactctgattcttaaaaatactttgtaacctaaagtccttaaattgtggaagaaaggaatactcctcctttccattgtagtctagagttaagatttcaaatccataaattagaggacctaaaattagagggcaattaactgctcattcattgggcccccagtcagcacgggggtgctggaagagatcgggaataatagcgcagaccaatgagcctagggagatgctttcatcgtctctccttccctcaagtgttctggaacctatcatttgaattagccgagtcaggcaggagggggcggggaatccttccgcccttcttaggaggggctgcattgcagggggagagtgaactgacagactcagtcactgaagagggaaaaggagtgagaagacaaagccgtcaaagccccaacagctttgtatttctccagcccggcgcagaccccggagctcccgaggcactccctccatctttggaacacgccagtaattgattgataacaggaagctatgagggaccctgtgagtagccagtacagttcctttcttttctggaggatgcccatcccagaactggatctgtcggagctggaaggcctgggtctgtcagatacagccacctacaaggtcaaagacagcagcgttggcaaaatgatcgggcaagcaactgcagcagaccaggagactcccattgccagcatccactccttcgaactggacttgctctaaggccaagacttctctctcccatcaccttgccctcattgtcttccctctcaagccccttcctttccactcctttcccattttaatcttgttctctccctactgtgttggtggtgctgatgaatctgccagagttgagttctatgtatttatttatctatctgtctactccatttctctcaaaagccctcaagtcacaaagtaaatggttcaagcaatggagtactgggtcacagggattcctcctttcccccccaaatattaactccagaaactaggcctgactggggacacctgagagtagtatagtagtgcaaaatggaagactgatttttgactctattataatcagcttcagagattccttaaaccttcctaatttcctgctccagggcagtaaacacaaatatttcttcaaggggtgatgaaaacctcggaagttttaatttgaggttatctgctacaaaacagtatttctaaaaggctaaagtgataagtctcttgcttttttttgatcctgctcttatattcttttttttcctcagagaaatcaggagggtagttagaggtataaaacaggaggaaatattatggaaaatgaaaatagggaaaataattgaatcattttagaagtagctaatttcttttctcaaaagagtgtcccttcttcacacctactcactttacaactttgctcctaactgtgggttgaaaactctagctaaagaaagttatcaaatcttaacatgcattcctactattatgatagtttttaaggtttcaattcaatcttctgaacggcataagtcctattttagccttacctcctgcatttgcaatacgtaatactgatcagtgggcacagttcttcagctacattgagaccctgaaatgaacaattatattctgactcgacatcttgtccccaatccttccaaaaatattgatggtgatttgtgctaccatttactcgtttatttaataaagacattcaatcccag

SEQ ID NO: 402994 - DNA, 788 bp, Homo sapiens
ctcagaggatcctcataggtcgaggattcctcctttcccccccaaatattaactccagaaactaggcctgactggggacacctgagagtagtatagtagtgcaaaatggaagactgatttttgactctattataatcagcttcagagattccttaaaccttcctaatttcctgctccagggcagtaaacacaaatatttcttcaaggggtgatgaaaacctcggaagttttaatttgaggttatctgctacaaaacagtatttctaaaaggctaaagtgataagtctcttgcttttttttgatcctgctcttatattcttttttttcctcagagaaatcaggagggtagttagaggtataaaacaggaggaaatattatggaaaatgaaaatagggaaaataattgaatcattttagaagtagctaatttcttttctcaaaagagtgtcccttcttcacacctactcactttacaactttgctcctaactgtgggttgaaaactctagctaaagaaagttatcaaatcttaacatgcattcctactattatgatagtttttaaggtttcaattcaatcttctgaacggcataagtcctattttagccttacctcctgcatttgcaatacgtaatactgatcagtgggcacagttcttcagctacattgagaccctgaaatgaacaattatattctgactcgacatcttgtccccaatccttccaaaaatattgatggtgatttgtgctaccatttactcgtttatttaataaagacattcaatcccag

SEQ ID NO: 402995 - DNA, 1727 bp, Homo sapiens
ttgctcgagatccattgtgctctaaagaagacagcggcctcagcctgcgcaccccaggagcgtggatgactacggccaccccgggcgcgcacccctttcccaccaccccagcatctctgcagcccaggacacccgcctcccccacaccccgcatccggtgtgtctccgcctggcccggccggcgcggcaggcgggccaggggaccaactgcacggcctcacctgctcttctccaccatccagacgttcagctacagctggtgggggtgagggactctgctccgtggccgccagtgtgggcttcccgggctagctctgcggcgaggtgggggagccgagtacgagccggcagaggtggggccggctgagggcggaagcggcggcgacgcgattacgaaacccgtccggctcggagccgggcgcactgctcccctctggactgcggaggcactgcactgcgcgggacgtgggagggtgcctctgcagcccctcaaggccgccgcccctgcggggagaactggagaatgcggacacctagatgaggccctggcacccaagctggggcccccggaatctcacgttccctttactcgccaggcatttcggggcaaaacgaagcggagccccccaaacccccagacctaaccaagttcagagattcgcagaagcacgccccccaccccaaatttattgtgctctacccaaaatggaataggactaggtttatttacccattgtgagggtagagaggcgagtctggaggagcagggattgggagaaggggtggaaaaatactctgattcttaaaaatactttgtaacctaaagtccttaaattgtggaagaaaggaatactcctcctttccattgtagtctagagttaagatttcaaatccataaattagaggacctaaaattagagggcaattaactgctcattcattgggcccccagtcagcacgggggtgctggaagagatcgggaataatagcgcagaccaatgagcctagggagatgctttcatcgtctctccttccctcaagtgttctggaacctatcatttgaattagccgagtcaggcaggagggggcggggaatccttccgcccttcttaggaggggctgcattgcagggggagagtgaactgacagactcagtcactgaagagggaaaaggagtgagaagacaaagccgtcaaagccccaacagctttgtatttctccagcccggcgcagaccccggagctcccgaggcactccctccatctttggaacacgccagtaattgattgataacaggaagctatgagggaccctgtgagtagccagtacagttcctttcttttctggaggatgcccatcccagaactggatctgtcggagctggaaggcctgggtctgtcagatacagccacctacaaggtcaaagacagcagcgttggcaaaatgatcgggcaagcaactgcagcagaccaggagaaaaaccctgaaggtgatggcctccttgagtacagcaccttcaacttctggagagctcccattgccagcatccactccttcgaactggacttgctctaaggccaagacttctctctcccatcaccttgccctcattgtcttccctctcaagccccttcctttccactcctttcccattttaatcttgttctctccccaccagggcttcagcaggagccctggactcatcatcaataaacactgttacagca

SEQ ID NO: 402996 - DNA, 2539 bp, Homo sapiens
ttgctcgagatccattgtgctctaaagaagacagcggcctcagcctgcgcaccccaggagcgtggatgactacggccaccccgggcgcgcacccctttcccaccaccccagcatctctgcagcccaggacacccgcctcccccacaccccgcatccggtgtgtctccgcctggcccggccggcgcggcaggcgggccaggggaccaactgcacggcctcacctgctcttctccaccatccagacgttcagctacagctggtgggggtgagggactctgctccgtggccgccagtgtgggcttcccgggctagctctgcggcgaggtgggggagccgagtacgagccggcagaggtggggccggctgagggcggaagcggcggcgacgcgattacgaaacccgtccggctcggagccgggcgcactgctcccctctggactgcggaggcactgcactgcgcgggacgtgggagggtgcctctgcagcccctcaaggccgccgcccctgcggggagaactggagaatgcggacacctagatgaggccctggcacccaagctggggcccccggaatctcacgttccctttactcgccaggcatttcggggcaaaacgaagcggagccccccaaacccccagacctaaccaagttcagagattcgcagaagcacgccccccaccccaaatttattgtgctctacccaaaatggaataggactaggtttatttacccattgtgagggtagagaggcgagtctggaggagcagggattgggagaaggggtggaaaaatactctgattcttaaaaatactttgtaacctaaagtccttaaattgtggaagaaaggaatactcctcctttccattgtagtctagagttaagatttcaaatccataaattagaggacctaaaattagagggcaattaactgctcattcattgggcccccagtcagcacgggggtgctggaagagatcgggaataatagcgcagaccaatgagcctagggagatgctttcatcgtctctccttccctcaagtgttctggaacctatcatttgaattagccgagtcaggcaggagggggcggggaatccttccgcccttcttaggaggggctgcattgcagggggagagtgaactgacagactcagtcactgaagagggaaaaggagtgagaagacaaagccgtcaaagccccaacagctttgtatttctccagcccggcgcagaccccggagctcccgaggcactccctccatctttggaacacgccagtaattgattgataacaggaagctatgagggaccctgtgagtagccagtacagttcctttcttttctggaggatgcccatcccagaactggatctgtcggagctggaaggcctgggtctgtcagatacagccacctacaaggtcaaagacagcagcgttggcaaaatgatcgggcaagcaactgcagcagaccaggagaaaaaccctgaaggtgatggcctccttgagtacagcaccttcaacttctggagagctcccattgccagcatccactccttcgaactggacttgctctaaggccaagacttctctctcccatcaccttgccctcattgtcttccctctcaagccccttcctttccactcctttcccattttaatcttgttctctccctactgtgttggtggtgctgatgaatctgccagagttgagttctatgtatttatttatctatctgtctactccatttctctcaaaagccctcaagtcacaaagtaaatggttcaagcaatggagtactgggtcacagggattcctcctttcccccccaaatattaactccagaaactaggcctgactggggacacctgagagtagtatagtagtgcaaaatggaagactgatttttgactctattataatcagcttcagagattccttaaaccttcctaatttcctgctccagggcagtaaacacaaatatttcttcaaggggtgatgaaaacctcggaagttttaatttgaggttatctgctacaaaacagtatttctaaaaggctaaagtgataagtctcttgcttttttttgatcctgctcttatattcttttttttcctcagagaaatcaggagggtagttagaggtataaaacaggaggaaatattatggaaaatgaaaatagggaaaataattgaatcattttagaagtagctaatttcttttctcaaaagagtgtcccttcttcacacctactcactttacaactttgctcctaactgtgggttgaaaactctagctaaagaaagttatcaaatcttaacatgcattcctactattatgatagtttttaaggtttcaattcaatcttctgaacggcataagtcctattttagccttacctcctgcatttgcaatacgtaatactgatcagtgggcacagttcttcagctacattgagaccctgaaatgaacaattatattctgactcgacatcttgtccccaatccttaattgcccacaaggaggtatttcgaatgtgtga

SEQ ID NO: 402997 - DNA, 2519 bp, Homo sapiens
ttgctcgagatccattgtgctctaaagaagacagcggcctcagcctgcgcaccccaggagcgtggatgactacggccaccccgggcgcgcacccctttcccaccaccccagcatctctgcagcccaggacacccgcctcccccacaccccgcatccggtgtgtctccgcctggcccggccggcgcggcaggcgggccaggggaccaactgcacggcctcacctgctcttctccaccatccagacgttcagctacagctggtgggggtgagggactctgctccgtggccgccagtgtgggcttcccgggctagctctgcggcgaggtgggggagccgagtacgagccggcagaggtggggccggctgagggcggaagcggcggcgacgcgattacgaaacccgtccggctcggagccgggcgcactgctcccctctggactgcggaggcactgcactgcgcgggacgtgggagggtgcctctgcagcccctcaaggccgccgcccctgcggggagaactggagaatgcggacacctagatgaggccctggcacccaagctggggcccccggaatctcacgttccctttactcgccaggcatttcggggcaaaacgaagcggagccccccaaacccccagacctaaccaagttcagagattcgcagaagcacgccccccaccccaaatttattgtgctctacccaaaatggaataggactaggtttatttacccattgtgagggtagagaggcgagtctggaggagcagggattgggagaaggggtggaaaaatactctgattcttaaaaatactttgtaacctaaagtccttaaattgtggaagaaaggaatactcctcctttccattgtagtctagagttaagatttcaaatccataaattagaggacctaaaattagagggcaattaactgctcattcattgggcccccagtcagcacgggggtgctggaagagatcgggaataatagcgcagaccaatgagcctagggagatgctttcatcgtctctccttccctcaagtgttctggaacctatcatttgaattagccgagtcaggcaggagggggcggggaatccttccgcccttcttaggaggggctgcattgcagggggagagtgaactgacagactcagtcactgaagagggaaaaggagtgagaagacaaagccgtcaaagccccaacagctttgtatttctccagcccggcgcagaccccggagctcccgaggcactccctccatctttggaacacgccagtaattgattgataacaggaagctatgagggaccctgtgagtagccagtacagttcctttcttttctggaggatgcccatcccagaactggatctgtcggagctggaaggcctgggtctgtcagatacagccacctacaaggtcaaagacagcagcgttggcaaaatgatcgggcaagcaactgcagcagaccaggagaaaaaccctgaaggtgatggcctccttgagtacagcaccttcaacttctggagagctcccattgccagcatccactccttcgaactggacttgctctaaggccaagacttctctctcccatcaccttgccctcattgtcttccctctcaagccccttcctttccactcctttcccattttaatcttgttctctccctactgtgttggtggtgctgatgaatctgccagagttgagttctatgtatttatttatctatctgtctactccatttctctcaggattcctcctttcccccccaaatattaactccagaaactaggcctgactggggacacctgagagtagtatagtagtgcaaaatggaagactgatttttgactctattataatcagcttcagagattccttaaaccttcctaatttcctgctccagggcagtaaacacaaatatttcttcaaggggtgatgaaaacctcggaagttttaatttgaggttatctgctacaaaacagtatttctaaaaggctaaagtgataagtctcttgcttttttttgatcctgctcttatattcttttttttcctcagagaaatcaggagggtagttagaggtataaaacaggaggaaatattatggaaaatgaaaatagggaaaataattgaatcattttagaagtagctaatttcttttctcaaaagagtgtcccttcttcacacctactcactttacaactttgctcctaactgtgggttgaaaactctagctaaagaaagttatcaaatcttaacatgcattcctactattatgatagtttttaaggtttcaattcaatcttctgaacggcataagtcctattttagccttacctcctgcatttgcaatacgtaatactgatcagtgggcacagttcttcagctacattgagaccctgaaatgaacaattatattctgactcgacatcttgtccccaatccttccaaaaatattgatggtgatttgtgctaccatttactcgtttatttaataaagacattcaatcccag

SEQ ID NO: 402998 - DNA, 1437 bp, Homo sapiens
agcgggctatcttggaacaggcccgaggatagatactgagaggagcgacagagagcacgtcaccgttgtgcattgctactgccggtactgtagccggcgcgtctgcacctctccggctctgatcattggtacctgccggcgcctcggatctgaccgacaggaagctatgagggaccctgtgagtagccagtacagttcctttcttttctggaggatgcccatcccagaactggatctgtcggagctggaaggcctgggtctgtcagatacagccacctacaaggtcaaagacagcagcgttggcaaaatgatcgggcaagcaactgcagcagaccaggagaaaaaccctgaaggtgatggcctccttgagtacagcaccttcaacttctggagagctcccattgccagcatccactccttcgaactggacttgctctaaggccaagacttctctctcccatcaccttgccctcattgtcttccctctcaagccccttcctttccactcctttcccattttaatcttgttctctccctactgtgttggtggtgctgatgaatctgccagagttgagttctatgtatttatttatctatctgtctactccatttctctcaaaagccctcaagtcacaaagtaaatggttcaagcaatggagtactgggtcacagggattcctcctttcccccccaaatattaactccagaaactaggcctgactggggacacctgagagtagtatagtagtgcaaaatggaagactgatttttgactctattataatcagcttcagagattccttaaaccttcctaatttcctgctccagggcagtaaacacaaatatttcttcaaggggtgatgaaaacctcggaagttttaatttgaggttatctgctacaaaacagtatttctaaaaggctaaagtgataagtctcttgcttttttttgatcctgctcttatattcttttttttcctcagagaaatcaggagggtagttagaggtataaaacaggaggaaatattatggaaaatgaaaatagggaaaataattgaatcattttagaagtagctaatttcttttctcaaaagagtgtcccttcttcacacctactcactttacaactttgctcctaactgtgggttgaaaactctagctaaagaaagttatcaaatcttaacatgcattcctactattatgatagtttttaaggtttcaattcaatcttctgaacggcataagtcctattttagccttacctcctgcatttgcaatacgtaatactgatcagtgggcacagttcttcagctacattgagaccctgaaatgaacaattatattctgactcgacatcttgtccccaatccttccaaaaatattgatggtgatttgtgctaccatttactcgtttatttaataaagacattcaatcccag

SEQ ID NO: 402999 - DNA, 2260 bp, Homo sapiens
ttgctcgagatccattgtgctctaaagaagacagcggcctcagcctgcgcaccccaggagcgtggatgactacggccaccccgggcgcgcacccctttcccaccaccccagcatctctgcagcccaggacacccgcctcccccacaccccgcatccggtgtgtctccgcctggcccggccggcgcggcaggcgggccaggggaccaactgcacggcctcacctgctcttctccaccatccagacgttcagctacagctggtgggggtgagggactctgctccgtggccgccagtgtgggcttcccgggctagctctgcggcgaggtgggggagccgagtacgagccggcagaggtggggccggctgagggcggaagcggcggcgacgcgattacgaaacccgtccggctcggagccgggcgcactgctcccctctggactgcggaggcactgcactgcgcgggacgtgggagggtgcctctgcagcccctcaaggccgccgcccctgcggggagaactggagaatgcggacacctagatgaggccctggcacccaagctggggcccccggaatctcacgttccctttactcgccaggcatttcggggcaaaacgaagcggagccccccaaacccccagacctaaccaagttcagagattcgcagaagcacgccccccaccccaaatttattgtgctctacccaaaatggaataggactaggtttatttacccattgtgagggtagagaggcgagtctggaggagcagggattgggagaaggggtggaaaaatactctgattcttaaaaatactttgtaacctaaagtccttaaattgtggaagaaaggaatactcctcctttccattgtagtctagagttaagatttcaaatccataaattagaggacctaaaattagagggcaattaactgctcattcattgggcccccagtcagcacgggggtgctggaagagatcgggaataatagcgcagaccaatgagcctagggagatgctttcatcgtctctccttccctcaagtgttctggaacctatcatttgaattagccgagtcaggcaggagggggcggggaatccttccgcccttcttaggaggggctgcattgcagggggagagtgaactgacagactcagtcactgaagagggaaaaggagtgagaagacaaagccgtcaaagccccaacagctttgtatttctccagcccggcgcagaccccggagctcccgaggcactccctccatctttggaacacgccagtaattgattgataacagattgtcttccctctcaagccccttcctttccactcctttcccattttaatcttgttctctccctactgtgttggtggtgctgatgaatctgccagagttgagttctatgtatttatttatctatctgtctactccatttctctcaaaagccctcaagtcacaaagtaaatggttcaagcaatggagtactgggtcacagggattcctcctttcccccccaaatattaactccagaaactaggcctgactggggacacctgagagtagtatagtagtgcaaaatggaagactgatttttgactctattataatcagcttcagagattccttaaaccttcctaatttcctgctccagggcagtaaacacaaatatttcttcaaggggtgatgaaaacctcggaagttttaatttgaggttatctgctacaaaacagtatttctaaaaggctaaagtgataagtctcttgcttttttttgatcctgctcttatattcttttttttcctcagagaaatcaggagggtagttagaggtataaaacaggaggaaatattatggaaaatgaaaatagggaaaataattgaatcattttagaagtagctaatttcttttctcaaaagagtgtcccttcttcacacctactcactttacaactttgctcctaactgtgggttgaaaactctagctaaagaaagttatcaaatcttaacatgcattcctactattatgatagtttttaaggtttcaattcaatcttctgaacggcataagtcctattttagccttacctcctgcatttgcaatacgtaatactgatcagtgggcacagttcttcagctacattgagaccctgaaatgaacaattatattctgactcgacatcttgtccccaatccttccaaaaatattgatggtgatttgtgctaccatttactcgtttatttaataaagacattcaatcccag

SEQ ID NO: 403000 - DNA, 653 bp, Homo sapiens
taataggcaaaaatctcattatggtgagcttaatgacaaatcagtttgttttaaacacattttattaaaatacatttagtttaaaaagtaaatttccaaactaccagctgaatacaactgtccagattcttgcaaggaaaaccaaatgctagagaaggccaggcgcaatggctcactcctgtaatcctagtattttgggaggccgaggcgggtggatcagtttagctcaggagttcgagatcagcttaggcaacatggtgagaccctgtctctacagaaaatacaaaaattagccggaggggaggcatgtgcctgtagtcccagctactcgggaggctacagcaggaggatcgcatgagcctgggaggcagaggttgtagttagccaagatgacaccattgcattccagcctgggtgacaggagtgaaatcctgtctcaaaaaaaaaaaaagaaatatatatatacacatatatatatatatacacacacacacacacacacacacacacgtatatatacacactttaatatatataaatatatttatatgtatataaaacacatacatatatatatgtaaaaccttttcccaagaccttgactctctgtgtatgtgtgtgtttgtgtgtatgtgtgtgggtgggtgtgagtg

SEQ ID NO: 403001 - DNA, 1124 bp, Homo sapiens
gcaaggggcctctacccacacctggacctccgtgccctcaccccagccctaggtgtgcacctaggcctcattccttaccccccagcccctgcccaccttcagcaggatgaggccctgggttgccgtgctctcgctgttcccctctcggggctgggctggggccgctcttggccccaaggttgccccgggccagcagcccagccagcagcacagtctctatggtgctgaggaagagcagcagcagcaggatggtgaagtagtaaactgggggaggcagggcacagggagatgctcaggggccagtccctgtgtctctggtgcccagcgagctgagcaccagtgggtgaccggggagaaacagggcagactgggtaagggagcagggcttactgagcagtgggttgcaggaggaggagctgggcagggcctgcaccagggaggagtggaggacgaggtaactcagcagcaatgtcaccttgtagcctatgcgctcaatggcccggaggggcagcaaccccccgcacacgtcagccaacagcagtgcctctgcaggcaccaagagagcgatgatggacttgagcgccgtgttcttcagcctcagctggaaggggaaaagtcagggccttcccggcgggggggaaggaggtgggcatcgggggcatggggcctggcctctggccgtgcatcctcactcccacccgcctccagcagccctctgtcggcctcctcccgacttgactcaccgtcacctggaagcagggcaccagctgctggggtgggacttgggtcttcagatcataaactacgtattccctcttgacactcacaatctcgttcaccacgtgggcctggaactctaactccatcgctgaggggtgggaatgagaactatgaaccaggaaggagagatcccagctgccaagtctgggggtagcagactggagcccaggggtgatggagacttttgatggcttttggcagggacagacttggacacaaaaccgatccatagaagggcttcccaaaccttgttttgcaacatcccaaattgtctccagttgaaggaaggcctttatcagattcatagatgagctttcattgtaaaaataaatgtactttgcacc

SEQ ID NO: 403002 - DNA, 1409 bp, Homo sapiens
gcaaggggcctctacccacacctggacctccgtgccctcaccccagccctaggtgtgcacctaggcctcattccttaccccccagcccctgcccaccttcagcaggatgaggccctgggttgccgtgctctcgctgttcccctctcggggctgggctggggccgctcttggccccaaggttgccccgggccagcagcccagccagcagcacagtctctatggtgctgaggaagagcagcagcagcaggatggtgaagtagtaaactgggggaggcagggcacagggagatgctcaggggccagtccctgtgtctctggtgcccagcgagctgagcaccagtgggtgaccggggagaaacagggcagactgggtaagggagcagggcttactgagcagtgggttgcaggaggaggagctgggcagggcctgcaccagggaggagtggaggacgaggtaactcagcagcaatgtcaccttgtagcctatgcgctcaatggcccggaggggcagcaaccccccgcacacgtcagccaacagcagtgcctctgcaggcaccaagagagcgatgatggacttgagcgccgtgttcttcagcctcagctggaaggggaaaagtcagggccttcccggcgggggggaaggaggtgggcatcgggggcatggggcctggcctctggccgtgcatcctcactcccacccgcctccagcagccctctgtcggcctcctcccgacttgactcaccgtcacctggaagcagggcaccagctgctggggtgggacttgggtcttcagatcataaactacgtattccctcttgacactcacaatctcgttcaccacgtgggcctggaactctaactccatcgctgaggggtgggaatgagaactatgaaccaggaaggagagatcccagctgccaagtctgggggtagcagactggagcccaggggtgatggagacttttgatggcttttggcagggacagacttggacacaaaaccgatccatagaagggcttcccaaaccttgttttgcaacatcccaaattgtctccagttgaaggaaggcctttatcagattcatagatgagctttcattgtaaaaataaatgtactttgcaccacttcatgatggagggagaagtggtcacaggctcgtcagtctatcatctcacagctgaagcaggatccccagggctaccgctgtggtctctcatggagggaagggtaggacttctctgccaagttagatgtcacctgatgggtttatacagggtggctgcaccttcaggtggtttccaggagtgaggccatggcaacctgagcctctggccttgctgcaaggggccgagccactgcagtcgccatggctgtggagggcagttgctctggggaggacagaagactg

SEQ ID NO: 403003 - DNA, 960 bp, Homo sapiens
ccggcccagcgggacccgggcgtgacccctctgcccatggcagcagcccctcgggttcctcccaggctcatcgtaggaatgccccccaccgcaggcagagacgttaaaaagaaacgcggttaagccagagcccgctctcggtagctgcatggccacggctgcttctccgagccggggcctcagagccatgcccgcggcagagagtagcgcccaggctgcacggcccgtcccagaaaactgctgagttagcatccagatccagccagggcagcttcctgcacgagaagcaagcgcattatctccacagagcctgtgtgcctctctcggtttggtgtggctgtgatttttgacgcgtggtttaaatgtgccttcttgttgttttccttctgcctgtggctcccacctttctgttctgtgacgggctgtccctgcttgtcctgctttaggaggtaggtacccagtggctccccgccccctcagcggctcattcctctcgctctccccacgttggtctgtgtgagctccgctgtgtggctgccattcatccgatccatctgtggacttgctggggctgcgccgtgcacggtgtggtgaatgctacacccacccccaggggcggggctgagagtggctgggacctggagcacatggggatgctgtgtgggaaccaacttgccccccaccctgtgtctctaggggtccgcagcagtagagaagcagacagccagccctgtccctgcggcgtcaccctccaccccatactaacccagcagcgcatggagagatttcgggagtgctctaaaggcctttggagcaatttagggcaattacgggcagttttagaaatgctgaggggttgttttgcctgcggggcggggatggttgccttatgcccacagtgaagcgggcgagatgcggtagctgggttcacgcaagcctttctgagagcaggcggccgct

SEQ ID NO: 403004 - DNA, 274 bp, Homo sapiens
tttaagagacaaggtctcaatatattgcctagcctggctggtcttgaactcctgggctcaagcaatccacctacctcagcctctcaaagtactgggattacagacatgagtcactgcatctggcctcttctcttttttttttgacatataatctgtatgcatagatgtcatcagcacagggcactggccatgtgtgcatctgtctgtatgtggaagtatacagctcgctggatgctgacaatctgaatacaccccaggacccagcactcagagc

SEQ ID NO: 403005 - DNA, 459 bp, Homo sapiens
aacatgagcttgaattgtgcagccttcccaatttctgagttctactcctacacatactaacctgtggtaattcctatattttacattaatcttattcctctttcatacctgccccaataagccaagataaggtatgttaattaatgcttctacacatcgtgttcttctgtcatttatttggctaataatggacataattaaaatcattcattgcaataaccttcttagaaaagaatgctgaacagtaaaggttaaaagcaatttgtattattcttttatattctatagttaacatttttacacctgaactttgttcaaataattattttgtttaaaaaaggttacttaatgtgctttcaagtagagttaattgtgatttgaatatatttctacctttatgcaaagtaccttagcagagaatttttgaattttataactgaagtattgaaacatcgaaag

SEQ ID NO: 403006 - DNA, 428 bp, Homo sapiens
gttccttgtaggaatggaccatgtttgtgcacctcttctccctctcttcccttacaccagtggttctcttaggcgtggtccctgcccagcagtatcagcgtcccctcagaacttgtggcaatgaagattctgggcccctgcacttgaacactgcatcaggaactgtgagagcaggctcagcaatctgtggtgtaactagcatgccaggtaattctgatgggctagtttgagaaccactgccttataggatctagtattggtttacctcacagcgaacgaaaactcagctcactgactatttaatttgtagactatactaatcactgctgatttgtttctatctcatcacagctcccatttactgaatagctacactgggctaggcactgaactaggtgctgtcacatgcattgtcccttatgatctca

SEQ ID NO: 403007 - DNA, 399 bp, Homo sapiens
tcataaagctattcccaagtaccattaactcactcttagtaacagttcttcttctagatcagcactgtccaagagaaacagaacgtgacacacatatataatttgaaatttcctaggctaggcacagtggctcatgcctgtaatttcagcactttggcaggccaaggcgggaagatcacttgagcccaaggagtttgagaccatcctgggcaacacagtgagacctcatctcttaaaaaaaatacaaataaattagctggtgtcacatgcctgtggtcccagctactcaggaggtggaaggtgggaggaccaccggagcccaggaggttgaggctgcagtaagcctgtgatctccaccactacactccagcctgggtgacagagcaagaccctgtctca

SEQ ID NO: 403008 - DNA, 800 bp, Homo sapiens
aaaaaaagtcatgctttggccagatctcagggaccccttggctggggctccatgcttagggatgggcaggctggaccctaggaagtgtccttgggttaaattctgggcgttagtaagttatatcccaggtgtatactcaggttagacacttggggtgtctagcgtagacccaggcaataaacaggctagagcctgggaaggaagtgggggccccgggtccatccctagcttagattcccagcatcaccccccgcccggccattcaaccactgcagccactggttacagggggaacgcaatgaattttgggggtgcgaggcctgtgtcatgattctgggcatggggctgtggatagacccaccacgtgatgagaaggctggccggatctgtcagcagaggcacggtgctgaccccgcccggtgccccagagccgtgcccagtgcccaaaggggtgctgtgcaccatcccggctactggaacccactgccaaggattttcttttccccatccaccactgctgagaaccaatcggccaggcccagccctgtccggtgcctgcactctgggacctctgctctgacttcatgcaaacctaacctaaccttcactggctccaaaatctccatttctggatcccagtggtctgaccccacctctcctcctagccaaggtcaggcaactgaggaatggagctatttggttttcctgcactttcccgcaaaggggaaaatggtacttcctgcaaagctctctttgcagcctgggggagcatcaataaaggtttgagaaatggatccagg

SEQ ID NO: 403009 - DNA, 1627 bp, Homo sapiens
agctgtgtgaccataggcaagttacttaacctctctgaaactcagtttcctgagaggaacccaggcctctagggctcagtcctgggggacccagcatgccgtccttgttctgccagggcactggggacgctgggtgcactggagcccgagacccctcttcctggccatggctgtcctggtcgccagtactgtgggctgtgattctgagtatcctattgtccaagggtgagtgaccctcaatggggaggggttgcgtctggcccccctggggacacaaaacccccactgcatggcgcaccaactgcgccctggcgtcttgctcgcgtctgagcgtgagcagagtgtgtgtacatctttgggccgtttgcagtcacgcgtgtgcacatggcgtgcacgtatgtgtgcgagtccccgcgcgtttgtctcccatcggcgtgtgtgcacatcgtgtgcgctatatgcctgcctgcccgcccgctctgtggtcccgagtcgggggaccccgcaccccccgggcaagggaaggatttccgagtccctggccttgcctgcaggagcctctctccgcagcctccacggagcgcgcggcgctgctcggctgccaggacctgctgaggacaaacggtgtgtgcagagccgggcgcctgggcgcccggggcgtgtgcggcgggagcgtctgagaccccagagatggagtcctgggtgcgtgggggccctgtggtccctgaggctggccacggggtgtggaagggagtcccctgagtcctcccaagtgacccggcgggcatgcgttttgggatgggggtcgttccagcctcgaagcagacggcggcgctgggtgccctggaggaggaggctcggggacgcaggcgctgctgcagaccacgagcgcggagcttggggaggcgcaggcgaagctgatggagcaggagagagccctgcgggaactgctgacccatggcttggctgaagccggcagggaccgcgaggacgtcagcaccgagctgtaccgggcgctggaggccgtgaggctgcagaacagtgagggttcctgtgagccgtgccctacgtcgtggctgcccttcgggggctcctgctactatttctctgtgccgaagaccacgtgggcagaggcgcagggccactgcgccgatgccagcgcacatctggcgatgtagggggcctgggggagcaggacttcctgagtcgtgacactagtgcccgtgaatactggatcggccgcagggccgtgcaacacctgcgcaaggttcagggctactcgtgggtggacggagtcccactcagcttcaggtaggggaagggctcctggtgaaacctgggggccacaggttagactctagaggacatgttttgaggccgaggtgggcggatcacctgaggtcaggagttcaagaccagcatgggaaacgtggcgaaaccccgtctctactaaaaatacaaaaaattagccgggcgtggtggcacacgcctgtaatcccagctaaccctggatgctgaggcacgagaatcacttgaacccaggaggcggaggttgcagtgagccgagattgcgccactgcactccagcctgggagacagagttagactccgtctcaaaaaaaaaaaa

SEQ ID NO: 403010 - DNA, 307 bp, Homo sapiens
tagtcttcccaacaatcctgcaagatatagaaccttgacatgtttctcaggctggtctgaaactcctggggctcaagcgatccacctgcctccacctctcaaagtgctgagattacagggcctatggttcatcctgcaatatcagagaatacacaactgttggaagctcatttgtgcagaagcactagttagaccaagtcccaggatggtggggacttgaactgcctcatgcacattgtacccaagagcctggcccatgaaggtgaatcagtggatacttgaataaaaagaagaatatgcgctgaag

SEQ ID NO: 403011 - DNA, 285 bp, Homo sapiens
agataagagcctggacgaagccattgggaatgcaggtggtgattgaaattattccagaggtgaaatccctgtgacttggtgattgactgggtgcagggcctatggttcatcctgcaatatcagagaatacacaactgttggaagctcatttgtgcagaagcactagttagaccaagtcccaggatggtggggacttgaactgcctcatgcacattgtacccaagagcctggcccatgaaggtgaatcagtggatacttgaataaaaagaagaatatgcgctgaag

SEQ ID NO: 403012 - DNA, 487 bp, Homo sapiens
gccctggccctggaatcagccattttcaagagcccttgtttcttttagtgtgaaatgatatttcaagactacaatctgggcactatggatgctcctgggttgatcattgttttgagaataattcagtggatagaactaggaaatagatttaaaggaaaaatacctcatatgtctcatttgctttatcccacattacactcacaacagcctcaaaataacaatattaatactagtgatcaatacgattactgaaaacagttgaaattatttttcttatgctcttctcattctcccccacattttttaaaagattgcactgtgtttttattgttagagcatcatatagtagccattaaatactaaagcctcccttttaaatccacatttaatttttaaaacaattttattaaggtataatttacatataaaaattactcattttaagtgcatttcttttgtgaaatgtctattgaagtattttgctgat

SEQ ID NO: 403013 - DNA, 455 bp, Homo sapiens
tgaaaaagggctacagaattttgcctgtaaagttatgctaatctctgtacagaaatgtctgacaattcagaagctgaaactcagcaaaatctctactttaagtgtcagataaagcctaacgtcaaaagaaagggcaagagtctcaggaaagagtatgctgacttccagggccagttcttcagaatctgctttttctcctgaaatcaggccatgcgaaaagaagatgttgcctcctggcacagatcattcatcctgcctggtcctcagtcaagtctccagcagcttgggatgtctgaagaatgaaaagcctaagagacaaggcccggggatgcccaacatacattctataagtggggaaagtggataaaatgttttctgtgtggaaaggacaaataacagttaatttctactggaaaagtaaacaaaaaccgtaattaaaattgctcaaaagtaaa

SEQ ID NO: 403014 - DNA, 335 bp, Homo sapiens
cctacttttgaggttttgagactcggactggtttccctgctcctcggcttgcagatggcctattgtggaacttcaacttgtgattgtgccatgcgaaaagaagatgttgcctcctggcacagatcattcatcctgcctggtcctcagtcaagtctccagcagcttgggatgtctgaagaatgaaaagcctaagagacaaggcccggggatgcccaacatacattctataagtggggaaagtggataaaatgttttctgtgtggaaaggacaaataacagttaatttctactggaaaagtaaacaaaaaccgtaattaaaattgctcaaaagtaaa

SEQ ID NO: 403015 - DNA, 632 bp, Homo sapiens
aaaacagtaagtttctgagcacaaagaattctggagttaactgcggtcatctgccaggcagatccttcaatcctggcaacagtcacatacgcttggtgaaaccagtgtaatttcttgctaccattatttcacaggcaagaaaagagacttacagagaagttcaattaattcctattattctgaccattgtgctaggcctttgaggagttacaagagcattattagacatgatcccttccctcgaagagtttgtaatctagtagggattttaaaaatattctgatagtggtaacacatgacaagaaagctcacagcactgagtagcatgtagttgctaaataagtggcattggccgggcacggtggctgatacctgtaatcccagcactttgggaggccaaggcaggtggatcgcctgaggtcaggagtttgagaccagcctggccaacatggtgaaaccccgtctctactaaaaaatacaaaaattagctgggcatggtagcatgtgcctgtagtcccaggactcaggaggctgaggcgggagaatcgcttgaacaggggaggcagaggttgcagtgagctgagatcacgccattgcattctagcctgggtgacagagcgagactccatctg

SEQ ID NO: 403016 - DNA, 432 bp, Homo sapiens
tcagcagctaccattttcctaaaagttttcaatcagtagtatttccatcaaaatgctaattattgttgttgttgttgtgattaaagacagggtctccctctgtcaccccggctggagtgcagtggtgcaatcatagttcacggaaacctagaattcctaggctcaagagatcctcccaccccagcactttgggaggccaaggcaggtggatcgcctgaggtcaggagtttgagaccagcctggccaacatggtgaaaccccgtctctactaaaaaatacaaaaattagctgggcatggtagcatgtgcctgtagtcccaggactcaggaggctgaggcgggagaatcgcttgaacaggggaggcagaggttgcagtgagctgagatcacgccattgcattctagcctgggtgacagagcgagactccatctg

SEQ ID NO: 403017 - DNA, 424 bp, Homo sapiens
gtacattgtggaatataaatttgtcacaattaacaagtggtagagtgactatgtcacaatttagttgggcagaagggcaggggcataccaaggctatgtaaaacgattcacattagaacttctaattgtgtggaattaagaaaatttggctaggtggagtggctcatgcccataatcccagcactttagaaggccgaggtgggtggatcccttgagcccaggaatttgagaacagcctgagcaacatggtgaaaccttgtctctacaaaaagttagccaggtgttgtggtgcatgcctgtagttccagctactcaggaggctgaggtgggaggattaactaagcccgggaggcagaggttgtagtaagccgaaattgcatcactgcactccagcctgggccacagagtaagatcctgtctcaca

SEQ ID NO: 403018 - DNA, 583 bp, Homo sapiens
ctctcaaggacttggaatgtggggctgagagctcacaggggcatgtctgagtacatggcaggttctccgtaacagaacttcagatacttcaagacagccatcagagccctcaggaggctgcccttctcccagagaaaccccagctacttctgcaggagatggggaaagattttgggtcatgcaagtttctctcccctcttattgtctgggtcatatctccggcttttgggctacacacattgtttgctctttctcgttctctccccataaccaatgggaagagttctctagggacctcaacatctttctaaggctggtgggcctggctggcaggaatgaggactcaacggaaaggggatgtgtcaaatactccctactatccttcaccaaggtggaaagtccctgctatccttcaccaagatggcaagtatctagatgttcaaagcaggatgagctaagcttttggcaacaggagctgggacccctcctccaggacttttccagagaaggcagtctttaaccctgtgacctctgctgggtctctgtcacgcagcatccatcatcaagatggtcagctacttcc

SEQ ID NO: 403019 - DNA, 430 bp, Homo sapiens
taggagtcccctgggtcccacctgctccctgtatccctccacagtgcctagcccaatacatagctcacaggtgggctcaattcaggttgaacccaatccagagaaaaccaattgaaatacatctaatttaagctttgctctgtcacaggactgtgggatgggaagaagtgatcgcctcttcggcccagattccaggtaaatacgttcttccatttcaaaaggctccctcactggtcctggagaggggaagtagagctgctcgcccacttgggctagcgatggagcttatgaattcggagttttcattccacctggatctaggaagtcttttttaagagtctactgcgccagataatctctgttccccacaagccattctcttctgtgcctctaaaggataaagatctatttgtctctgtgtgtatgttac

SEQ ID NO: 403020 - DNA, 245 bp, Homo sapiens
gtaactttaagggaattatcaaaaggcatctctatttccaggtagattccctgagcatcctaacccctttaccctctccccaggtccatggttcagatttcagtctccacttccttcttggccatacatctttgtacagagaacaatacagatggctgtctgtatccccaagttctacatccttggattcaaccaactatggatcaaaaatatttgaaaaaaataccaaaaataacacaacaaca

SEQ ID NO: 403021 - DNA, 531 bp, Homo sapiens
tttttttatattgagtaggtttttttccattggagtattggaaaaaaggagttttctaggcatgtacttcttgttatatggaatactgataaactttgttttcttgctaaaattttagtgtgcacaggtagcttttgaagatgtctaatgcaaattaggctttctggactgtctagcaccctttgctttcaccctttgtgattatacttttttgtatttaatgcatatctatagaaatagtgattgttggccgggcatagtggctcatgcctgtaatcccggcactttgggaggctgaggtgggcggatcatctgaggtcaggagttcaagaccagcctgaccaacatgaggaaaccccatctctactaaaaatataaaattagccaggtgtggtggcacatgcctgtaatcccagctactcaggaaggctgaggcaggagaatcgcttgaatccaggaggtggaaattgtggtgagccgagatcgcgccattgctctccaacctgggcaacaagagtgaaactaggtctc

SEQ ID NO: 403022 - DNA, 332 bp, Homo sapiens
tcctgacctcaaaagaggaggtacctcaaagtccctctgagaatttcaccttcaaattcagaaatccctccccaggggagcccagaagcccaaggctgtgtgcttgcccgtttccagagcctcccagcacacgggcacccataatgtgtagacagagcaggtgctccgagaattcctggggaaactgaacaaaaccaccaaatgaactgttcgtccaagcccaggtccttggggaatctcacaccccacatccagtccaccagcaattcctaccagctccacctttaaaacacatccggaattcggccaggtgaggtggctcacgcctgtaa

SEQ ID NO: 403023 - DNA, 1016 bp, Homo sapiens
agaaaaagtgattggtgtcttttagaaaaatcacttcttcagtaaagggggagaaagtccaagaaaaatgtataaattcacagaaaccccagaaatcaagtttggtacatatcttttgcaggatagaaataatataggcataaagttgtctttcatttagaagatcagattcccagaatgactactcccattataaacaaccaaaaatactagttaaaatacagaaagattttagccatctgagttggttagctatgaaatccagtcctgggaaccctgatcttattctgggcactctaagatccaggggcaaaagattaagcctaggacaaagagaactaataagctcatccctcaaccccattaaactccactaggctacatcagcctaaaggtgagcaagaacaatacccattgtacaggatgggtacaataaagctgtccacattgaccatggctctgagtctcttactcagaaagacaacattttctttcatacaaatgtgtggccagaattcaagctaggttatatggaaatcctcaagaggccgggcgtggtggctcacgcctgtaatcccagcactttgggaggctgaggcaggcggatcacaaggttaggagatcaacaccatcctggctaatatggtgaaaacccgtctctactaaaaatacaaaaaattagccaggcatggtggcacacacctgtagtctcacctactcgggaggctgaagcaggagaatcacttgaacccaggaggtggaggttgcagtgagcctcactgcactctagcctcggtgacagagcaagactccatctcaaaaaaacaatccacggaaacaaccacatatcctctggaatctcaaagaattcttaaagaattctcaaagttaaagcaacaaagaaaataaactcacagagccaggcagggtggctcatgcctgtaacaccactttgggaggccaaggcaggaggatcatgagctcaagagatcgagaccatcctggacaacatggtg

SEQ ID NO: 403024 - DNA, 165 bp, Homo sapiens
tggggagctgtggtggaattctgggtggggctgaagggaactttcacattcccacacgttggagagttgagggtatacagcgttgctggcagaggagcttgaaattctgacattttctttcagccttcatctctgggccatggcctcctttctgtctgtctgtcc

SEQ ID NO: 403025 - DNA, 405 bp, Homo sapiens
agagttggaattaacctctccttccttcttgctcccagttaactttgtgcttgtaagttatgtgaaacattcattacttgagatggtaattatttacctaattgaccactctctcaactggatgcttttgaaagagcaggatcttactctctcttacagctccctcagcatggagtagtgaagagtgttctttaataccaaagggacaaagaaagctgactgggatcggtctgccacatgctagttgcttcagttatttttttgcactaaattattgtgtctctgctaatgtcctttttcctttcttccttccctcccttcttccttccttcttctttccctctctctctctctctctctctctttctcactcagtaagctacctcaaatctgttacttaagaga

SEQ ID NO: 403026 - DNA, 408 bp, Homo sapiens
ggcagatgagtgttaacagaattccttgtagaaacatgaacttctgtttaaaggctgtggattttgggattttaagagcctaggcagtggggaataaaaaattttcatagttatattcaatgtaagttaatggaattaagatttcatctctgaaactttacatttttagctttcgtgatctgtaattatcttttcttcccactttcatatgatgtaaatagagcctaggtagcaggagtttcctacctaggtattttacacagtgaatctgactcaaatgtagttggggcttttagaaatattgttaataaactttgagctaatagttgcgaactcaacatgctgaaagtttgtaattaagaacagtattggctgggtgtggtggctcacgcctgtaatcccagcact

SEQ ID NO: 403027 - DNA, 409 bp, Homo sapiens
actaagagttggtttttagaaaatatcaaattaacatgcttttatttagtcaactgtgaaaaaatagagaagattcaaataaataaaattataaatgaaagggaagacattaaagttgatagcacagaaatacaaataattttaagagactactatgaataattgtaaatcaacaaatcagataacctagaagaaatagataaattcttagacacatacaacctaccaagactgaattatgaagaaatagcaaatacgaacagaccaataatgaggaaggagatttaatcagtaatacaaagtctcccatcacagaaaagcccagaatctgaaggcttcactgctgaatgcttcttatggcatcttaggtatagaaatcatatatagaaaaccctaaagactccaccaa

SEQ ID NO: 403028 - DNA, 307 bp, Homo sapiens
ttttttaatagagacagggtctcactggagtgcagtagtgcaatcataactcactgcagccttgaactattggactcaagtgatcctccaaccttagcctccccagtagctgggactacaaatgtgtgtcatcacacctagtcaatcccgcttcatcttgcccaggacataaatcataccctgtgctgcatattatacccacacattagtcaattagttgctgtcttgcttatcagatcatcctgacatccaaccattgatattgtcgtggctcagtgatctgagataacccaaagcacatggtcct

SEQ ID NO: 403029 - DNA, 895 bp, Homo sapiens
ctcgcttcccctcagccacttggagtctggtcttttccatcaccaaaaagggaaggaggtaagggaattgagaaaagggaaaagagaaacacagccactatgactgcccactagctagaaatctggcaggcacggggatggtataaactcccaccaacactgtatatgagtgcctgtttccccacagccttaccagtagagtaggctcttgaacatttggatttttgcccatctgattaaaaatactatttttttggtatttatgtgtagtatagtttaaacatgcatttctaaattggaccttttcatgtttttaaaaggacatttttgtttctgttaagtgtttttcaaacaaccattgaatatttgttctagaggacattgaacattcgttacaactcaaatccaacaatgatgtgatcagcattacactaagcagttgaggtaaaagaaaagcaaagaattgaggtcagggtcattcaatttgctttgactaaagttaaatacccaaatgtctcactcaaatgtgagctcagaaaggtggagattatgttttatccattttagtattctcagcacagggcctagaatcttgcaggcacttagtcattaaggaatgaatactagggatgagattagctgttcttgggaatgcctctggctgagtacccagccaacattatgatcttcacaatctgtgtggcttgctaatgagacatggtcatttcttatatttcatcggagtacagccaccctaaagcttatcaatgaaaaataatctgaaatgagcatcgttagctatataaggtcaaggtctgggtctctcatgtctgctactgttcttgcatatggtgggcacttaataaattggatacattttgctgaatgaatgaaa

SEQ ID NO: 403030 - DNA, 450 bp, Homo sapiens
gaaattcctagcacacactgactaatagcattcagtatactttgaacattcagtgaaaagaattcctgtaattgttgatattggtatatttggtattttacttacttgcatatttttaaattagaaagaaaattcttaaaatgctgcatgccaaagtgtatctggcatgtcttctgtgaagtataaccatgacactctccagaaataatgtttgacactcttcccatgcagttcaatttatgaccttcctctagtcctgcagaaccatgtggccacctcctccagatccatttatgggatcttttttcctgtagctatgtagaacctgagaaatgtaagccctggaacctgggaagtattgacaggaccaacatttctctctctctgggtcatcatcgttaggtgtctgaaatatgagattagagatgggaactagaactttttaaagaa

SEQ ID NO: 403031 - DNA, 543 bp, Homo sapiens
gagttttgtcttgaagagcacagagagaaggtgaatgccacagaagaaatgctgcagcaggctttggtatcaggatgatgctggcctcataaaatgagttagggaggattcccccttcttctattgattggaatagtttcagaaggaatggtaccagctcctccttgtacctctggtagaattcggctgtgaatccatctggtcctggagtttttttggttggggctgattcaggagatcaatgatttgaggttaaaagttagtgaaatgggcagtgagagacttcagtatgaaaaaaagcatgaatcaaccaaagatgaactgacatctttaaaagaacaactagaagaaaaggaatctgaagtaaaaaggctacaagaaaaattgatttgcaagatgaaaggagaaggggttgaaattgttgatagagcttcaatctggaaatgacagaacaatcaccctttaaaataaggaagtgcaattcagtgaagacaggtttatgattcttagtatgagagaggaaggataatcttcaacatagtt

SEQ ID NO: 403032 - DNA, 379 bp, Homo sapiens
tgaatgaaattttttaaaattatatttggaaatataatgtgcataacatctggcgacactaaggtaaatttaacctttctttgtaattatgaatgatgactggcactatgagataccagccatgttctgagcaagaacatgtgaaggataggctagcattctggaaaagatgccataatgttgatgaagtcagcagaactagacagcagaactttatgatgatcagtttactctttcttcccaacttctctagcaaggattgtctcagatgtattccctcgttatcactgaagaggaccattctggaacctccctatgctgctaacggggtcatggtgtggtttgagtctccagtgcacattggaagatgaggaggagt

SEQ ID NO: 403033 - DNA, 258 bp, Homo sapiens
atatataataaaagtgctttcttcttgtctctggcttggctttttcatttccttgatggattcttagaaaagcagacgacttttaattttgataaagaccaatttagaagccaagtgtgattgtgtgcatctgtaatcccagctacatgtgaggttggggccatgggatcttttgtgccaagagctcaagtccagcgtgggcaacagagcaagacgctgtctcaaaaacaataacaaagaaagaaaagaaaagaaaaa

SEQ ID NO: 403034 - DNA, 568 bp, Homo sapiens
gtcagacttcattgaaagttgaaaatctggagcaagacaatgggtggaaaagcatgtcacaggaacatttaaatggaaatgtactttcccaactggaaaaagttttctaccatcttcccactggttgccaagagattgctgaagtagaagtgcgaatgatagattttgctcatgtgttccctagcaacacaatagatgagggatatgtttatgggctaaagcatttaatttctgtacttcgaagtattttagacaattgaatcctctgttgcagtctttttaaggggtgggccaatcataatgaagaggggcagtcaatatctgcacctttaatgctatgtaaaaaatttgtattatgagtcgacattttatttgtctttatacttttggaagaatggttaacttttttataatcttactcaggaaaactaactatttgttcattagaaaactatgaagaataaagaaacttaggaatgttaagcagggaatgtggtggtacatggcttaaacatcttttttggctcaagcaaaatgcaaaccattattcagtcattaagagtttagt

SEQ ID NO: 403035 - DNA, 183 bp, Homo sapiens
ctttcccattctctctgcctggagagctgatctgtatggactgtctcaatggacttctctgccttctggcttctttttgggtttggtcaatgggcagctctcccaggcagtctaaggtaaagaggagagtaaaggtgaggtgtttgctttttgtgattgtctacatgtgctgggaactacact

SEQ ID NO: 403036 - DNA, 914 bp, Homo sapiens
ttatgcctttacaaaagttaatttacattctctgtttaaaaaataatatttggtgaatgctatatagttgacagagcacatttacagaccttattaatttagtctttccaagagacctctcatgtaactggcattagccccatttttagatgatgaaactgcagtgcagatgttctggttctctcaactaccaagtggcataacccatggattttctaaaggtttcccaaatagatcacaacctaagggtgtgccaggggagcctaggggaagctaggctgggcattgaacactgatagtgcagaatccacatgcaaacaagatcgacagggtggataaacatatatgtgcattatccccatcccccacagtttagagccttctgcttttctgggggtttcagcctatgagacaaactataatcaggcttcattattacttttcaaatggccaagggttatctgcaatgttgatctaaaatcctaaaaaatcaccctgaagtcaggcaaggaacaatacttaaactccatactatggaaacaaggtatctagctggatgcagctggtaaattcagtcccatggacctttgggggtttattttccttagcagctgacaccatgtgtcttttgcatccctggtggtgcttggtgcttctgcccatctgggctcattgagaatagggatgaagatatgattttagggaatttctgatgggctggcatgccccatgtagtatgagttactatataaagtcatgtgactggcattttaacagaccttccagagcttatatatcccaatatatgttgtttcctttgagtagccccagcaggatactgcttagtttttccagtgccattggtgaaagcatttctggaactgtcttcaaagactagaaacactgactcccaa

SEQ ID NO: 403037 - DNA, 420 bp, Homo sapiens
ataagatttcataattcgagatcttacatttaaatctttaattcatcttgatttaacttttgtatataatggaagagtccagtttcaatcttaggcacttctcaaaagaagacatacatgcagccaacaaatacatgaaaaaatgttcaacattgctaattagagaaatgcaaatcaaaaccacaatgaggtaccatctcacactagtcagaatgactattactttaaagtcaaaaaaataacagatgttgctgaggttgtggagaaaagagaatgcttatatactgccggtgggaatgtaaattagttgaggcattgtggaaagcagtgtgatttctctaagaatgtaaaacagagctaccatttgacccagcaatcccattactgagtatatacccaaaggaaaataaatcattctat

SEQ ID NO: 403038 - DNA, 417 bp, Homo sapiens
gttccttaatttcccacaacagagacagacttagtgtttgccacagtgaagagtgttctagttccacctccaccatggctcatcaggtgactttgggcaagtcccttcaacattctgagccccttttcttttctcatttgtaaaatgacagtaacaatacctatgccattctccttgagatgccaaatgggctgatgacctccatcatagcttcttaccctgggtccatgggtaggcttggatgggagtatcggtcctttcgaggcatatttaagactttatgtctgtgcatgttttggttggggtagaaggattcacactttttatcagtgtgccagcagagttctgaatattaagaatcaccgatgcatgcaaaaacattttgtgacctgatgctgtacagatgtaagagtaaaa

SEQ ID NO: 403039 - DNA, 663 bp, Homo sapiens
tgaaattaaagagtagcaaattaagtgctaataaaacgagatagtcacttacataattcattgccatgggaggtcacagaggcaaattttgtggctacattaaatatggggctggataattttatgaccgctaatgatatttttagcagtcaaggctgatactgtgagagaagaaatcctattacattctccagtagatggtttgcagggacctctggcaagaggtttctgagaagtgcaagagcagaccttgtgagttctaacctttggtgtactcaaaattggtttttaaggggaaagttcccaggcatcccattcatacctcagtcccatattttcttgtagagatccaaaagccctttctagtctgaagcagtggagaaagacattgcccagaattaaatcctttctggtctttgggaaccactcgacttatttatcgtatgccacccgtgcgtcaggtccttcgcttggagttttaaaaaatcttttggggacataaacatttggacacatcagtggcattctgagtgaaggggatgtactaaaggtggaatgcagagtttcatggaagcacgaagaagcaaagggatgtctcaacctgtgaggttcagggaaggctcccagagaaggtgacatttgaatcgactcttaaaggatgag

SEQ ID NO: 403040 - DNA, 239 bp, Homo sapiens
tcccacaaagaaaacccctgcgccagtatgtcttcattgaataattcttccaaacatataaggaagaaatatcaccaaccttacatatagttcaccagagaatagaagaaaagaaataatttccaattattttatataaagccagcatagccttcatattaaaacttgattatgaaaagcataagaaaagaaaatctctcttatgaacacagcaatctctttcacagacatatactcct

SEQ ID NO: 403041 - DNA, 489 bp, Homo sapiens
gcaggcgattactccgagtctctctgccagagcatgggccacttttctgcccaatcagctcatctgactccccaaagacacgccttctgagtgccccaggaccacaccacccacgtgactcctaagtctttgaccatgccagggctgatctccccagtaaaggccccattagtcactttgtagcagttctgcggagccacagcaatcttgggagctagcttctgccgggccaactcgttatacgcagtggcgagagcacaaatcaccttggtgtcggcaggcacagtggccgcgttctgagtgccgatgagctcccccagacatttcttccgcccgttcatcttccagttcctccccacgaagaacttcctggagggcgccatggcgctggagctgaggcgctgtaggtcagtgtcagcgcctaaaacgggttttattaatacttggcaaggttgttaggcggattaaatgagatcttgtaactacagt

SEQ ID NO: 403042 - DNA, 550 bp, Homo sapiens
gaagggcctgggcttacttggcatcttgtcaggagacttttcccttcttgctttgtccatgctgaaagggacaggaaaggtggaaagagcacatcgggtttttacagcctaattgcatgtctcatcctggctcttgagtagaactggctggcttacttgtaattcatcatgaaaaacacattcataatgtttttggaggagtagttcacttcgggaaaggaccatgagtcttgaccccattggtattaaggataacaaatgactcacaaataatgaaagcaggaagaaatttttaaaaagcagaatgcattttaaaaaatgacctcaatttagactactgaaggacttccctcttgttatatctctgtgtgtcatttattggaaagcaaaaaataaaaaaaaatctgcattgtacacaaaagtgcccttgtaaccagaattagtttagtgcagattaaaggcatagaaagaaaagtaaaatactgaattataaggtgaattctacaatgcaatcttggtggagttatttcaaaaggataattttaaaacg

SEQ ID NO: 403043 - DNA, 560 bp, Homo sapiens
gagactccgtctcaaaaaaaaaaaaaaaaaaaaaaattagtagtttatgtcaccaaaaatcagataacataatggggaagaaaacattccttttttaataggaataaagccaaaatgtttaaataaaccttaaccataaataaaagatctaaataattgtggagtccgccatgtagataagatgttacccttggaaaatgtgatgcagagacatgaagagataatggaatgtattataactctatattagttacaagtgcacttcttggaggaacgcatgcaatttattgaaatgaataacaacaaagtgggccgggcacagtggctcatgcctgtaatcccagcactttgggaggccgaagtgcgagaatcgtttgggcacaggagttcaagaccagcctgggcaacataatgagacccccatctctaaaaaggaaaaagaaaaaaaataaccaaaatgaactttgagctttttatttcaaaataagttccaagtagttgttggggctgggcacggtggctcacacctctaatcccaactctggagatagaggtggaaa

SEQ ID NO: 403044 - DNA, 434 bp, Homo sapiens
gttaatttacatcgaaccttatgtctgtcgcccaggctggagtgcagtggcacggtcttggctcactgcaggctccgcctcctgggttcacatcattctcctgcctcagcctcccaagcagctgggactacaggcacctgccacctcgcctggctaattttttgtatttttagtagagacggggtttcaccgtgttagccaggatggtctcgatctcctgatcttgtgatccacccacttcggcctcccaaagtgctgggattacaggcatgagccaccgcgcccagccacagatggactcttacaactgttacagatagaaaccccctagggctatctaggctgtgctgattggccccgagataaccctttgtgggtgccgtttatgggtacttctgctgctgatttttctgttttggaaactttcctgtccc

SEQ ID NO: 403045 - DNA, 437 bp, Homo sapiens
aagattcccagcaaacacgagaggccgggagagacgcctggaacagatgctccctcgcagccctcagaaggaaccaactctgctgacacctggatctcagacttccagcctctaaaactccgagacaatgcatttctgttgtgtatgccacttgatttgtgggactctgttatggcagccccagcaaatgaatacaccaagtagcttaaataaagtcagtatcttcctttgatcattgggaataatcataggtgagtggtctgcattattggctatgtctagcttaggaaaaggacatcacaaggagaaatattctttcccaaaccaagtgaccaggcttccaagagcttctacatagagatgcatccaactagaagtggggagtctccctgctccagctcaggtgatgaaaaaattctggtcaactctgactgcca

SEQ ID NO: 403046 - DNA, 341 bp, Homo sapiens
aagatgcatattggtccaaaaagtaatagtgactatattttaatagaaaacactaatagcaagtttcaaagtcaccattttgcctatgaggcataatgacaaagttagtccattaaacagtagactaacaggagagtcgctattaaatctttttaacacacaaagaattgcagaaagaagtgagtggcttggaaaagagtgtctgagaacctaacgacatttatttaccctggcagagaattgcatgctacccagatcaaagaccttaatgataaaaatgatcttcacctgaccaagacctaaggcgtcctgaaggccaccgagaatacagagcttcatcc

SEQ ID NO: 403047 - DNA, 1682 bp, Homo sapiens
  misc_feature (1)..(1): n is a, c, g, or t
  misc_feature (30)..(30): n is a, c, g, or t
  misc_feature (37)..(37): n is a, c, g, or t
  misc_feature (42)..(42): n is a, c, g, or t
  misc_feature (100)..(100): n is a, c, g, or t
  misc_feature (156)..(156): n is a, c, g, or t
  misc_feature (167)..(167): n is a, c, g, or t
  misc_feature (191)..(191): n is a, c, g, or t
  misc_feature (195)..(195): n is a, c, g, or t
  misc_feature (201)..(201): n is a, c, g, or t
  misc_feature (216)..(216): n is a, c, g, or t
  misc_feature (232)..(232): n is a, c, g, or t
  misc_feature (245)..(245): n is a, c, g, or t
  misc_feature (257)..(257): n is a, c, g, or t
  misc_feature (280)..(280): n is a, c, g, or t
  misc_feature (283)..(283): n is a, c, g, or t
  misc_feature (290)..(290): n is a, c, g, or t
  misc_feature (314)..(314): n is a, c, g, or t
  misc_feature (317)..(317): n is a, c, g, or t
  misc_feature (506)..(506): n is a, c, g, or t
ngaccaggagcgggagccgagcctcgcggnccggggnacggngccgcctgcccctccccggcagtgcctcccgaccccctgccctccgctgggacatggnctgaggccccgcccgccgcccgggacccctcccccacgctgcccccggaccctcgncccaggaccgnggggtctcttcccggccccgccgnccgncccggngagaacaggcccggngggcaaggcggcggcngaccgagggaggnctggcccggcancggggagaagggtgcggcgcagnccnagtttcncaccttttatcctggcccagacgnggntggggcggacgggactctcgcgctctgcctcctcctcttgcttcatggagccatgcgcctgggtgggggctcccgagagaagctggcctgcgggcgggccggacgcgctgcgcggacgggacggggcgaaggaggccggcaggcggaggaggaagcggcggggcggcggcggcggcggcggccgggaanaactagaggtattccccgggcggctggaggactgagtcgagccgggacccgagtcctccggtatcccagcagccaccggaggcagtgaggtaatggaggaagaatgtagggagtcctccggtggaccacactccttctagcgagccgcggaaaccatagagatcagggctcagccggagggccggcccactgctgtcacgtggcctccatccgtgcgctttattggctggtgctggctttacggggttgaattttggacgctgcctgccattcgtgggaccgagtttcaggcagctggaataaagagagatatcgggggaaagccgcgagaaggccagcgtccctcgctgggagcagagctagccgagtagggcgcccggctgtcaaactggccggcgcagtgcacgctgggccgccccggagcgatcgcagagcccgtcgggagtcgtagtccgggacgggcccgcggcatcgtccgcgacgcagctcgggatccgggtcggggtgtcggccgggttgctgccgggcaccgtcgagcgttagccacccagcattgagctgccagcggctgttctccctaagcaccctcgctcacgtcgcctcgcctcgcctcgcctcgcctgaccggccgcagccttggataccagccttaaatcgagccgactacggcccagccccgcccgcggcgaggtgcgcggggttcggtgcgagcccctcgcccctggccgggccagcctcttgatgcaccggggacgggcgcgcccatccgactcttcgaggggcggcagggccccatctgtgtctttcgctctcgagcccccagctagagttggcttcagcggaatacctactgtgcgggattattcaacaagccgattgatcacattcttcagctctagcagtgcaaaggcttcactgaaaaagaacattacaacttttttgaaagaaatttgggggtaaatttaattttaaatactgatttttgataacatttgatcttatgacagcatttgtatttttaattacagataggattacactaaaagtcatttctgacctgctcccttacccttatggctaaaataaactgctaggccctgaagcaaaggcgagccatgttctagagcaatgtctttcttgtattaaaatacagccccatgctcacaaaaaaaaaaa

SEQ ID NO: 403048 - DNA, 1618 bp, Homo sapiens
  misc_feature (1)..(1): n is a, c, g, or t
  misc_feature (30)..(30): n is a, c, g, or t
  misc_feature (37)..(37): n is a, c, g, or t
  misc_feature (42)..(42): n is a, c, g, or t
  misc_feature (100)..(100): n is a, c, g, or t
  misc_feature (156)..(156): n is a, c, g, or t
  misc_feature (167)..(167): n is a, c, g, or t
  misc_feature (191)..(191): n is a, c, g, or t
  misc_feature (195)..(195): n is a, c, g, or t
  misc_feature (201)..(201): n is a, c, g, or t
  misc_feature (216)..(216): n is a, c, g, or t
  misc_feature (232)..(232): n is a, c, g, or t
  misc_feature (245)..(245): n is a, c, g, or t
  misc_feature (257)..(257): n is a, c, g, or t
  misc_feature (280)..(280): n is a, c, g, or t
  misc_feature (283)..(283): n is a, c, g, or t
  misc_feature (290)..(290): n is a, c, g, or t
  misc_feature (314)..(314): n is a, c, g, or t
  misc_feature (317)..(317): n is a, c, g, or t
  misc_feature (506)..(506): n is a, c, g, or t
ngaccaggagcgggagccgagcctcgcggnccggggnacggngccgcctgcccctccccggcagtgcctcccgaccccctgccctccgctgggacatggnctgaggccccgcccgccgcccgggacccctcccccacgctgcccccggaccctcgncccaggaccgnggggtctcttcccggccccgccgnccgncccggngagaacaggcccggngggcaaggcggcggcngaccgagggaggnctggcccggcancggggagaagggtgcggcgcagnccnagtttcncaccttttatcctggcccagacgnggntggggcggacgggactctcgcgctctgcctcctcctcttgcttcatggagccatgcgcctgggtgggggctcccgagagaagctggcctgcgggcgggccggacgcgctgcgcggacgggacggggcgaaggaggccggcaggcggaggaggaagcggcggggcggcggcggcggcggcggccgggaanaactagaggtattccccgggcggctggaggactgagtcgagccgggacccgagtcctccggtatcccagcagccaccggaggcagtgaggtaatggaggaagaatgtagggagtcctccggtggaccacactccttctagcgagccgcggaaaccatagagatcagggctcagccggagggccggcccactgctgtcacgtggcctccatccgtgcgctttattggctggtgctggctttacggggttgaattttggacgctgcctgccattcgtgggaccgagtttcaggcagctggaataaagagagatatcgggggaaagccgcgagaaggccagcgtccctcgctgggagcagagctagccgagtagggcgcccggctgtcaaactggccggcgcagtgcacgctgggccgccccggagcgatcgcagagcccgtcgggagtcgtagtccgggacgggcccgcggcatcgtccgcgacgcagctcgggatccgggtcggggtgtcggccgggttgctgccgggcaccgtcgagcgttagccacccagcattgagctgccagcggctgttctccctaagcaccctcgctcacgtcgcctcgcctcgcctcgcctcgcctgaccggccgcagccttggataccagccttaaatcgagccgactacggcccagccccgcccgcggcgaggtgcgcggggttcggtgcgagcccctcgcccctggccgggccagcctcttgatgcaccggggacgggcgcgcccatccgactcttcgaggggcggcagggccccatctgtgtctttcgctctcgagcccccagctagagttggcttcagcggaatacctactgtgcgggattattcaacaagccgattgatcacattcttcagctctagcagtgcaaaggcttcactgaaaaagaacattacaacttttttgaaagaaatttgggggtaaatttaattttaaatactgatttttgataacatttgatcttatgacagcatttgtatttttaattacagataggattacactaaaagtcatttctgacctgctcccttacccttatggctaaaataaactgctaggccctgaagcaaaggcga

SEQ ID NO: 403049 - DNA, 406 bp, Homo sapiens
  misc_feature (195)..(195): n is a, c, g, or t
cgggaactgcaaagggcagagaacgggggttgggagcatccatacgccagctctaggttgcccaggaacgcaaagcggggctgagcggacaaaccagaggcaaccccaggactggacactctctatggcagctaagattctggaggctgggagtggggcatctcacagaccttctccatctaggagcacccactncccactcttttgacctcatttcctgtaaggtggtaccataaaagctttttgaggccagagcacaccaaatacctgtgactactttattttccaaagagaaagtcagcagcagcaacatccagatgaaatactctgatcttgagagatgcagaaatcgaattatgtttctgtctcttcctttcctgttacagtaaaaaggttatttgtccta

SEQ ID NO: 403050 - DNA, 228 bp, Homo sapiens
gggacaaatgagaacatggggacaagttgtgagatgagggacctgtggctctggaattgtatttctgggaaactgcaaggaagctgtgtgtgtgtgtgtgtgtgtgtgtgtgtctgtgtgtgtgcaagtatttgaaagaaactaaaaatagagaaattcaatcatactagtatctccaactgcttctgagtctgtgactagaccaatgataataaatgataaagaact

SEQ ID NO: 403051 - DNA, 749 bp, Homo sapiens
caggtctccctacattgtcctggctaactattcataagcactaatagtgtaccacagtgttgaattcctgagctctagtgatccatccgcccaagtaggtgggaatacaggtgtgtgccactgtgctcagcttataataaattagtttctaaaagcaagtaacaaaatatgaaatcaagattggtgtaattatgaattacccgtttggtattcaataaagacacctggagcagatactgcatttgaccaccctcaacaccactcaaatccctgttagtcagccacatgaggggtaacacatgtgaaaggatggctacaaagtgaggaaggctgggattcaattccacttctgcaacttccttattatgtgataaatgagtgaaatgagtaaaatatctttagaattaaatgagataatgcctggcacctaatggttatttaataaataatataacaataagtctcagttcacaattcaggacagtaatagaagtgatatgacaatgctgcacacaattaaatgacagaaaattcctatcttagaatttaaaataaagttaatattaaagcaggtaaaaatagtaaagaaaagctgacaacagaggtcatttaaaaataatctaaaattttcaggctaggcacggtggctcacgcctgtaatcccagcactttgggaggccaaggtaggcggatcacctgaggccaggagttcaagaccagcccggccaacatggtgaaaccccatctct

SEQ ID NO: 403052 - DNA, 803 bp, Homo sapiens
caggtctccctacattgtcctggctaactattcataagcactaatagtgtaccacagtgttgaattcctgagctctagtgatccatccgcccaagtaggtgggaatacaggtgtgtgccactgtgctcagcttataataaattagtttctaaaagcaagtaacaaaatatgaaatcaagattggtgtaattatgaattacccgtttggtattcaataaagacacctggagcagatactgcatttgaccaccctcaacaccactcaaatccctgttagtcagccacatgaggggtaacacatgtgaaaggatggctacaaagtgaggaaggctgggattcaattccacttctgcaacttccttattatgtgataaatgagtgaaatgagtaaaatatctttagaattaaatgagataatgcctggcacctaatggttatttaataaatgacagctgaatctgaatcaagtgaagaaacaaactataaatatgttcaaattttaatataacaataagtctcagttcacaattcaggacagtaatagaagtgatatgacaatgctgcacacaattaaatgacagaaaattcctatcttagaatttaaaataaagttaatattaaagcaggtaaaaatagtaaagaaaagctgacaacagaggtcatttaaaaataatctaaaattttcaggctaggcacggtggctcacgcctgtaatcccagcactttgggaggccaaggtaggcggatcacctgaggccaggagttcaagaccagcccggccaacatggtgaaaccccatctct

SEQ ID NO: 403053 - DNA, 201 bp, Homo sapiens
tccaggctgtgtttaaatttccagttgtttcaggtgtcataaatgttttcagttttttgcaagactgcttcataagtgataattctatcagaaggcacacataaatagcctcctcggtttttgtgatgttagcagctatcagtgcttaatgtgtagattcattaatttattagctgttgtataatcatgatttttaactct

SEQ ID NO: 403054 - DNA, 261 bp, Homo sapiens
tggccatctgttcaatatacgaagtactacatgccattaagacactaaattactatcagatgcaaaacaaaaaaaaatgaattcttacatcttgtgtcccaagcatgtacttatattagaaaatatgaaataaaaattcctctcagaagatggaagttatatgttatctgtgtgagagttatcttcagttgtaaaatttcaaattgcacttattctgttttatttccatgccactgggtgtgaaatttatgatatggagtt

SEQ ID NO: 403055 - DNA, 419 bp, Homo sapiens
ggctcagatgagcattttgcagatgaaatataaatggaggtgggtgggtaagggctgtgtaaagacaccagtgctggaaatgttctggggggctggggtagttttgtgtgtgtgtgtgtgtgtgtgtgtgtgtgtgtgtgtgagtgtatgtgcttgaccaggtcgtctagtcaagttgtagtttccagtattgcccttgttctcttctgtagtgttaaagaaggatgtttatttttgactatatagtataaataaaactagacttatggacatgcaatatctatcatcatgcactaggatgtcattttatcgattaacactgtgtgcttttgtatggaaagaatatatataatttcatagtataaatagtcttatatattgatttgcacttacgtgatacacctgtgctctctgtgcgg

SEQ ID NO: 403056 - DNA, 409 bp, Homo sapiens
  misc_feature (409)..(409): n is a, c, g, or t
ggctcagatgagcattttgcagatgaaatataaatggaggtgggtgggtaagggctgtgtaaagacaccagtgctggaaatgttctggggggctggggtagttttgtgtgtgtgtgtgtgtgtgtgtgtgtgtgtgtgtgtgtgtgtatgtcatgtgtaacatgtgtgcttatagaagtgcttatcgaatctaatagtgactactgctaatgcgctgtatgttgtgcaatattatttattatgaatgatataatttagcatgttgatcatgatagctcgttgaatttgcgccatttaatatgaagtcctgttaatcctgacttcagtttttggggatacttatagagcttgcccgttcaatctctggactcacatttagttactgtaagtatctacttgattttgcccn

SEQ ID NO: 403057 - DNA, 692 bp, Homo sapiens
ataaaggtgaaagtagctctctagtagcctgtgacagggaggatcatcagacaggtgtttacttccttcctggattacttttccaggagacacccagatgtggcaatagctcttggggttttgggctgacgtacaggagctgaagctgtgatgtcgcgtgtccgtgtccttaggacagtgttaagtggggagctgcccccatcctgcattctcagcagatagcaggcatgtttgccagccggttggttaaacaagctctgaaaacataaacattgatggttttggtggtttcatgtgttgtcgtgtgacgtaagcagatgctaccacagcagagccagaggtgagcaagacgtagggcagagaatcccactcacagtaacacaggaactaaaacagctttttaaaatgtgtttgcaggccaggcatggcggctcaagcttataaccccagcactctgggaggccagggtgggaggatcacttgaggccagaaattcgagaccagcctgggcaacatagggagacctcaaatcaatgtttaatgacctgggtgtgggtggtgcacacctgcagtcctggctactcaagaggctgaggtgggaggatcccttcagcctggaagctcaaggctgcagtgattatgccaccacactccagcccacatgggtaacagagcaagaccctgtctctaaa

SEQ ID NO: 403058 - DNA, 294 bp, Homo sapiens
ttcatggagtttataattctaataaaaatgaatcaaataatcaaatactattactattctctttttcagatggcatgggtaacactagcaataactgaaacataaaattaaaagttaaaaacaaagagaaataatattcttcaggattatatattagctctaagaagtgatacattgcattgtttttagtgagatggagctagaaaaagcagtggaaagagggaaagtccacttaccaaaaagataaaaagaattaaaccttggatactaaacttagagcacaagttttatgcc

SEQ ID NO: 403059 - DNA, 463 bp, Homo sapiens
gaactggcaccgcctgcacattcactcatccaatggttaagggtgccaagagtggctcagaagctccccatggaagaactccaaaactctagctttcttctgcctggcgacaccctgcctttctgatctatatttccctcatctaaaagtcacctttctactagtgctttttcctcacaatctcacaacaccttgcgggttcttatctcctcctttgctcttgctcccctccctaccaggggaccccctgccctcatcacagtctgattaaagtccttcctctttcaggaggcctccccaactactcaagcctgtaaggggcgaggactgagcagcagaaaacatcctactcagtcagcagcaagccacactcatgtaagaatgactcgcaaaatccttagtcccacaggatcttttgctgaatctcctcttaaatgcctttcaggtctaaatgcctgtcctc

SEQ ID NO: 403060 - DNA, 664 bp, Homo sapiens
gtgggtgttactagtaacagtacactcttaaacaaataaggcaggtgagggatgttgtcagtagaaaatatattgatttagtttttatttcattgaattttttttattttaatttttttaccaatggggtctcattctgttacgcagctggaatatgatcatggctcacttaagtctcaatcttctgtgttcaagcattcttcctacctaaccctccaaagtacctagaactacaggtgcacagcaccacatcaagctaattttttaatttttgtagaaatggggtcttgctatgctgtccagggtggtctcaaactccttgcctcaagccatcctcccccctcaacctcccatagtgctgggattacaggcatgcatcattatgcccagcaatttgtgttttttcctaacctgcagaacaaagtaataagcctgtttgtttcaagatctccacctagataaacatagagaattctaaacattaaatatttctgaaacttcaacctaggaaactactgcattttttagagtattttgtcctcttctttttgaatgttttacttttttttctcacctgtattgtgaaaagaaaaccagaaagcaattatttcttccttctatgcccatcccttgtctttaatatcatctttgaaatagtgacacc

SEQ ID NO: 403061 - DNA, 149 bp, Homo sapiens
tcccgggatcctatgtgcatccagcctttttctattatagaaactggactttatttttatccccctttcactatttctcagttctcaatgcaaaagttttactggcatgattactcaataaacaaataaataagtaaataataaagata

SEQ ID NO: 403062 - DNA, 610 bp, Homo sapiens
tgaagatgtttaaataaaaagaagaaatcaagcatttatcctgctttcctggtttgaattgtatttcagaatacacaaatagttgagtaggaaaagttacttttaatggaagaattacagcttataaatgcagaatgagtgtagagtctaaaaatcaccattccgtaggccctaatgaattaatgggtgtaggcagtgatcattggtagctgctaaaaccattaattaagtgaaagattgatggggagctttataatgaatcaatcaggctgacaacacctgaacctgctgctgaatcctaacatcagaaacagtgagataaccagacattatgtatctcccaatgtcagcactaggaagttcatagcagagcttaaagtgttcttgccaaaaagaaagaaaggaaaaaataaaggaagaagtaatcaaccttgtagatctaattacagcttagaaaaataaaaagaagattaaaggaacaagttaaagacatcaagaaacatcaatctgctaaatccagattgtgtgaaattgtataggacaaatgacttggtttctttgacaaatgaatgacatgaaattaataaaggtgagaagaccccgtctctac

SEQ ID NO: 403063 - DNA, 221 bp, Homo sapiens
aatattatgctccctcataactggatctccctggtgtttttacctccttgagttgtccatatggaaccttcagcaattcaccagttatagttcaagattttctactccagcactggttcctaaggtggtttcagtagtgagtctctgttcctgtaagccataaattcccatattcacttctctatctctccaatcttgggggcagtggtttgccctatgtc

SEQ ID NO: 403064 - DNA, 385 bp, Homo sapiens
ccctgtctcaaaaaaaaaaagttaaatagagatggtatctcactgttacccaggctagtctcgaactcttggcctcccaaagttgctgggattacaggcatgagccaccacgcctgccctccttaatttacttttatgtttaaagtaaatgtcttatagagagcatataattggtagctgggtcttgctttttttttttttttccagtctcacaatctcagtctttaattggagcattaatccatttacatttaatgtacaatcccatatggctggatttaaatctgccatcgtgttacttgttttctatttgttttttgtttccacttccatctttccctgactcatttaatttttgtagtattttttagtattccattttatc

SEQ ID NO: 403065 - DNA, 401 bp, Homo sapiens
ttggcaggctgaccccccacagcaggctattaacataggcatccttcacgctcacacccaggcgctcgcttctcatcttcaccctcttcccggtttatcttttaccctcagactccaattcccatctttctgccacatttacatctcaagccaggcacttcccctgagccaggtatttatctccagctgtccccttgaagcccacagactccttaaggtcaccttgtccacagtgagctcttctgtgcaaaccaggcacatgagccagagagctagccgcccacccgaaactggtccctggacccctccctctcctgatcatccactatacccaggctgacaggaagtcagttttactgtttatcaataaatcaataaatcccagaatctctccagctcta

SEQ ID NO: 403066 - DNA, 441 bp, Homo sapiens
cttcaaataccacagaagccgcccagagtctcaagtccaccttggctccactcccacacccaacaaggagctgtcccttcttcttccttcccagcgagggggtatttagggtacagctgtctttgagaggagcacagctcagcgatcctcagtctctgcaccagggtgctccccagcagaggggactgctccacggatggtggccttggacccctggggtccagccctggcctctaggctactgtgaacctgcccatgggtgagggtcccctgcttcctcctggggttttcatgctgtgggctcggactccctcacagcaatctgtgccatcctagggtagggcaagaggaggttggactggggagaccccgcccgctgacaggaagtcagttttactgtttatcaataaatcaataaatcccagaatctctccagctcta

SEQ ID NO: 403067 - DNA, 407 bp, Homo sapiens
aaaacagaaataatgtacaaatcataaaaaataacaaaccatctagtaaaagaagggcatgggagtgagaaaactgaatcctgaattccaggccaccaaaccctcagagtccattcattcagtatattatactagagtggcattctacttcaatgcttgagatgggcaagagcaatcaattcctacagattaccaaaaaacattccccccaacagtctattggtttgctagacatggtaaacaacccactcctggaaagactttggcaaaggccacattggtttcaggagacacagtttgtgaattacgatgatatcttgtgagtacaggcagaattaggaagctttagtttgagaataaaatttatgtgtgtgtgtgtacgcaatgtcactccttcacccaagcta

SEQ ID NO: 403068 - DNA, 554 bp, Homo sapiens
aaaacagaaataatgtacaaatcataaaaaataacaaaccatctagtaaaagaagggcatgggagtgagaaaactgaatcctgaattccaggccaccaaaccctcagagtccattcattcagtatattatactagagtggcattctacttcaatgcttgagatgggcaagagcaatcaattcctacagattaccaaaaaacattccccccaacagtctattggtttgctagacatggtaaacaacccactcctggaaagactttggcaaaggccacattggtttcaggagacacagtttgtgaattacgatgatatcttgtgagtacaggcagaattaggaagctttagtttgagaataaaatttatgtgtgtgtgtgtgtgtgtgtgtgtgtgtgtgcacactgcattgcatagaggaaaggaatgaagacctttgagctatgggatggctcaggccaaagtttgtgtgggctttgcctgcctggcattggtccccacccctgccacctccaggagacctgggggtggtatagataaacagcgggtcaccgag

SEQ ID NO: 403069 - DNA, 349 bp, Homo sapiens
gtgtgtgtgtgtgtgtgcacactgcattgcatagaggaaaggaatgaagacctttgagctatgggatggctcaggccaaagtttgtgtgggctttgcctgcctggcattggtccccacccctgccacctccaggagacctggggagacgccctggactgctgctccctcttgtctgctcaccagttgaagacttctgttataccttattatggaggaaaacagcctgtccctgtgggtttgctgtggattcaacaagctgcatttgtttctcccaattctgaaacattacaaaaagcaacagagtgggcaggtgactgcttcctgggaagggagccacaagtcttaaac

SEQ ID NO: 403070 - DNA, 325 bp, Homo sapiens
catcactaaagtatatatttctattcataaattcttactgtgtagaacaaaaaatgggaagaaaaaaacctctgggaagcacaaacagctgtggaactagttactcttattgttttaatctactatgtctaacaagactcgtgaatttatttccaagtccatagtgaactatgtgcaaattatgtggtgagaggctgcctacacatgctgaaagcagagaaaagtaaatgttgccagcctaacagtaaagtaagatagagggaaaaaatatgaagagtaaactgaagagctcaaaaagcatagcagcctgagagtaaagggggca

SEQ ID NO: 403071 - DNA, 404 bp, Homo sapiens
cctcatcttccacttatttatgagctgtgtgtcactgagctttccaaaatataccttttgttttcacagcccattcttctcttatcctgaaatgaacttctcttctatgcctctgacacctactcacgtatgaatgtcctgctaacacaccacttccgccaggacccaagtttgctcatgaaccctcttgcccattccagtggctacttcagaactcgccagatctttctctcgttcccatgttattgatctgccgtctttgtttgcttttcacactccttctcttatccaagaaagattttcacagcatcacactcatttaaatgtctatagctttagttctagactagtttatcttcttgctatatttttagagacaaatttccatccaaatttactatgca

SEQ ID NO: 403072 - DNA, 405 bp, Homo sapiens
ctctacaatccttaaaaaacatgcctcaccatttaagagaccagcagcaggccttcagcaaagcccacggtctaggcagcctttgtaggcctctgggattgtggtgagaaaaccttatccctctcttatttcctgataactttacattttagaggtgtctggaaagaaaggtggcagaaaagcagcataacctgcttgacaagtcctgtacaaacagaagtccaatgaggctgctgctctggggttgccaagctcaaggaagccaattgtagtgtgcacaaaggtgcaagtcaccaaggcctcagagagctccaaggaagcctgtgcaaaggcaggatttagagttctaaggacgggttgtccagcgcagcccagcagagaacctaggtccataactgtggactc

SEQ ID NO: 403073 - DNA, 149 bp, Homo sapiens
ctccatctttgtaattttggatgactttgactttagtcataaaaatacacagatggcaaggttatcttatttaaagtcactcttttagggaactttttttttttcactttaaggcaataaaagcttacaggggtataaagaacgtggat

SEQ ID NO: 403074 - DNA, 277 bp, Homo sapiens
actctccccaaacaggagggaggcagggcaaaggtttatgatcttcttagctaagcaactggtggctttaccagttgttctaaggaaacaaaatttcaagcaacttctgcagatgaactttccaggatgaatttcagctgctttatgtgcataccctttccactagttagtaaaaatgaccaaaacacgactgttgcaagacttttctctctaaatctgtggttctcaagtaggggtaattttgcactcaggggacatttggcaatgtctggagaaa

SEQ ID NO: 403075 - DNA, 443 bp, Homo sapiens
ccaagtcgctgatttaggtgtgagtcacgacatcattttattttttgcatttttagtagagatggggtttcactgtgttggccaggctggtctcgaactcttgacctcatgatctgcctacctcatcctcccaaagtgctgggattacaggcgtgagccaccgcacctggccgtgttgttgttcttcaggtacagcagttcttcatatattctggatattaaagcctcatccattcatgatttgcaaatattttctcctgtttcatattttgccttttcactctgattgggtcctttgatgcacaaaagttttaaagtttgatatagttccatttgtctgtttttgcttttgttgcctgtgcttttagttttggattgggaaaccgttgcctagtccaatgtcatgcctttctccttgtattttcttctaggagttttatact

SEQ ID NO: 403076 - DNA, 443 bp, Homo sapiens
cccgtctctttgccgttaggcagggcctgtggctggttctggccattgggtgtgactggaagtggcctttgtcacttttagcatgaaacatttaaaagtcaatgcatgactctccatcttactccttcccagttgtggagactgaagaggtcgtatgtactcattggtgcagctacaagacagtgatgccttctgaagtctgggttcccagtgactacgtctatggagcagagcccttctaaactataatgaacatgtcgtgagccagaaataaacttgtgttatgttaagctactgggatttgggggactgtttgttccctcagtacagtctagactaacctgacgtattaacataagtgtctacctaacacaacatgccaaccatttaattatactcaactcaattcaacctgactcttccttagctggatatcaattata

SEQ ID NO: 403077 - DNA, 270 bp, Homo sapiens
aattgccaggatgtccatttgagcaaagcccttgattaagtacttctggatacttgacaaacacgcagctattacattgcctaggtctcatgaaaagagctgatattcttgttggatgattctgtttgaacagtagaatctggtataacaattttgggaggcaatagaacttgcagtgtcagagtcttgagttgcagtactcttcattatcagtcccaacattgacatatatatattgattatagcaaacaatttaaaaagccacttaag

SEQ ID NO: 403078 - DNA, 518 bp, Homo sapiens
tcctcccacctcaacctctcaaattgttgggcttgcaggcataagccactgatcatgacccagtaaactgttctgaatgataaccacaaccatctctgggaggttaagggcatctgttcaaatctcttttgctattacaggaaggcctgtggagaagtttgagaagctggggtgttgatcttcctaagtgtagacaatgtgagcaggagcagagaaaacagagggtgggtttttccctatgattggcagcaaccatagaccaaagagatttaggattcaaaggtgcttgtgtaaggcactacaggggttctttactccatgggataaagtgattctcataatccctctgatatagatgttatattatccccattccctctgatgtagatgttatattatccccgttttagagatacggaagctgaacttcagagtggtgagcaatttccgtaagttacacagttgatcatcagcaaagaaaactgagtatggttggaaagactaaaggctcacaagac

SEQ ID NO: 403079 - DNA, 701 bp, Homo sapiens
aacctgcacatgtattcctgaacctaaaataaaagttgaaattatttttaaaaaagaattactatactcttaagctatgaaagcaccacaactaataccaactgttataaacttaagctgttaaaactatcccatctaatatgacattacgtaaatctgaaataattaaaagataccaattttggtgaactgatcatcttgtaagttgaaaaccctcacagaactggctttggtgatgtgaattttgagagctgatctgcatttatttaaccagtgacctataatttgacaaacaagcctatttctatatggtattccaaacagtcccacaataagtattctcttgtatagaactttgtgtagcccccagttattttcttataagtaatttattccaagaagtggtcatgttgggttaagaagtgtgtacattctaacggagtttaatatgtactgtcaagttaaagattgtatcacttatcctctcatgccaagcccagtgatttcattttatggtgaggcaattacagtccagagaaaagagtggttttgtcgataattacaggactgtcaaggctggactccacagacaggcttcctgagttcaacactgtctcattatcctctttgcactcccttccaggcagagccacatttccctttcagtttctctgttctagatgccaatcttccatatacct

SEQ ID NO: 403080 - DNA, 371 bp, Homo sapiens
ccaaggccaatcaccctgttgcttgtacttaggggttaacagactggccttccaaatcatgtcctttttataaataaagttttattggcccacagctaaacttatttccttccctattctctgtagctgcattacagtggccgagttggaacctctgtgctacaacagcagtggcaacagagctgataacaagtaggaccagcaaagctcaaaacatttactatctggcccttaactgaaaaagtttgcggatccctggggctcaggtgaagtcaaactgcaaacattctcagtttcctcttccagatccagagggctctgcaaatcaaggctggtgtaagaattgccattctggtctgtgccatgtcagc

SEQ ID NO: 403081 - DNA, 222 bp, Homo sapiens
gaggagtcagactttcctctgttgattaatagttctcaaattttagttattctcttactgtcttcgtgagctttcctatatctaagaacaacttatgctattatagtattttgaaaatgaattctaggttgactcactaattttactgaccatctaagtaataatatccatggtttgatacatatatattattattaaaatgcaaaaatataatgatatatt

SEQ ID NO: 403082 - DNA, 298 bp, Homo sapiens
atttccatatgttcattttattattaaaaacgaattactaaaaagtgatgacctgtttggaattcatatcttgctttaccagcagtcagccagtatcgactgaacacaataaatgcaggggtgcgaaacgtgattgctcgggttcgagttctgtcggatgcaccgatctaagcagaacctttcccgaagacttggaattgggtgcgcttttttttttaagttgtggctgagccctatggggaagaagggttacctgggcgtcggctgagaccccaaaccctcttcctcctccatgaga

SEQ ID NO: 403083 - DNA, 410 bp, Homo sapiens
ctttttttccttgctagtttgagtagaaaaataacaatttttccacaagttgatatgtagattcagcagaatccctatcaaactcccagcaggctttagaagtgcaaaagactagccaggtgcactgtggctcatgcctgtaatcccagcactttgggaagccaaggcaggagaatcactcaagtccaggagttcaagaccagcctgggcaacatagtaagacccccaacctctaccaaaataaataaataaataaaactagccaggtgtgatgccacatgcctgaggtcccaggtatttgagaggctgagtaagagaattgcttaagcccagaagatggagtttgcagtgagccaagattgcaccactgcactccagcctgggcaacagagtgagaccctgtctcaaaa

SEQ ID NO: 403084 - DNA, 224 bp, Homo sapiens
catagggaagggaaaaagatacctcgcctccgccactccatcccctcagttggaatcagctcagaaccagggaggactcctttctgcagggaaaaataaagacgaccccagcaattctgattgccactgcagacacctgcagcctttgttatcagagactcctacagtcctcacaagctctaaactcaactgagagagctccctagagtcacatgctgagctat

SEQ ID NO: 403085 - DNA, 423 bp, Homo sapiens
ctctagcggatccccatgctatccctcctttgcattcacaactttctgtctcaaggggcctagctttcactctgtctcagctttcgatacatattcctcactaagcttaatcatttctagcttttaatttcaagcgggagacgtatgactcttcctttcacttgaacacttagaagtcactgcagggttattaataccctaatttcaatattgttgtatctcaggaaataagaaggcccaagaagagggagggagagagatggaagaactgccggttggtggagcagtcagaacatacatatttctcgatcaagttggccgtcttacatggtttgtggtgccccaaaacaattacaacagtaacatcaaagatcactgatcacagatcactataacacctataataatgaaaggtctgaaata

SEQ ID NO: 403086 - DNA, 1076 bp, Homo sapiens
cggggtcctggaggcctctgggcgcgtgcgcgggcggtcgctacctgcggccgagccagggagcgagagggcgcagagggcagcgggcttgggcagcatgaggcccggaggggagcggcccgtggaagggggcgcgtgcaatggccgctccgagctggagctactgaagctgcgctcggcggagtgcatcgacgaggcggccgagcggctgggggccctgagccgcgcgatctggagccagcccgagctggcctacgaggagcaccatgcccaccgcgtgctgacgcacttcttcgagcgggagccgcccgcggcctcctgggcagtgcagccgcactaccagctgcccacggccttccgcgccgagtgggagccgccggaggcccgggcaccgagcgccacgccacgcccgctgcacctgggcttcctctgcgagtacgacggctgctgcccggcatcggccacgcctgcggccacaacctcatcgctgaggtcgtgggctggcggccgcgctgggcgtgaggggggccttagagggcctccccaggccgcctccgcccgtgaaggtagttgtcctgggaacccctgcagaagaagatggtggtggcaaaattgatttaattgaagcaggggcttttacaaatcttgatgttgtttttatggcccacccatcacaagagaatgctgcttatctaccagatatggctgaacatgatgtgactgtgaaatactatggaaaagcatctcattctgcttcttatccctgggaaggattaaatgcattagatgctgctgtgctggcctataacaatctgtctgtgttcagacagcaaatgaaaccaacctggagagttcatggtataataaaaaatggtggtgtaaaacccaatatcattccctcttattctgaattaatctattacttccgtgcaccctcaatgaaagaacttcaagttttgaccaaaaaggcagaagattgcttcagagctgcagctttggcttcagggtgcacagtgggaaattttaaggtgggggcccctttatttatttaccatggttcttttcccaattataag

SEQ ID NO: 403087 - DNA, 4772 bp, Homo sapiens
cggggtcctggaggcctctgggcgcgtgcgcgggcggtcgctacctgcggccgagccagggagcgagagggcgcagagggcagcgggcttgggcagcatgaggcccggaggggagcggcccgtggaagggggcgcgtgcaatggccgctccgagctggagctactgaagctgcgctcggcggagtgcatcgacgaggcggccgagcggctgggggccctgagccgcgcgatctggagccagcccgagctggcctacgaggagcaccatgcccaccgcgtgctgacgcacttcttcgagcgggagccgcccgcggcctcctgggcagtgcagccgcactaccagctgcccacggccttccgcgccgagtgggagccgccggaggcccgggcaccgagcgccacgccacgcccgctgcacctgggcttcctctgcgagtacgacggctgctgcccggcatcggccacgcctgcggccacaacctcatcgctgaggtcgtgggctggcggccgcgctgggcgtgaggggggccttagagggcctccccaggccgcctccgcccgtgaaggtagttgtcctgggaacccctgcagaagaagatggtggtggcaaaattgatttaattgaagcaggggcttttacaaatcttgatgttgtttttatggcccacccatcacaagagaatgctgcttatctaccagatatggctgaacatgatgtgactgtgaaatactatggaaaagcatctcattctgcttcttatccctgggaaggattaaatgcattagatgctgctgtgctggcctataacaatctgtctgtgttcagacagcaaatgaaaccaacctggagagttcatggtataataaaaaatggtggtgtaaaacccaatatcattccctcttattctgaattaatctattacttccgtgcaccctcaatgaaagaacttcaagttttgaccaaaaaggcagaagattgcttcagagctgcagctttggcttcagggtgcacagtggaaattaaaggtggagcacatgattattacaatgttcttcccaataagagcctatggaaagcctatatggaaaatggaagaaagctaggaatagagttcatttcagaagatacaatgttgaatggcccttcaggatctacggattttggaaatgttagttttgtggttcctggaattcatccatattttcacattggatctaatgccttgaatcatactgaacagtacactgaagctgctgggtcacaggaagctcagttctacactctgcggacggccaaagctctggcaatgacggcactggatgttatttttaaaccagagttactggaaggaatcagagaggactttaaactgaaacttcaagaagaacagtttgtaaatgcagtagaataaaagacttaggggccacttataaatcaagaagacgtgatgatttttttcttttaatctcttttaatgaaggcatgcttgttttttaatcttaaaggagtaaaattctttttacctgataagtgaggacagggtgtggagaaaacatattaattacctcatatctaaagtgaaaatttttgcaaatccgtacttgataggattatgatattacaggagctggtatgtgatgccattctttctttttttttaccccgcaaccactcaccttcacagtagtgataccatttcttaacctggaggatacatggcatcatttttataaaatatgttagtaaacctttttgtaagccttaaatgttatgtgtatttttaaaagcttaagagatttcaaaccttatattcagaattgacacccatgagagtgttttgtggtatagggtggtaaacttgttctctaatcgtatattaattcctctaccagattgtatatttgaagccagtgtctttccttttttttttttaagatagagcctcgctctgttgcccaggctgaagtgtagtggcacaatctcggctcactgcaacctctgcctcccaggttcaagtgattctcctgcctcagcctaccaagtagctgggattacaggtgtgtggcaccatgcccagctaatttttgtatttttagtagagacggcatttcaccatgttggccaggctggtctcgaactcctgacctcaggtgatgcacctgcctcggcctcctaaagtgctgggattacaggcatgagccaccgcacccggcctgccagtgtctttttaatacacatgtgtgttggtatttttaaattgttacagtatctagcatattgcttactctgaatattcagtactttttgaataagcaaatattgcttccttgcttggaatcatcagagtttaaagtagcttcgtggatggaccatgatcctaagatgagttttaattttgtgtttacagtcatctcttgtacaacgtggagaagaaaagatatacttactactttgcttcaggtacacataagaaaacctcttttttaaaaaaatttttatttttttacataatagagacaggggctcgctgtagcttccaggctggcctcaaactcctgggctcaagcaatcctcctgtcttggcctcccaaagtgttgggatttcaggtatgagacaccacacctgcccatttttgtttggttttttaatgggcaggttcttgctctcccaggctggagtgcagtggtgtaatcacagctcactgcagtctcgaactcctggactcaagcagtcctcccacctcagcctcctaaagcactgggattacaggcttgaggcactgcacctggccctgaccattttttaaaaaggttaggcttagtgcaaagtttaaaattatatgattcttaaaatactgaattagtttctaaactaaactagaggtataggtggacctgcttgaggtatctttgtttttatggaacatttttattacatgcctttataatttttcattgttcacaccctgtactgaaacctttttctcaaataccaactcttggctatgttaaatttgtagactttaaaagatgttatctaaattaatggtttaaatatacaaattgaaaatattttctttttagtggcaattttaaaagcaggccttaatatgggacctgcttttaaagtaaaatatgtggtactatgaattactaaattgctatataccatgtaatagtgagtatagctaatatttagtatgccttttaaaaattttggactgcttttcggttttaacaaattctccacatgtgaactactcaagaaattttccctttttaattgcctctatagcactcataagagctagggcattaggataaactagaatattttatgtttatgaatacttgtataaacttaaaagtgttttgatttcccacaatttcccaaaggaatgtttatttattaagagttgtgttgataatttaactgttacaatttcagcagttgaattcagtgaacactggttgaggagtgcctattttctaagcactgggtgtaagaagaaaagacacttgcaaaggaagagctaagattaacataatttctttggtttttctattgcttgttattattatgtaaaaactgggtggcagttcacaaggaagattgttgtaacagaagagtgacaaccaatagttttttgatcattaaatcaaattttgtaaacagtggcaggagcgtggacttaaaacaaggcttgcttatttggttttgtcaaagttttacgaaaatatatgatatatatttatactaaaactatataatccttagatttaggaaagcaatcagttaatgtctttagcacactaaagcagtattaaacacaggtacaagttggaaattgtagaaaactgaaagaaaacaagacaaaatgtctatggtagggaataaaagagtttaagatattatgtaaaattatgtgtattttcttctcttttacataaattgtttgtgaaaagtgtgctcaacttttttacaagagtgatattaacttggatttatttttcaatataatttggagaccctttgttatccaaataaaattgatgagtttctgtgcctgtaaaaaaaaaaaaaaaaaaaagaaaagaaaagaccctgttgcttgccccaaaaagcttgtggggggtggtaagttctcacgagatttatttatctgagcaacattggggactgagggaacatctgaaagctaccatcttgaaaatttttgaggaagtgtttctgaaatatttaaaaatacttaagtcagtcattttgaacaaaagaaattgatacaataagtttttttttttaaggatgattgtctaattttgtaatatgttgttttttaaaaacctgtctgatggtgttttatacatttctaactttttacctgagttatctctttagtcttttggaaaataccctacacaatactaacctttaaaactatcaaatttttgttataagataaatgttatctttgtactagatagcaaccctttataaggttgtaaggtataataaactgcttatttttttacatacttcatatcaagcattttgcagtccaattatatagttgaggatggtgtattttgatatgtatgaagttaatattttcaagtaagcaatcagtctactaccatcagattataagcttttttgtaataataggtacataaaatgtgtatgaaaaatctacaataaacatgtttatctgataaaaaaaaacaaaaaaaacacacaaaacacacaaaaaaaaaacaaaaacaaacaaac

SEQ ID NO: 403088 - DNA, 4663 bp, Homo sapiens
cggggtcctggaggcctctgggcgcgtgcgcgggcggtcgctacctgcggccgagccagggagcgagagggcgcagagggcagcgggcttgggcagcatgaggcccggaggggagcggcccgtggaagggggcgcgtgcaatggccgctccgagctggagctactgaagctgcgctcggcggagtgcatcgacgaggcggccgagcggctgggggccctgagccgcgcgatctggagccagcccgagctggcctacgaggagcaccatgcccaccgcgtgctgacgcacttcttcgagcgggagccgcccgcggcctcctgggcagtgcagccgcactaccagctgcccacggccttccgcgccgagtgggagccgccggaggcccgggcaccgagcgccacgccacgcccgctgcacctgggcttcctctgcgagtacgacggctgctgcccggcatcggccacgcctgcggccacaacctcatcgctgaggtcgtgggctggcggccgcgctgggcgtgaggggggccttagagggcctccccaggccgcctccgcccgtgaaggtagttgtcctgggaacccctgcagaagaagatggtggtggcaaaattgatttaattgaagcaggggcttttacaaatcttgatgttgtttttatggcccacccatcacaagagaatgctgcttatctaccagatatggctgaacatgatgtgactgtgaaatactatggaaaagcatctcattctgcttcttatccctgggaaggattaaatgcattagatgctgctgtgctggcctataacaatctgtctgtgttcagacagcaaatgaaaccaacctggagagttcatggtataataaaaaatggtggtgtaaaacccaatatcattccctcttattctgaattaatctattacttccgtgcaccctcaatgaaagaacttcaagttttgaccaaaaaggcagaagattgcttcagagctgcagctttggcttcagggtgcacagtggaaattaaaggtggagcacatgattattacaatgttcttcccaataagagcctatggaaagcctatatggaaaatggaagaaagctaggaatagagttcatttcagaagatacaatgttgaatggcccttcaggatctacggattttggaaatgttagttttgtggttcctggaattcatccatattttcacattggatctaatgccttgaatcatactgaacagtacactgaagctgctgggtcacaggaagctcagttctacactctgcggacggccaaagctctggcaatgacggcactggatgttatttttaaaccagagttactggaaggaatcagagaggactttaaactgaaacttcaagaagaacagtttgtaaatgcagtagaataaaagacttaggggccacttataaatcaagaagacgtgatgatttttttcttttaatctcttttaatgaaggcatgcttgttttttaatcttaaaggagtaaaattctttttacctgataagtgaggacagggtgtggagaaaacatattaattacctcatatctaaagtgaaaatttttgcaaatccgtacttgataggattatgatattacaggagctggtatgtgatgccattctttctttttttttaccccgcaaccactcaccttcacagtagtgataccatttcttaacctggaggatacatggcatcatttttataaaatatgttagtaaacctttttgtaagccttaaatgttatgtgtatttttaaaagcttaagagatttcaaaccttatattcagaattgacacccatgagagtgttttgtggtatagggtggtaaacttgttctctaatcgtatattaattcctctaccagattgtatatttgaagccagtgtctttccttttttttttttaagatagagcctcgctctgttgcccaggctgaagtgtagtggcacaatctcggctcactgcaacctctgcctcccaggttcaagtgattctcctgcctcagcctaccaagtagctgggattacaggtgtgtggcaccatgcccagctaatttttgtatttttagtagagacggcatttcaccatgttggccaggctggtctcgaactcctgacctcaggtgatgcacctgcctcggcctcctaaagtgctgggattacaggcatgagccaccgcacccggcctgccagtgtctttttaatacacatgtgtgttggtatttttaaattgttacagtatctagcatattgcttactctgaatattcagtactttttgaataagcaaatattgcttccttgcttggaatcatcagagtttaaagtagcttcgtggatggaccatgatcctaagatgagttttaattttgtgtttacagtcatctcttgtacaacgtggagaagaaaagatatacttactactttgcttcaggtacacataagaaaacctcttttttaaaaaaatttttatttttttacataatagagacaggggctcgctgtagcttccaggctggcctcaaactcctgggctcaagcaatcctcctgtcttggcctcccaaagtgttgggatttcaggtatgagacaccacacctgcccatttttgtttggttttttaatgggcaggttcttgctctcccaggctggagtgcagtggtgtaatcacagctcactgcagtctcgaactcctggactcaagcagtcctcccacctcagcctcctaaagcactgggattacaggcttgaggcactgcacctggccctgaccattttttaaaaaggttaggcttagtgcaaagtttaaaattatatgattcttaaaatactgaattagtttctaaactaaactagaggtataggtggacctgcttgaggtatctttgtttttatggaacatttttattacatgcctttataatttttcattgttcacaccctgtactgaaacctttttctcaaataccaactcttggctatgttaaatttgtagactttaaaagatgttatctaaattaatggtttaaatatacaaattgaaaatattttctttttagtggcaattttaaaagcaggccttaatatgggacctgcttttaaagtaaaatatgtggtactatgaattactaaattgctatataccatgtaatagtgagtatagctaatatttagtatgccttttaaaaattttggactgcttttcggttttaacaaattctccacatgtgaactactcaagaaattttccctttttaattgcctctatagcactcataagagctagggcattaggataaactagaatattttatgtttatgaatacttgtataaacttaaaagtgttttgatttcccacaatttcccaaaggaatgtttatttattaagagttgtgttgataatttaactgttacaatttcagcagttgaattcagtgaacactggttgaggagtgcctattttctaagcactgggtgtaagaagaaaagacacttgcaaaggaagagctaagattaacataatttctttggtttttctattgcttgttattattatgtaaaaactgggtggcagttcacaaggaagattgttgtaacagaagagtgacaaccaatagttttttgatcattaaatcaaattttgtaaacagtggcaggagcgtggacttaaaacaaggcttgcttatttggttttgtcaaagttttacgaaaatatatgatatatatttatactaaaactatataatccttagatttaggaaagcaatcagttaatgtctttagcacactaaagcagtattaaacacaggtacaagttggaaattgtagaaaactgaaagaaaacaagacaaaatgtctatggtagggaataaaagagtttaagatattatgtaaaattatgtgtattttcttctcttttacataaattgtttgtgaaaagtgtgctcaacttttttacaagagtgatattaacttggatttatttttcaatataatttggagaccctttgttatccaaataaaattgatgagtttctgtgcctgtaaaaaaaaaaaaaaaaaaaagaaaagaaaagaccctgttgcttgccccaaaaagcttgtggggggtggtaagttctcacgagatttatttatctgagcaacattggggactgagggaacatctgaaagctaccatcttgaaaatttttgaggaagtgtttctgaaatatttaaaaatacttaagtcagtcattttgaacaaaagaaattgatacaataagtttttttttttaaggatgattgtctaattttgtaatatgttgttttttaaaaacctgtctgatggtgttttatacatttctaactttttacctgagttatctctttagtcttttggaaaataccctacacaatactaacctttaacctttataaggttgtaaggtataataaactgcttatttttttacatacttcatatcaagcattttgcagtccaattatatagttgaggatggtgtattttgatatgtatgaagttaatattttcaagtaagcaatcagtctactaccatcagattataagcttttttgtaataataggtacataaaatgtgtatgaaaaatctacaataaacatgtttatctgata

SEQ ID NO: 403089 - DNA, 3363 bp, Homo sapiens
  misc_feature (3363)..(3363): n is a, c, g, or t
cggggtcctggaggcctctgggcgcgtgcgcgggcggtcgctacctgcggccgagccagggagcgagagggcgcagagggcagcgggcttgggcagcatgaggcccggaggggagcggcccgtggaagggggcgcgtgcaatggccgctccgagctggagctactgaagctgcgctcggcggagtgcatcgacgaggcggccgagcggctgggggccctgagccgcgcgatctggagccagcccgagctggcctacgaggagcaccatgcccaccgcgtgctgacgcacttcttcgagcgggagccgcccgcggcctcctgggcagtgcagccgcactaccagctgcccacggccttccgcgccgagtgggagccgccggaggcccgggcaccgagcgccacgccacgcccgctgcacctgggcttcctctgcgagtacgacggctgctgcccggcatcggccacgcctgcggccacaacctcatcgctgaggtcgtgggctggcggccgcgctgggcgtgaggggggccttagagggcctccccaggccgcctccgcccgtgaaggtagttgtcctgggaacccctgcagaagaagatggtggtggcaaaattgatttaattgaagcaggggcttttacaaatcttgatgttgtttttatggcccacccatcacaagagaatgctgcttatctaccagatatggctgaacatgatgtgactgtgaaatactatggaaaagcatctcattctgcttcttatccctgggaaggattaaatgcattagatgctgctgtgctggcctataacaatctgtctgtgttcagacagcaaatgaaaccaacctggagagttcatggtataataaaaaatggtggtgtaaaacccaatatcattccctcttattctgaattaatctattacttccgtgcaccctcaatgaaagaacttcaagttttgaccaaaaaggcagaagattgcttcagagctgcagctttggcttcagggtgcacagtggaaattaaaggtggagcacatgattattacaatgttcttcccaataagagcctatggaaagcctatatggaaaatggaagaaagctaggaatagagttcatttcagaagatacaatgttgaatggcccttcaggatctacggattttggaaatgttagttttgtggttcctggaattcatccatattttcacattggatctaatgccttgaatcatactgaacagtacactgaagctgctgggtcacaggaagctcagttctacactctgcggacggccaaagctctggcaatgacggcactggatgttatttttaaaccagagttactggaaggaatcagagaggactttaaactgaaacttcaagaagaacagtttgtaaatgcagtagaataaaagacttaggggccacttataaatcaagaagacgtgatgatttttttcttttaatctcttttaatgaaggcatgcttgttttttaatcttaaaggagtaaaattctttttacctgataagtgaggacagggtgtggagaaaacatattaattacctcatatctaaagtgaaaatttttgcaaatccgtacttgataggattatgatattacaggagctggtatgtgatgccattctttctttttttttaccccgcaaccactcaccttcacagtagtgataccatttcttaacctggaggatacatggcatcatttttataaaatatgttagtaaacctttttgtaagccttaaatgttatgtgtatttttaaaagcttaagagatttcaaaccttatattcagaattgacacccatgagagtgttttgtggtatagggtggtaaacttgttctctaatcgtatattaattcctctaccagattgtatatttgaagccagtgtctttccttttttttttttaagatagagcctcgctctgttgcccaggctgaagtgtagtggcacaatctcggctcactgcaacctctgcctcccaggttcaagtgattctcctgcctcagcctaccaagtagctgggattacaggtgtgtggcaccatgcccagctaatttttgtatttttagtagagacggcatttcaccatgttggccaggctggtctcgaactcctgacctcaggtgatgcacctgcctcggcctcctaaagtgctgggattacaggcatgagccaccgcacccggcctgccagtgtctttttaatacacatgtgtgttggtatttttaaattgttacagtatctagcatattgcttactctgaatattcagtactttttgaataagcaaatattgcttccttgcttggaatcatcagagtttaaagtagcttcgtggatggaccatgatcctaagatgagttttaattttgtgtttacagtcatctcttgtacaacgtggagaagaaaagatatacttactactttgcttcaggtacacataagaaaacctcttttttaaaaaaatttttatttttttacataatagagacaggggctcgctgtagcttccaggctggcctcaaactcctgggctcaagcaatcctcctgtcttggcctcccaaagtgttgggatttcaggtatgagacaccacacctgcccatttttgtttggttttttaatgggcaggttcttgctctcccaggctggagtgcagtggtgtaatcacagctcactgcagtctcgaactcctggactcaagcagtcctcccacctcagcctcctaaagcactgggattacaggcttgaggcactgcacctggccctgaccattttttaaaaaggttaggcttagtgcaaagtttaaaattatatgattcttaaaatactgaattagtttctaaactaaactagaggtataggtggacctgcttgaggtatctttgtttttatggaacattttttaaaaaggttaggcttagtgcaaagtttaaaattatatgattcttaaaatactgaattagtttctaaactaaactagaggtataggtggacctgcttgaggtatctttgtttcatggaacatttttattacatgctttatatttttccttggtcacaccctggtactgaacttttttccaattacaatctgggtaagttatttgtgactttaagatgtttctaagtcatgggttattcaagtgaatgttctttttgggcattaagaggctagatggacgctagggaatgggccggatctatggtttcacgaagggcgagcacatggtgctaaatggcgtcggtaaaatccgtgaagaatgcttggtgtaaagggacgaaattgagcatcatgtgacacagatatatattgttcgtatcattatatatgcgn

SEQ ID NO: 403090 - DNA, 2746 bp, Homo sapiens
cggggtcctggaggcctctgggcgcgtgcgcgggcggtcgctacctgcggccgagccagggagcgagagggcgcagagggcagcgggcttgggcagcatgaggcccggaggggagcggcccgtggaagggggcgcgtgcaatggccgctccgagctggagctactgaagctgcgctcggcggagtgcatcgacgaggcggccgagcggctgggggccctgagccgcgcgatctggagccagcccgagctggcctacgaggagcaccatgcccaccgcgtgctgacgcacttcttcgagcgggagccgcccgcggcctcctgggcagtgcagccgcactaccagctgcccacggccttccgcgccgagtgggagccgccggaggcccgggcaccgagcgccacgccacgcccgctgcacctgggcttcctctgcgagtacgacggctgctgcccggcatcggccacgcctgcggccacaacctcatcgctgaggtcgtgggctggcggccgcgctgggcgtgaggggggccttagagggcctccccaggccgcctccgcccgtgaaggtagttgtcctgggaacccctgcagaagaagatggtggtggcaaaattgatttaattgaagcaggggcttttacaaatcttgatgttgtttttatggcccacccatcacaagagaatgctgcttatctaccagatatggctgaacatgatgtgactgtgaaatactatggaaaagcatctcattctgcttcttatccctgggaaggattaaatgcattagatgctgctgtgctggcctataacaatctgtctgtgttcagacagcaaatgaaaccaacctggagagttcatggtataataaaaaatggtggtgtaaaacccaatatcattccctcttattctgaattaatctattacttccgtgcaccctcaatgaaagaacttcaagttttgaccaaaaaggcagaagattgcttcagagctgcagctttggcttcagggtgcacagtggaaattaaaggtggagcacatgattattacaatgttcttcccaataagagcctatggaaagcctatatggaaaatggaagaaagctaggaatagagttcatttcagaagatacaatgttgaatggcccttcaggatctacggattttggaaatgttagttttgtggttcctggaattcatccatattttcacattggatctaatgccttgaatcatactgaacagtacactgaagctgctgggtcacaggaagctcagttctacactctgcggacggccaaagctctggcaatgacggcactggatgttatttttaaaccagagttactggaaggaatcagagaggactttaaactgaaacttcaagaagaacagtttgtaaatgcagtagaataaaagacttaggggccacttataaatcaagaagacgtgatgatttttttcttttaatctcttttaatgaaggcatgcttgttttttaatcttaaaggagtaaaattctttttacctgataagtgaggacagggtgtggagaaaacatattaattacctcatatctaaagtgaaaatttttgcaaatccgtacttgataggattatgatattacaggagctggtatgtgatgccattctttctttttttttaccccgcaaccactcaccttcacagtagtgataccatttcttaacctggaggatacatggcatcatttttataaaatatgttagtaaacctttttgtaagccttaaatgttatgtgtatttttaaaagcttaagagatttcaaaccttatattcagaattgacacccatgagagtgttttgtggtatagggtggtaaacttgttctctaatcgtatattaattcctctaccagattgtatatttgaagccagtgtctttccttttttttttttaagatagagcctcgctctgttgcccaggctgaagtgtagtggcacaatctcggctcactgcaacctctgcctcccaggttcaagtgattctcctgcctcagcctaccaagtagctgggattacaggtgtgtggcaccatgcccagctaatttttgtatttttagtagagacggcatttcaccatgttggccaggctggtctcgaactcctgacctcaggtgatgcacctgcctcggcctcctaaagtgctgggattacaggcatgagccaccgcacccggcctgccagtgtctttttaatacacatgtgtgttggtatttttaaattgttacagtatctagcatattgcttactctgaatattcagtactttttgaataagcaaatattgcttccttgcttggaatcatcagagtttaaagtagcttcgtggatggaccatgatcctaagatgagttttaattttgtgtttacagtcatctcttgtacaacgtggagaagaaaagatatacttactactttgcttcaggtacacataagaaaacctcttttttaaaaaaatttttatttttttacataatagagacaggggctcgctgtagcttccaggctggctaacacggtgaaaccccgtctctactaaaaatacaaaaaattagccgggcgtggtagcgggcgcctgtagtcccagctactcgggaggctgaggcaggagaatggcgtgaacccgggaggcggagcttgcagtgagccgagatcgcgccactgcactccagcctgggtgacagagcgagactccgtctcaaaaaaaaaa

SEQ ID NO: 403091 - DNA, 435 bp, Homo sapiens
gtataataaaaaatggtggtgtaaaacccaatatcattccctcttattctgaattaatctattacttccgtgcaccctcaatgaaagaacttcaagttttgaccaaaaaggcagaagattgcttcagagctgcagctttggcttcagggtgcacagtaagaacttttaaaagttaatctaagttacaatcagaggtatatatgtgggctagcactgttagattgaaatctaacttgactctcttatttggtgacatgttgaatatgcaaaatgaattggctgaatagttaatgtgaaagtctttaatttttacacgtttcattcctcagtgcttgcaatagggaagatgacaggtcatcttacttatatagtaattagaataattctgatacttctatgctagaatccctgcctttttacaagttatattcttcc

SEQ ID NO: 403092 - DNA, 4716 bp, Homo sapiens
cggggtcctggaggcctctgggcgcgtgcgcgggcggtcgctacctgcggccgagccagggagcgagagggcgcagagggcagcgggcttgggcagcatgaggcccggaggggagcggcccgtggaagggggcgcgtgcaatggccgctccgagctggagctactgaagctgcgctcggcggagtgcatcgacgaggcggccgagcggctgggggccctgagccgcgcgatctggagccagcccgagctggcctacgaggagcaccatgcccaccgcgtgctgacgcacttcttcgagcgggagccgcccgcggcctcctgggcagtgcagccgcactaccagctgcccacggccttccgcgccgagtgggagccgccggaggcccgggcaccgagcgccacgccacgcccgctgcacctgggcttcctctgcgagtacgacggctgctgcccggcatcggccacgcctgcggccacaacctcatcgctgaggtcgtgggctggcggccgcgctgggcgtgaggggggccttagagggcctccccaggccgcctccgcccgtgaaggtagttgtcctgggaacccctgcagaagaagatggtggtggcaaaattgatttaattgaagcaggggcttttacaaatcttgatgttgtttttatggcccacccatcacaagagaatgctgcttatctaccagatatggctgaacatgatgtgactgtgaaatactatggaaaagcatctcattctgcttcttatccctgggaaggattaaatgcattagatgctgctgtgctggcctataacaatctgtctgtgttcagacagcaaatgaaaccaacctggagagttcatggtataataaaaaatggtggtgtaaaacccaatatcattccctcttattctgaattaatctattacttccgtgcaccctcaatgaaagaacttcaagttttgaccaaaaaggcagaagattgcttcagagctgcagctttggcttcagggtgcacagtggaaattaaaggtggagcacatgattattacaatgttcttcccaataagagcctatggaaagcctatatggaaaatggaagaaagctaggaatagagttcatttcagaagatacaatgttgaatggcccttcaggatctacggattttggaaatgttagttttgtggttcctggaattcatccatattttcacattggatctaatgccttgaatcatactgaacagtacactgaagctgctgggtcacaggaagctcagttctacactctgcggacggccaaagctctggcaatgacggcactggatgttatttttaaaccagagttactggaaggaatcagagaggactttaaactgaaacttcaagaagaacagtttgtaaatgcagtagaataaaagacttaggggccacttataaatcaagaagacgtgatgatttttttcttttaatctcttttaatgaaggcatgcttgttttttaatcttaaaggagtaaaattctttttacctgataagtgaggacagggtgtggagaaaacatattaattacctcatatctaaagtgaaaatttttgcaaatccgtacttgataggattatgatattacaggagctggtatgtgatgccattctttctttttttttaccccgcaaccactcaccttcacagtagtgataccatttcttaacctggaggatacatggcatcatttttataaaatatgttagtaaacctttttgtaagccttaaatgttatgtgtatttttaaaagcttaagagatttcaaaccttatattcagaattgacacccatgagagtgttttgtggtatagggtggtaaacttgttctctaatcgtatattaattcctctaccagattgtatatttgaagccagtgtctttccttttttttttttaagatagagcctcgctctgttgcccaggctgaagtgtagtggcacaatctcggctcactgcaacctctgcctcccaggttcaagtgattctcctgcctcagcctaccaagtagctgggattacaggtgtgtggcaccatgcccagctaatttttgtatttttagtagagacggcatttcaccatgttggccaggctggtctcgaactcctgacctcaggtgatgcacctgcctcggcctcctaaagtgctgggattacaggcatgagccaccgcacccggcctgccagtgtctttttaatacacatgtgtgttggtatttttaaattgttacagtatctagcatattgcttactctgaatattcagtactttttgaataagcaaatattgcttccttgcttggaatcatcagagtttaaagtagcttcgtggatggaccatgatcctaagatgagttttaattttgtgtttacagtcatctcttgtacaacgtggagaagaaaagatatacttactactttgcttcaggtacacataagaaaacctcttttttaaaaaaatttttatttttttacataatagagacaggggctcgctgtagcttccaggctggcctcaaactcctgggctcaagcaatcctcctgtcttggcctcccaaagtgttgggatttcaggtatgagacaccacacctgcccatttttgtttggttttttaatgggcaggttcttgctctcccaggctggagtgcagtggtgtaatcacagctcactgcagtctcgaactcctggactcaagcagtcctcccacctcagcctcctaaagcactgggattacaggcttgaggcactgcacctggccctgaccattttttaaaaaggttaggcttagtgcaaagtttaaaattatatgattcttaaaatactgaattagtttctaaactaaactagaggtataggtggacctgcttgaggtatctttgtttttatggaacatttttattacatgcctttataatttttcattgttcacaccctgtactgaaacctttttctcaaataccaactcttggctatgttaaatttgtagactttaaaagatgttatctaaattaatggtttaaatatacaaattgaaaatattttctttttagtggcaattttaaaagcaggccttaatatgggacctgcttttaaagtaaaatatgtggtactatgaattactaaattgctatataccatgtaatagtgagtatagctaatatttagtatgccttttaaaaattttggactgcttttcggttttaacaaattctccacatgtgaactactcaagaaattttccctttttaattgcctctatagcactcataagagctagggcattaggataaactagaatattttatgtttatgaatacttgtataaacttaaaagtgttttgatttcccacaatttcccaaaggaatgtttatttattaagagttgtgttgataatttaactgttacaatttcagcagttgaattcagtgaacactggttgaggagtgcctattttctaagcactgggtgtaagaagaaaagacacttgcaaaggaagagctaagattaacataatttctttggtttttctattgcttgttattattatgtaaaaactgggtggcagttcacaaggaagattgttgtaacagaagagtgacaaccaatagttttttgatcattaaatcaaattttgtaaacagtggcaggagcgtggacttaaaacaaggcttgcttatttggttttgtcaaagttttacgaaaatatatgatatatatttatactaaaactatataatccttagatttaggaaagcaatcagttaatgtctttagcacactaaagcagtattaaacacaggtacaagttggaaattgtagaaaactgaaagaaaacaagacaaaatgtctatggtagggaataaaagagtttaagatattatgtaaaattatgtgtattttcttctcttttacataaattgtttgtgaaaagtgtgctcaacttttttacaagagtgatattaacttggatttatttttcaatataatttggagaccctttgttatccaaataaaattgatgagtttctgtgcctgtaaaaaaaaaaaaaaaaaaaagaaaagaaaagaccctgttgcttgccccaaaaagcttgtggggggtggtaagttctcacgagatttatttatctgagcaacattggggactgagggaacatctgaaagctaccatcttgaaaatttttgaggaagtgtttctgaaatatttaaaaatacttaagtcagtcattttgaacaaaagaaattgatacaataagtttttttttttaaggatgattgtctaattttgtaatatgttgttttttaaaaacctgtctgatggtgttttatacatttctaactttttacctgagttatctctttagtcttttggaaaataccctacacaatactaacctttaaaactatcaaatttttgttataagataaatgttatctttgtactagatagcaaccctttataaggttgtaaggtataataaactgcttatttttttacatacttcatatcaagcattttgcagtccaattatatagttgaggatggtgtattttgatatgtatgaagttaatattttcaagtaagcaatcagtctactaccatcagattataagcttttttgtaataataggtacataaaatgtgtatgaaaaatctacaataaacatgtttatctgata

SEQ ID NO: 403093 - DNA, 4916 bp, Homo sapiens
cggggtcctggaggcctctgggcgcgtgcgcgggcggtcgctacctgcggccgagccagggagcgagagggcgcagagggcagcgggcttgggcagcatgaggcccggaggggagcggcccgtggaagggggcgcgtgcaatggccgctccgagctggagctactgaagctgcgctcggcggagtgcatcgacgaggcggccgagcggctgggggccctgagccgcgcgatctggagccagcccgagctggcctacgaggagcaccatgcccaccgcgtgctgacgcacttcttcgagcgggagccgcccgcggcctcctgggcagtgcagccgcactaccagctgcccacggccttccgcgccgagtgggagccgccggaggcccgggcaccgagcgccacgccacgcccgctgcacctgggcttcctctgcgagtacgacggctgctgcccggcatcggccacgcctgcggccacaacctcatcgctgaggtcgtgggctggcggccgcgctgggcgtgaggggggccttagagggcctccccaggccgcctccgcccgtgaaggtagttgtcctgggaacccctgcagaagaagatggtggtggcaaaattgatttaattgaagcaggggcttttacaaatcttgatgttgtttttatggcccacccatcacaagagaatgctgcttatctaccagatatggctgaacatgatgtgactgtgaaatactatggaaaagcatctcattctgcttcttatccctgggaaggattaaatgcattagatgctgctgtgctggcctataacaatctgtctgtgttcagacagcaaatgaaaccaacctggagagttcatggtataataaaaaatggtggtgtaaaacccaatatcattccctcttattctgaattaatctattacttccgtgcaccctcaatgaaagaacttcaagttttgaccaaaaaggcagaagattgcttcagagctgcagctttggcttcagggtgcacagtggaaattaaaggtggagcacatgattattacaatgttcttcccaataagagcctatggaaagcctatatggaaaatggaagaaagctaggaatagagttcatttcagaagatacaatgttgaatggcccttcaggatctacggattttggaaatgttagttttgtggttcctggaattcatccatattttcacattggatctaatgccttgaatcatactgaacagtacactgaagctgctgggtcacaggaagctcagttctacactctgcggacggccaaagctctggcaatgacggcactggatgttatttttaaaccagagttactggaaggaatcagagaggactttaaactgaaacttcaagaagaacagtttgtaaatgcagtagaataaaagacttaggggccacttataaatcaagaagacgtgatgatttttttcttttaatctcttttaatgaaggcatgcttgttttttaatcttaaaggagtaaaattctttttacctgataagtgaggacagggtgtggagaaaacatattaattacctcatatctaaagtgaaaatttttgcaaatccgtacttgataggattatgatattacaggagctggtatgtgatgccattctttctttttttttaccccgcaaccactcaccttcacagtagtgataccatttcttaacctggaggatacatggcatcatttttataaaatatgttagtaaacctttttgtaagccttaaatgttatgtgtatttttaaaagcttaagagatttcaaaccttatattcagaattgacacccatgagagtgttttgtggtatagggtggtaaacttgttctctaatcgtatattaattcctctaccagattgtatatttgaagccagtgtctttccttttttttttttaagatagagcctcgctctgttgcccaggctgaagtgtagtggcacaatctcggctcactgcaacctctgcctcccaggttcaagtgattctcctgcctcagcctaccaagtagctgggattacaggtgtgtggcaccatgcccagctaatttttgtatttttagtagagacggcatttcaccatgttggccaggctggtctcgaactcctgacctcaggtgatgcacctgcctcggcctcctaaagtgctgggattacaggcatgagccaccgcacccggcctgccagtgtctttttaatacacatgtgtgttggtatttttaaattgttacagtatctagcatattgcttactctgaatattcagtactttttgaataagcaaatattgcttccttgcttggaatcatcagagtttaaagtagcttcgtggatggaccatgatcctaagatgagttttaattttgtgtttacagtcatctcttgtacaacgtggagaagaaaagatatacttactactttgcttcaggtacacataagaaaacctcttttttaaaaaaatttttatttttttacataatagagacaggggctcgctgtagcttccaggctggcctcaaactcctgggctcaagcaatcctcctgtcttggcctcccaaagtgttgggatttcaggtatgagacaccacacctgcccatttttgtttggttttttaatgggcaggttcttgctctcccaggctggagtgcagtggtgtaatcacagctcactgcagtctcgaactcctggactcaagcagtcctcccacctcagcctcctaaagcactgggattacaggcttgaggcactgcacctggccctgaccattttttaaaaaggttaggcttagtgcaaagtttaaaattatatgattcttaaaatactgaattagtttctaaactaaactagaggtataggtggacctgcttgaggtatctttgtttttatggaacatttttattacatgcctttataatttttcattgttcacaccctgtactgaaacctttttctcaaataccaactcttggctatgttaaatttgtagactttaaaagatgttatctaaattaatggtttaaatatacaaattgaaaatattttctttttagtggcaattttaaaagcaggccttaatatgggacctgcttttaaagtaaaatatgtggtactatgaattactaaattgctatataccatgtaatagtgagtatagctaatatttagtatgccttttaaaaattttggactgcttttcggttttaacaaattctccacatgtgaactactcaagaaattttccctttttaattgcctctatagcactcataagagctagggcattaggataaactagaatattttatgtttatgaatacttgtataaacttaaaagtgttttgatttcccacaatttcccaaaggaatgtttatttattaagagttgtgttgataatttaactgttacaatttcagcagttgaattcagtgaacactggttgaggagtgcctattttctaagcactgggtgtaagaagaaaagacacttgcaaaggaagagctaagattaacataatttctttggtttttctattgcttgttattattatgtaaaaactgggtggcagttcacaaggaagattgttgtaacagaagagtgacaaccaatagttttttgatcattaaatcaaattttgtaaacagtggcaggagcgtggacttaaaacaaggcttgcttatttggttttgtcaaagttttacgaaaatatatgatatatatttatactaaaactatataatccttagatttaggaaagcaatcagttaatgtctttagcacactaaagcagtattaaacacaggtacaagttggaaattgtagaaaactgaaagaaaacaagacaaaatgtctatggtagggaataaaagagtttaagatattatgtaaaattatgtgtattttcttctcttttacataaattgtttgtgaaaagtgtgctcaacttttttacaagagtgatattaacttggatttatttttcaatataatttggagaccctttgttatccaaataaaattgatgagtttctgtgcctgtaaaaaaaaaaaaaaaaaaaagaaaagaaaagaccctgttgcttgccccaaaaagcttgtggggggtggtaagttctcacgagatttatttatctgagcaacattggggactgagggaacatctgaaagctaccatcttgaaaatttttgaggaagtgtttctgaaatatttaaaaatacttaagtcagtcattttgaacaaaagaaattgatacaataagtttttttttttaaggatgattgtctaattttgtaatatgttgttttttaaaaacctgtctgatggtgttttatacatttctaactttttacctgagttatctctttagtcttttggaaaataccctacacaatactaacctttaaaactatcaaatttttgttataagataaatgttatctttgtactagatagcaaccctttataaggttgtaaggtataataaactgcttatttttttacatacttcatatcaagcattttgcagtccaattatatagttgaggatggtgtattttgatatgtatgaagttaatattttcaagtaagcaatcagtctactaccatcagattataagcttttttgtaataataggtacataaaatgtgtatgaaaaatctacaataaacatgtttatctgataaaaatctactacttttctacccttctttattattttatcttctctttttatatttatctctttctacttatttcattttctattattattcaataatatttgtggcgcccctcttctactctcttttttatatttaatatttatttgtttgcccctaattagatctctttgttcatatcccctttttgggcgggtttcat

SEQ ID NO: 403094 - DNA, 4072 bp, Homo sapiens
cggggtcctggaggcctctgggcgcgtgcgcgggcggtcgctacctgcggccgagccagggagcgagagggcgcagagggcagcgggcttgggcagcatgaggcccggaggggagcggcccgtggaagggggcgcgtgcaatggccgctccgagctggagctactgaagctgcgctcggcggagtgcatcgacgaggcggccgagcggctgggggccctgagccgcgcgatctggagccagcccgagctggcctacgaggagcaccatgcccaccgcgtgctgacgcacttcttcgagcgggagccgcccgcggcctcctgggcagtgcagccgcactaccagctgcccacggccttccgcgccgagtgggagccgccggaggcccgggcaccgagcgccacgccacgcccgctgcacctgggcttcctctgcgagtacgacggctgctgcccggcatcggccacgcctgcggccacaacctcatcgctgaggtcgtgggctggcggccgcgctgggcgtgaggggggccttagagggcctccccaggccgcctccgcccgtgaaggtagttgtcctgggaacccctgcagaagaagatggtggtggcaaaattgatttaattgaagcaggggcttttacaaatcttgatgttgtttttatggcccacccatcacaagagaatgctgcttatctaccagatatggctgaacatgatgtgactgtgaaatactatggaaaagcatctcattctgcttcttatccctgggaaggattaaatgcattagatgctgctgtgctggcctataacaatctgtctgtgttcagacagcaaatgaaaccaacctggagagttcatggtataataaaaaatggtggtgtaaaacccaatatcattccctcttattctgaattaatctattacttccgtgcaccctcaatgaaagaacttcaagttttgaccaaaaaggcagaagattgcttcagagctgcagctttggcttcagggtgcacagtggaaattaaaggtggagcacatgattattacaatgttcttcccaataagagcctatggaaagcctatatggaaaatggaagaaagctaggaatagagttcatttcagaagatacaatgttgaatggcccttcaggatctacggattttggaaatgttagttttgtggttcctggaattcatccatattttcacattggatctaatgccttgaatcatactgaacagtacactgaagctgctgggtcacaggaagctcagttctacactctgcggacggccaaagctctggcaatgacggcactggatgttatttttaaaccagagttactggaaggaatcagagaggactttaaactgaaacttcaagaagaacagtttgtaaatgcagtagaataaaagacttaggggccacttataaatcaagaagacgtgatgatttttttcttttaatctcttttaatgaaggcatgcttgttttttaatcttaaaggagtaaaattctttttacctgataagtgaggacagggtgtggagaaaacatattaattacctcatatctaaagtgaaaatttttgcaaatccgtacttgataggattatgatattacaggagctggtatgtgatgccattctttctttttttttaccccgcaaccactcaccttcacagtagtgataccatttcttaacctggaggatacatggcatcatttttataaaatatgttagtaaacctttttgtaagccttaaatgttatgtgtatttttaaaagcttaagagatttcaaaccttatattcagaattgacacccatgagagtgttttgtggtatagggtggtaaacttgttctctaatcgtatattaattcctctaccagattgtatatttgaagccagtgtctttccttttttttttttaagatagagcctcgctctgttgcccaggctgaagtgtagtggcacaatctcggctcactgcaacctctgcctcccaggttcaagtgattctcctgcctcagcctaccaagtagctgggattacaggtgtgtggcaccatgcccagctaatttttgtatttttagtagagacggcatttcaccatgttggccaggctggtctcgaactcctgacctcaggtgatgcacctgcctcggcctcctaaagtgctgggattacaggcatgagccaccgcacccggcctgccagtgtctttttaatacacatgtgtgttggtatttttaaattgttacagtatctagcatattgcttactctgaatattcagtactttttgaataagcaaatattgcttccttgcttggaatcatcagagtttaaagtagcttcgtggatggaccatgatcctaagatgagttttaattttgtgtttacagtcatctcttgtacaacgtggagaagaaaagatatacttactactttgcttcaggtacacataagaaaacctcttttttaaaaaaatttttatttttttacataatagagacaggggctcgctgtagcttccaggctggcctcaaactcctgggctcaagcaatcctcctgtcttggcctcccaaagtgttgggatttcaggtatgagacaccacacctgcccatttttgtttggttttttaatgggcaggttcttgctctcccaggctggagtgcagtggtgtaatcacagctcactgcagtctcgaactcctggactcaagcagtcctcccacctcagcctcctaaagcactgggattacaggcttgaggcactgcacctggccctgaccattttttaaaaaggttaggcttagtgcaaagtttaaaattatatgattcttaaaatactgaattagtttctaaactaaactagaggtataggtggacctgcttgaggtatctttgtttttatggaacatttttattacatgcctttataatttttcattgttcacaccctgtactgaaacctttttctcaaataccaactcttggctatgttaaatttgtagactttaaaagatgttatctaaattaatggtttaaatatacaaattgaaaatattttctttttagtggcaattttaaaagcaggccttaatatgggacctgcttttaaagtaaaatatgtggtactatgaattactaaattgctatataccatgtaatagtgagtatagctaatatttagtatgccttttaaaaattttggactgcttttcggttttaacaaattctccacatgtgaactactcaagaaattttccctttttaattgcctctatagcactcataagagctagggcattaggataaactagaatattttatgtttatgaatacttgtataaacttaaaagtgttttgatttcccacaatttcccaaaggaatgtttatttattaagagttgtgttgataatttaactgttacaatttcagcagttgaattcagtgaacactggttgaggagtgcctattttctaagcactgggtgtaagaagaaaagacacttgcaaaggaagagctaagattaacataatttctttggtttttctattgcttgttattattatgtaaaaactgggtggcagttcacaaggaagattgttgtaacagaagagtgacaaccaatagttttttgatcattaaatcaaattttgtaaacagtggcaggagcgtggacttaaaacaaggcttgcttatttggttttgtcaaagttttacgaaaatatatgatatatatttatactaaaactatataatccttagatttaggaaagcaatcagttaatgtctttagcacactaaagcagtattaaacacaggtacaagttggaaattgtagaaaactgaaagaaaacaagacaaaatgtctatggtagggaataaaagagtttaagatattatgtaaaattatgtgtattttcttctcttttacataaattgtttgtgaaaagtgtgctcaacttttttacaagagtgatattaacttggatttatttttcaatataatttggagaccctttgttatccaaataaaattgatgagtttctgtgcctgt

SEQ ID NO: 403095 - DNA, 1180 bp, Homo sapiens
cggggtcctggaggcctctgggcgcgtgcgcgggcggtcgctacctgcggccgagccagggagcgagagggcgcagagggcagcgggcttgggcagcatgaggcccggaggggagcggcccgtggaagggggcgcgtgcaatggccgctccgagctggagctactgaagctgcgctcggcggagtgcatcgacgaggcggccgagcggctgggggccctgagccgcgcgatctggagccagcccgagctggcctacgaggagcaccatgcccaccgcgtgctgacgcacttcttcgagcgggagccgcccgcggcctcctgggcagtgcagccgcactaccagctgcccacggccttccgcgccgagtgggagccgccggaggcccgggcaccgagcgccacgccacgcccgctgcacctgggcttcctctgcgagtacgacggctgctgcccggcatcggccacgcctgcggccacaacctcatcgctgaggtcgtgggctggcggccgcgctgggcgtgaggggggccttagagggcctccccaggccgcctccgcccgtgaaggtagttgtcctgggaacccctgcagaagaagatggtggtaagttctcacgagatttatttatctgagcaacattggggactgagggaacatctgaaagctaccatcttgaaaatttttgaggaagtgtttctgaaatatttaaaaatacttaagtcagtcattttgaacaaaagaaattgatacaataagtttttttttttaaggatgattgtctaattttgtaatatgttgttttttaaaaacctgtctgatggtgttttatacatttctaactttttacctgagttatctctttagtcttttggaaaataccctacacaatactaacctttaaaactatcaaatttttgttataagataaatgttatctttgtactagatagcaaccctttataaggttgtaaggtataataaactgcttatttttttacatacttcatatcaagcattttgcagtccaattatatagttgaggatggtgtattttgatatgtatgaagttaatattttcaagtaagcaatcagtctactaccatcagattataagcttttttgtaataataggtacataaaatgtgtatgaaaaatctacaataaacatgtttatctgata

SEQ ID NO: 403096 - DNA, 401 bp, Homo sapiens
aaacaaaaaaagctaagagagacacattatatccaatgtatgttataatacttatttaaagggtatcataatattttgagtttggggaaagttcaatcctaatgttaatgtttatgaggaaatgtgtaatattcatgcatttctatgcaattctctacttgccacaagccaaagaagaaacaatcaatttacaaataacacagaggcagtaaatttgttggtggtgatgctagctaggcctattgtaattccataattctgtagttttttttcaacctgcaagtggtgaattgctaatgttgctgggagccaaagatatggtgatatgtgaaagtgtccaggcagcgcttacattatgtaaggcttggaggtattttgatgtcagtaaaatactttatggg

SEQ ID NO: 403097 - DNA, 454 bp, Homo sapiens
ccgagatgaaaccatctaggcagtgagggcagcgcgttagcagagaggtgaaggatgaagagagagcaccacatgcacatccgagatgtaaccatctaggcagtgagggcagcatgttagcagagaggtgaaggatgaagagagagcaccacatggacatccgagatgtaaccatctaggcagtgagggcagcatgttagcagagaggtgaaggatgaagagagagcaccacatggacatccgagatgaaaccatctaggcagtgagggcagcatgttagcagagaggcgaaggatgaagacagaacaccacatgcacatccgagatgaaaccatctaggcagtgagggcagcatgtcctcactgcacagtcgagtaagcacagtcgagtaagactgctgccaatttctttctttttttttttttttacagatacaatcttctctgacattgat

SEQ ID NO: 403098 - DNA, 627 bp, Homo sapiens
tgtaaagcacttaaaacaacgcctggtacttggtaggtgctattctacatagctattacttccaggtgtaacttatggatatggataatatgaaggagcaaatgctgatagcagagactgttccagcgagatataaaaggtcaattcgatttagttggtattagaagaccgctgtctctttgaagcatggaatgagccacaaaaaagagccaaccaggggtttggccaacgaaactcatctactttccagatcctcatcaagtgttttcaattttcctgcttaaactaaatttccagagcaccacatcaaaacatattcaaaatttaaatataaatgatttggagactgtctaattttacattttccacaccttatttccccttcactagtttgagtaatgaaaaatcgattaaaattgaaagccttagttggaaggcacaaaaagaataagcaataaagagagaataaaaactaaatcatcatataactcaacagagaaatgtagaattgaaccctgaaatacgtgaaaaaccgggacgttgtctgagggttaaaagtcactacaattagtacaatacactatttatttatttttcacaggtacttgatgagaaggaaaacaaaaa

SEQ ID NO: 403099 - DNA, 440 bp, Homo sapiens
ggctttctcacaggcagaccagggcagcctctggtccctgcacaatctcgcctccgatgcaaggtgggagaaggcagccacctcccgaggggggccacagagggggttctgatccagctgtgagctctcacccccagcccacagcgactggtagccaggtaggcagaatggcaggcagagcggccactggggaactgatccagcaggacctgaagcagggagacagcacacgggcgtccacctaacgtggccagcccttgtgtggacaaacagctgagaaaaggcattactaacatggacgtgaagaaagtcgcctcggtttttgggtgtgatgtggtgttggtgtcgtgttgttgcgaaggccctgtctgaaagtcgcctcggttttctggtgtgatgtggtgttggtgcgtgttgttgcgaaggccctgtgtgaaagt

SEQ ID NO: 403100 - DNA, 617 bp, Homo sapiens
cagatcatcaggcattagattctcataaggagtgtgcagactcaatccctcgcatacacagttcacagtagggtttgtgctccaatgagaatctaatgctgctgctgatctgacagtaggcagagctcaggcagtaatgcttgcttgtccactgttcatctcctcccgtacagctaagttcctaacaggtaccagtgtctgaagcctggggactggcggctgctggtcaaggccacattagtttattgttaagtgcaaggtttctggtaacagaaataaagaattcaattgattcatcatcaagaccaaatatatttactaaagatctaccttaaattcattttttagcaggtagtatggcattgtggttaagaatttacatttgtgaacatttaccagctgatgaccgaggtgagcttctgtttcctcctgcataaacttgagattataaaaatcccctagttggctgggcacagtggctcacacctgtaatcccagcactttgggaggccgaggcaggcatcacgaggtcaggagatcaagaccatcctggccaacagggtgaaaccccgtctctactaaagatacaaaaattagctgggcgtggtgttgcacac

SEQ ID NO: 403101 - DNA, 154 bp, Homo sapiens
atccatttgccaaaaaatctactcaacttggagaatggccagcatgataaattgccaattgtagtattacttagtcaccaaacattgtttctgtttaccagtataaaatctgtagcaatttatgttgaatgagacagttcaccagccactgaag

SEQ ID NO: 403102 - DNA, 684 bp, Homo sapiens
cagatgtaattggtgccctctgtaattccatgcatgccagcccaacttttaactgtccaagatttcagggagccctctgccattggatgtggtggtctgaaaatgctagagaattaatgtccctttaatatttaaagttatcagctttaaatactccagcacactttccccctagaaagagcaaattctgattcatgtaatctacattggttcccagaattatccagacaattaagatctactcagagtggtaacttgtttgataatgcatgatttatcagttctcttctttatttctctaagtctttcctaggatcactttccaaataaaactttggtatttgaaaaattaggaaagagaagttggttgttagaaattagaaataaaaattccactttaaaaaagaactaaataatgaatgaagttggacatgcatggacctctgcatctaagactatgatgataatatgtcatgaatcaaggatcatgaataatccaattatatgaacctatggtccaaaataaaaggctcagaatatccagctccatttcttcccattctttgcttacccagaaatctgctagttatagttgagttctttgggtggacaaaaccccttagaaaattacaacttcaccatccaaggccaagcacagtgactcacacctgtaatcccactact

SEQ ID NO: 403103 - DNA, 306 bp, Homo sapiens
gtaagggcctaaggagtagcctggagctatgtgttttttgttgggaagtatatttttaaatacaatattcaaaattttactttcaggtttatgccatggggattttaagaattctttccccaccattgttattacaacacaacctcctacattaactgctcttaaatttacagttttagccaatatgacttattttacagacagaatatttgcttatactgtgaatgggggatctcgagatcccccatacagagtacgtgcaataccattcaggacataggcatgggcaaggacttcatgtctaaa

SEQ ID NO: 403104 - DNA, 652 bp, Homo sapiens
ctcagcctgcccagcttaataaactaagattctagctaccatgtcacttgtgcagatggcacgggctcccagggttgtctctagaatgatgacaccccttcaccaagcactgtggaccttctttagaattaaagagggggctggacacagtgactgacgcctgtaataccagcactttgggaggaggaagtggaaggattgcttgaggccaggagtttgagaccagcctgggcaaaatactgcctttgcaaaattatgactgagacagtggaaagagatctaacctgactccatcttgcttctaacctccaagctatccttgttcattcctgggtggaggctgaactaacttcgggagaaacttatagtttatagtttaaaacaaagatgataacagccctttcccaaaacaaacctccttgcctggggactaggctgcctttgtaggactaagaaattagccacaagattagaaattatggtttaggattcatgcagctggaggttacaaaatcttgaccctccctaaactgctcttcagatcagtgtttgagatattttgcagaccctgcacttgatggatcagctgggaccacccagatcgataaactggctcatctgatcttgtgacccccccccccccacacctaag

SEQ ID NO: 403105 - DNA, 227 bp, Homo sapiens
taattagaggttagcaggtgtttattattaacaatagtttcagtattcatttttattaagttctgtgcacattaatcccttccagccagcaggcctctagttagtctaggcctctgatttcagcttgaatatacactttgctcttttggagaaacagagacctctgcctaagtgaaacaggacatgtaaagggaggaggaataccaggctgagatttcatacctttg

SEQ ID NO: 403106 - DNA, 151 bp, Homo sapiens
ccatttccactgtcctctcttctttcacagccattttcttcctctttctttgctcattgttttttcattattaggacttggctttttaggtcaagactcctaataaaaggactcctttcttctgctgttgccttaccagtcacatatgtgg

SEQ ID NO: 403107 - DNA, 676 bp, Homo sapiens
gatctgaggccagatggggccaagcctagaaagctgggtctttgccaggtgttgagcagcgtgacccagacacagtctgagggagctgctttctccacccagcacaagctggatgagcgtgcaccaggatgcccatcccagctccccaggccagagctactgccatgactgctgaccgggggctgatctctcacttgccaaggcatcaacaaccactgtgacccaaatatcagccaggggtagagtccagtgggaaaagtttgaaggatttcctcaggtgtaaggaatttgcattctaaatgagtaaccaacacccaagaatgagtacctagcaacaggctgtatttgaaggaagtgatgtggaaattaggactctgatggaacttgagaaatgggcaagatgacttctggctgggccagcttatctgaccaccaaaaacaggccatttaggtaatgcatcataaactcaaatatacaagaattgggtttgttatgaaattgggtaaaacaagtgagacaggctcatgtcacccagggggatggcagggacaacctttgacttgggggcttcccggtcctatttcccagaagctgcctgcagacccttgcaacacagcaaggccacagtaatgtttactgtttctcttctgagctcaactgttatcatccaaggga

SEQ ID NO: 403108 - DNA, 640 bp, Homo sapiens
tctgctaagaatacaaaaaaaaaaagagctgggcgtggtggcaggcgcctatagtcccagccacttgggaggctgaggcaggagaatggtgtgaaaccgggaggcagagcttgcagtgagccgagattgtgccactgcactctagcctgggtgacagagcaagactccgtctcaaaacaaacaaacaaacaaaaaaaccccacaaaaccttgtgggtgtctgagacaagaacatttcaggcaggaataacagtaagtccgaaggccccaaggtaggaactgcatgcatgatgccgtggagaacagtcaagaggtcattatagctggagtaaagtgagtgaaagagaatggtaagaaataaggttggagagaccgggtgcggtgggctcatgcctgtaatcccagcactttgggaggccgagatggatggatcacctgaggtcaggagttcaagaccagcctggccaacatggtgaaaccctgtctctgcaaaaaatacaaaaattagccaggtgtggtggcaggtgcctgtaatcccagctacttgggaagctgaggcaggagaaccacttgaacccaggaggcagagattgcagtgagccgctccagcctgggtgagagagtgagactccatctcaaaa

SEQ ID NO: 403109 - DNA, 499 bp, Homo sapiens
aagttgggggccttctgtatgggtaatggtcagcccacaagaaagaagccagtaactttccctgaacacatccttttggaaaataggaacaaagattcatgctcaaaactcacctccttctggtagccttttctgactaaccccaagccagtgacaccaaaacagacacatggtgattcatagccagggctttaggcatcagataaagtgagattcaaatcttaattctattatcagcagtgtattctcaggataagtcacttaaacctttctaagcctgtattctcatttatgaaatcaaaatatcatctcttggggttgatttgaagagtaaatgagattatgtataccaattagtaaactcagtgagtgctaaggcacatggtaaatgctcaataaatggtactcctttttatttgtgaatgaaccaaccgcctcctctagctactatttcaaaaatttcttccatactgttgtttctgagtcaaatacttttcca

SEQ ID NO: 403110 - DNA, 792 bp, Homo sapiens
tcaaagaagcatcatcaaggtgaggctgcatcataaagtctcagccagcatcccataccttccttaatggggacgctgaacagaggttacatgagacatccacaattaaggtgggatagccccctcacagcaggtggggcccaaccccctgccctggcctctgggttgaggttgttgagacccagcctagagactccatctcttctagcaaagggcaggaagcagaggtccctcacccctgggctctaggacagtcatgtccctgtgtgagcttcccacactgcctacagttgctgccagcagcaatgaaatggattcttgaaaaaaaaatctcagcatataagatttgagaaaagaaaaataccctacacatcagggacccttgaaattatagcaataaatttatgattcattccctaggcataaaactactgtgttacagccactaccaatgccactgaatttcccagggtctaatgttgacctcaggctcgccagcaaaggaggaagaacataagagacctcaatatttagagggttttacatttcctatacaaaaaaagagcaaacgaagagtgaagagctagctgctacagtaaaagaggtaggattattggtcaatgtgtagcaaatcaaatgttaggtaatataggaattgtgggaaccttcctggtatcacatattcttaaatgcagcaagatcatagagaaaaagcatggatatcactcctggccttaaaatttaagtgggctccctttgtgtacaacaaaatcctaactccttcacaaacat

SEQ ID NO: 403111 - DNA, 240 bp, Homo sapiens
agttcatctgaggaggtggaaccttgctcaagcctaccaaggagaatgctgggcctgaaaaagtcaaatggtgtctccatagtaaccagtagggcctgaggtgtcaaagcaatgctgcggtataatagaaaaccccaggcctcttaactaactattggagtgggaggagatggcattgaataatacctgacttgcaaacctttcaaaggtggatgggtactcagattcatgattaaaatg

SEQ ID NO: 403112 - DNA, 442 bp, Homo sapiens
gccctgccaccagactcagccatttctatggacacatggcaggactggagtgacacgttctgatgtactttaaaagactgctctgtctgcttctggaaattggatcggaggggaacaaagtggaaccagagagactcgatcagaagctaataggaaagtaacaatggcaacctgagattcggggcaagggggtactgaattggagaatcaagcaagaccttcagagagctcagaagtgggctgaagatgagaaacggctcctaggtttctggtctaaacaaacaaatggaaggcataggccttcattcagatggggaagggatagtgatgctgagaaaacaccaatgaataccaatgatgaagtaacataactagttttaagctatactcagaaaacacaactaaactgagagatgatggcttttttttttttttttttttt

SEQ ID NO: 403113 - DNA, 225 bp, Homo sapiens
atttaactataccaatgagtaacataagatctggccttgttaatgccagaaagcctggttagacatacactctgtgtgtggtttttggggggatttgggaagggatagtgatgctgagaaaacaccaatgaataccaatgatgaagtaacataactagttttaagctatactcagaaaacacaactaaactgagagatgatggcttttttttttttttttttttt

SEQ ID NO: 403114 - DNA, 682 bp, Homo sapiens
gattgttcctgcccaacactgcctccctcgcctgtgggaacacctactagcttatttgggctgctcatcacacgagtgcttagcactgttggcatataattatatattatcttcttctggattgtagaattctgagagggaagaaagcaggtctaactgccttctgccacaagttgttccaaggctccccaccttgtccctgtgccctctactaagactgcatttgaagttacttcttcactggggctggtggggtctggcttctcagatactattcaccctacaggatctaccggctgccgtatcctacttcccctttctgtgtcacctgaacacttcaaaacctagactgtacatactgctacgaatagctgatttttaaatactttatacataatacataaattcatagtatttatgaatagtaatgtttgagcaccatgttaaacctaacatcatgttaacatagtaggcactatttatggcctggcacagagtaagcatttcataatgttagcagcaaactgctgggctctgtgttgagcattttgaattctttaattcattttatcctgtttacctgatgaggaatgagaaattagagtccccaagacaaaatctagttaagattgtatggtaagtggcagaactgatcggaaccttctagagtccctgttcttag

SEQ ID NO: 403115 - DNA, 368 bp, Homo sapiens
gaatcacttgaaccctggaggcagcggttgcagtgagccgagatcgcgccatgcactccagcctgtcaacaaagcgagactccgtctaaaaaaaaaaaaggaagaaataaaatcattgaggagaaaggctatctgcctgaatagtttctgttttttgtttttttaaattaaaagatagagttttgttctcccaggccggagtgaagtggcatgatgactcactccagccctgacctactaagctcacatgatcctcccatctcagtcccccgagtagctgagactgcaggtacacgccaccacgcccagctaatttttaaatcattttgtggagactcagtctccctgtgttgcccaggctcgtcttc

SEQ ID NO: 403116 - DNA, 344 bp, Homo sapiens
cctcgacttcctgagcttaagtgatcctctcgtctcagcctcttgagtagctgggactacaggcatgagccaccatacctggctgatttttcttttattttttgtagagatgggggtctcactgtgttgtccaggctggtcacaaactcctggccttgaacaatcctcccacctcagcctcccaaaatgctgggattacaggctacagccactgcatccagccccaagtcctttataatgggccaaagattctcatcttctgacactcttattataccagccacatgtcctgttacctttcaagaacagtggctcttttctggccctgatggagtcttttgcct

SEQ ID NO: 403117 - DNA, 454 bp, Homo sapiens
acatacttggctctaacaaatagtacagtcagttcatgaatcagtcttcatttattttcttcctggacacacattaagttgatgttctaggatgcaaatagataaatgacttctagtgtcatttctgaaatccagtcattatgactgcattcctactatagtctgaacacctcaaaatatttcagcaaatggccatgtcaatttcaacttctccatttctgacccaaacacagtcaaagcaggcagcattagtttctttttgacttaatgtgtatccccaaacactcaattttttacactccagtgttggctttataagacatataaacaatcccatacttgtcgtattttttcttacaccagacaaaaacagatcggtgataaagcacactgatgtttttacatttcacctaacataccaaaccgattttaatgcacatttcatgaatctcag

SEQ ID NO: 403118 - DNA, 229 bp, Homo sapiens
gttttatcctcaggactagactaagaaccaaatcaaacttaagttagaaagtggccttttacattatatgaacgacaagggtagagtttgcttttctcctaaattctcttttcttatgttttaggcccagcagaaaaggaaacaggtaattaatatttctgcatgcacaagccattatttctcatgtggtggtgtgatatttttaaagcactttgttgagacatgattg

SEQ ID NO: 403119 - DNA, 481 bp, Homo sapiens
ttaaaaaaatcactggcattcaaaaagggtacattggaggaggtaagagacttttctctagattagtagggatttgaaggatctgacaataagcacaatgtatgggcgttttttgtattttgattcaaataaagtagccgtaagaaataaactttgattcaaatggggaaatttgaatatggactatatattatactgatattgaggaattgttaattttgttacaatttacgttgttaaacatgctcttttttggagatgcatcaggaagcatgtataagggtataatgacatgatatctggaattttaaatgatggcaaaacgtataatgtacatagaaataaaatatatacacattttttatggaggaaaatatatatatatatagatatatatttgctgtttataaaagcacctctttgactcaacagctagcatatgggttacactgggataagtgttaacacagttagcccgcca

SEQ ID NO: 403120 - DNA, 151 bp, Homo sapiens
ctctgccctggcctcccagcctgggatggtcaccattctggatgctctcagttgaccacttggccaaggggaagagactcaaatcacagttgatgaggtctagaaactaccccaacactccatccccatccagctgagcccagagcaaaga

SEQ ID NO: 403121 - DNA, 203 bp, Homo sapiens
accagcctggccaacatggcgaaacatatgaaaattacaacaaagcaaccaaccaaccaacccagcaacaacaaaacaggtctaccctggagttatactctaagtttttctattttcctccctttctgatcctttatcccactttctttttcttcctcttccttctccttcttgtcaaagacatagaggattgagttattatc

SEQ ID NO: 403122 - DNA, 376 bp, Homo sapiens
ctggaatccaaaaaggcttacattgttgtgagacagagatgccacttagacttaaccattcatagtatggaccatttcaagaggggtcaccatactttgcttcaattccatgttaactaaacaatctttttcttgctaatctgaacaccctgtgcaatagagtctgactccattttttgacgtttgactgcagacatcttttcagcctaacccttccatcttctctttctgtccaacactggggcaagctgacaaaaatcctcaggtgctcctcttctgtaaccagcagtaagttcgaatcatacactgccaccctcaccccaaccctgtcccttaaccacattaaaacccaaagccagtctcctttaattttatc

SEQ ID NO: 403123 - DNA, 509 bp, Homo sapiens
ttacagaggcttagggttttggtgatgggtcaaggctttgtacttaaagagactggattcaaatacaccctgctaaggaaggggtggcctcagatgcagtgtagtcaggctcactcactttcccaatgaaaaaatagatgctgagaaaggaggtccttgccatcaaacaggaactacatgttgtccaactatgccagggaaactgaggaatattggcttccactctgcattctttctttcttacatatatttgtgtctacaatgccttaagagaagtctctttgttcttttattactttaagagttccagatacctactgcagcctcttgggaattgatcatttttaggtttgatcactaaagaattttttatctaaatttggggagtattggttttttttttttccaaaatatatatgacccacgtgtttgctttaaacaattttaactataagaaatagaatcactgttatttgtggtttcccctttaaggggatggcttctttaaa

SEQ ID NO: 403124 - DNA, 1012 bp, Homo sapiens
  misc_feature (862)..(862): n is a, c, g, or t
  misc_feature (867)..(867): n is a, c, g, or t
agcgggtgtttccaaggactccaaagcgaggccggggactgaaggtgtgggtgtcgagccctctggcagagggttaacctgggtcaaatgcacggattctcacctcgtacagttacgctctcccgcggcacgtccgcgaggacttgaagtcctgagcgctcaagttgtccgtaggtcgagagaaggccatggaggtgccgccaccggcaccgcggagctttctctgtagagcattgtgcctatttccccgagtctttgctgccgaagctgtgactgccgattcggaagtccttgaggagcgtcagaagcggcttccctacgtcccagagccctattacccggaatctggatgggaccgcctccgggagctgtttggcaaagatgaacagcagagaatttcaaaggaccttgctaatatctgtaagacggcagctacagcaggcatcattggctgggtgtatgggggaataccagcttttattcatgctaaacaacaatacattgagcagagccaggcagaaatttatcataaccggtttgatgctgtgcaatctgcacatcgtgctgccacacgaggcttcattcgttatggctggcgctggggttggagaactgcagtgtttgtgactatattcaacacagtgaacactagtctgaatgtataccgaaataaagatgccttaagccattttgtaattgcaggagctgtcacgggaagtctttttaggataaacgtaggcctgcgtggcctggtggctggtggcataattggagcctgctgggcactcctgtaggaggcctgctgatggcatttcagaagtactctggtgagactgttcaggaaagaacgagggtgaagggnctgantaatgggggtggagggttagtatgaggtccggaatggaggagtagaggacggaattgaaaaggggctacaggtaaaagaggaggggtaagcggaggggggaagatcgcagaggggtggtaaaggatctattttataattatcggg

SEQ ID NO: 403125 - DNA, 1289 bp, Homo sapiens
  misc_feature (925)..(925): n is a, c, g, or t
  misc_feature (977)..(977): n is a, c, g, or t
  misc_feature (980)..(980): n is a, c, g, or t
  misc_feature (982)..(982): n is a, c, g, or t
agcgggtgtttccaaggactccaaagcgaggccggggactgaaggtgtgggtgtcgagccctctggcagagggttaacctgggtcaaatgcacggattctcacctcgtacagttacgctctcccgcggcacgtccgcgaggacttgaagtcctgagcgctcaagttgtccgtaggtcgagagaaggccatggaggtgccgccaccggcaccgcggagctttctctgtagagcattgtgcctatttccccgagtctttgctgccgaagctgtgactgccgattcggaagtccttgaggagcgtcagaagcggcttccctacgtcccagagccctattacccggaatctggatgggaccgcctccgggagctgtttggcaaagatgaacagcagagaatttcaaaggaccttgctaatatctgtaagacggcagctacagcaggcatcattggctgggtgtatgggggaataccagcttttattcatgctaaacaacaatacattgagcagagccaggcagaaatttatcataaccggtttgatgctgtgcaatctgcacatcgtgctgccacacgaggcttcattcgttatggctggcgctggggttggagaactgcagtgtttgtgactatattcaacacagtgaacactagtctgaatgtataccgaaataaagatgccttaagccattttgtaattgcaggagctgtcacgggaagtctttttaggataaacgtaggcctgcgtggcctggtggctggtggcataattggagcctgctgggcactcctgtaggaggcctgctgatggcatttcagaagtactctggtgagactgttcaggaaagaaaacagaaggatcgaaaggcactccatgagctaaaactggaagagtggaaaggcagactacaagttactgagcacctncctgagaaaattgaaagtagtttacaggaagatgaacctgaaaatgatgctnagnanattgagcccggtaagcttcctgaaaccttcgtatggataccagaccagggctgaatgtcgacttgaacctgggactaaggactgccagttcgatagaatcgcaaaaaggcccctgggtccgcggcgcaatatagcgggccgtggtgagaaggatcgaatagcttctacacaaggggcggacaccaaacatcaaaaccatgtgagaccaaaatgaattacccacgtgagatacgaaaaaacagcatcgcactcctctgaagtcttctctgcttatgttgtcctccctccctctcggggagagagagag

SEQ ID NO: 403126 - DNA, 539 bp, Homo sapiens
cacgaggcttgctgaaggttagccttctctctctatctccatataagttctagtatatctaccagaactttgcctaagtaagttttttttaacatttgggagttgatatttgaacataatattatgaaaacagaaatagagtggcctacaggtaatatttgttagggattaagaaggctcatgtgaaaaataacctccaagaagtatcaaataacagctatctagccaattatatgcactcagagtagcaaggcaagggacattttaattctgtcatctagaaacaaacctgtttaaatatgtgttttaaaaaagaagtctataagaataatttttaagcttatatgtatacactccatgtttattttattgtgttgtactttatattgaggaatgacctgcaagatgaaagggaccattgtgaatttggagacctctcatttgctaaatgtaagtttttctaccttaggacataaaaagcagcaatacgaaaagaaaatttaattacaagagggagaaaagaaaatgtgggactgaga

SEQ ID NO: 403127 - DNA, 513 bp, Homo sapiens
cttaagcatgtggtttgggcgtcctaacatccttgcctattttctatctactcaaccaagctgtgtgtgtgtttctccttgtatcttttagaatttttactttgtggccaggtgtggtggctcatgcctgtaatcccagcactttgggaggccgtgacagacggatcacctgagttcaagacccatctctactaaaaatacaaaaattagccaagcgtggtggcaggcgcctgtaatcccagctactgaggaagctgaggcaggagaatggcttgaacccgggagtcagaagttgcagtgagccaagatcatgccactgcactccagcctgggtgacagagcgacactcttcctcaaaaaaaaaaaaaaaaaaaagaaaagacatatacaggattctagttagcgggtatgtgaactgaggttcttgcctggagctgattctgccatcggttgatgtttggcaactgctggagacatttttggttatcatagctggggagggagagatgctac

SEQ ID NO: 403128 - DNA, 411 bp, Homo sapiens
tcagaaattctttactaataaggtaaccagactgaaaaattcaaagactttttttttttaaaatagagatgaggtctccccatgttacccagactggtctcgaatgcttgggatcaagcaatccacctgccctggactcccaaactgctgagattacaggcgtgagccacagtgcccggccaagaaacatcatttcgtaatgtaagaaccaaacttgcctagttggatcttacatttaggcatcctgcttggtaggtagttttctcttacagggttattaggttttataagatttcatctaggctgtctttatggaattcaatgataaaatattttgtaatcttttcaaataaaaattatcaactaaatttaaagttttggtaaattttaaaaagtgtggcttgataaatc

SEQ ID NO: 403129 - DNA, 308 bp, Homo sapiens
caaacagcgaacgtgaaacatgacctagacgatgtccatttagacacggatgattgaagggttactatactgtggtgaccgctggcattgcttgctacccgtctccaactctctgactacggcacacagcaggatggtccctctagcattgggtgggactgagcaactggctctgaccattggattgtgagcagaggcaatgtgtgttgcttccaggctagagcttttaataatgccatgcaaagatcctccagagcattcatccctctgccaaggtgaccagcaatgttccagatggcagtcacact

SEQ ID NO: 403130 - DNA, 375 bp, Homo sapiens
atagtcataggtaaggaaggccactgatgtgaaaaatggtgattaaagcaaaagagagtaaaagagatttggaggagaagacaatgcaaaaaatgtggcccttaaaatttttggaaaagttagtcattgcatttatgaaataagaacaagaatgttcacagagctcttagaaactaaaacaaatccaatagagttggaggaggttgatcagaaaggagtgcagaaacaacaaaaaacaaacctaaatgatggtaaataggaagagatgataaaattagagggattatttaaataatacatgtttcaggaggagagaacaaattggaggagaaaaaatcaccaataaaataattcactaacatttctcagaactgt

SEQ ID NO: 403131 - DNA, 460 bp, Homo sapiens
aaactcagcaacaatgggctccaatgggctcactcccattagcattctcccttttctagatgcctgcattcccaccaggtgcttgatgcaacctgtcctgtaaacacaaatgcagtcgcactccctgtctgtttggaagcctcgtaacaaacccaagtgttcagttcttcccctcaatgactcaaacatttttcaacaaaagtaataaaccagtttgagccagaagaaatatatttttaaagctattgaaccagaattcaaaatacctttaaaactgaacctgaacccagccaaagttttattctgtttgggactctgattcagaattttgagagaggaccttaagtcaacaactccagcagagcaatctagaagcctctttgtctgattctctcctctggtccccagacaagagctcatttccctttaggttatgactgagatacactggagggtcata

SEQ ID NO: 403132 - DNA, 372 bp, Homo sapiens
gaaatagagaatgtaactatcaaatgaaaattaaaatgtacaaaacaagcttctattggcctcaaagtaaaagcccacatatttcctatcaactgaatttcatgaagatactcaactagttagtcttagtttcctatgaatcttgacaagctgtacagcttttacgtgctacagaaaattaatgactacaaaataacagaattgacttttttatgatgaatatacagctccaaaagtgaaaatgtaataactttaatcatttatactcatcaaataaaaacaaagtaaaacactaagttacagcatttatatcgagaagctcaagatgcttaaacacacacacacacacacacacacacacacacaactaaa

SEQ ID NO: 403133 - DNA, 345 bp, Homo sapiens
taaccgaagaagtcaacaaaatgtgaacatgtgtgatttaactattaaaacaaatggctgaacccttatttagatatagttgttagcatatagttaatgtaaattaaattattctttttttcctttttgagacagggtctcactctgttgcccagacggagtgcagtggtgcgatctcagctcaccacaacctccacttcccaggctcaagcaattctcctgcctcagcctcctgagtagctgggattacaggcgcatgccaccacgcccggctaatttttgtatatttagtagagacggggtttcaccatgttggccaggctggtctcgaactcctgacctcaa

SEQ ID NO: 403134 - DNA, 314 bp, Homo sapiens
gaagaaaatcctgtagttggtaaagggagaagtattttcgtagccctttcagctgattgtggatattctttgatactataccaaaattcagccagtgaaggtttcttaaaggttagttgcgacattgaaccagaatctatagcactgggtttttcatagtctgtgacattagaatccattgatccatcttgtacttggaatggatcttttgtgcttgcatgattttttttcaattgacacttaagttctgcagattttccatatgttgacatatttcactatacagtgtcaaaaaaaaaatcaacatttgttaa

SEQ ID NO: 403135 - DNA, 332 bp, Homo sapiens
ggccaaggtgggtgggaagaaacctccttgatttcaccaggtcctggatgagaagtcagtgttcttcggtgtaaagtgaagagcccgagggctggatgcgtggttgctgtgtcggctgtgtgcttgcacctcatacatgggacagcaggcccaagccttcggcgctcccctcttctgccatcatggcaaagccaaacccttgcacaggggacaggggctgcaggatgccttggtatcaggttcccaggaacgtgtctgtctccatggcagagaggccctcaggaaagccgacaggaccctaacaggtgacagtcctgggctgaggggttcaa

SEQ ID NO: 403136 - DNA, 698 bp, Homo sapiens
aaaactgggtcaaaaactagaaggaacgagggaggagtgataggaactgccaatgagaagctgatttcttaaaatgacttaagtatggttactcaattatatgggaatttaaaaaaattcccaaactaggaatagtaacaatctttatttccatatactagtcaacgatacagctaagttagtgggttacagagggcaatctagcaactgtgtctaagtgtggaagccaaagaaatcttgtgcagaaacctgttctttttaagtgccaccttcttgttcaagctacttcagcccgaggaactgttgcaaaagcatacaattaaaaggatataacactgctcaggaaaaagtgtttcaaaaggcttagcttcactaagcttaattcttcattaagaacgaaccaaattcgtatctctacctaataacgcaatcccaataatttgagatctgtgcttttctgtggtcaggccaagctgctctactggcccctgaaatgaactacccaacgaatctgaccaaaattcctgccatgagctactatgtttctgcaaagtaattattcaaaagcactgctgcttctggtcgatcttttttctttattatagaagagtccgttttcttcccccacgttccttgctcacaccccaaactaaacaggcatagtcttctccacctagacttgaggtctctgatcaaag

SEQ ID NO: 403137 - DNA, 2266 bp, Homo sapiens
gcgatggcgatgatgcctctagtcctgcatcatccagagcggcaggcggagctggggtccggactgcgagatggaggaggggcggcgctgcggcacccggcaggcttatctgtcttgggcctcttttgtcacatattgctcatctgtgagctgaggccctgactcactgagtatttttggggagcagaagaaggagacatttctctccgaaaatgaactcaacaggccaccttcaggatgcccccaatgccacctcgctccatgtgcctcactcacaggaaggaaacagcacctctctccaggagggtcttcaggatctcatccacacagccaccttggtgacctgtacttttctactggcggtcatcttctgcctgggttcctatggcaacttcattgtcttcttgtccttcttcgatccagccttcaggaaattcagaaccaactttgatttcatgatcctgaacctgtccttctgtgacctcttcatttgtggagtgacagcccccatgttcacctttgtgttattcttcagctcagccagtagtatcccggatgctttctgcttcactttccatctcaccagttcaggcttcatcatcatgtctctgaagacagtggcagtgatcgccctgcaccggctccggatggtgttggggaaacagcctaatcgcacggcctcctttccctgcaccgtactcctcaccctgcttctctgggccaccagtttcacccttgccaccttggctaccttgaaaaccagcaagtcccacctctgtcttcccatgtccagtctgattgctggaaaagggaaagccattttgtctctctatgtggtcgacttcaccttctgtgttgctgtggtctctgtctcttacatcatgattgctcagaccctgcggaagaacgctcaagtcagaaagtgcccccctgtaatcacagtcgatgcttccagaccacagcctttcatgggggtccctgtgcagggaggtggagatcccatccagtgtgccatgccggctctgtataggaaccagaattacaacaaactgcagcacgttcagacccgtggatataccaagagtcccaaccaactggtcacccctgcagcaagccgactccagctcgtatcagccatcaacctctccactgccaaggattccaaagccgtggtcacctgtgtgatcattgtgctgtcagtcctggtgtgctgtcttccactggggatttccttggtacaggtggttctctccagcaatgggagcttcattctttaccagtttgaattgtttggatttactcttatatttttcaagtcaggattaaacccttttatatattctcggaacagtgcagggctgagaaggaaagtgctctggtgcctccaatacataggcctgggttttttctgctgcaaacaaaagactcgacttcgagccatgggaaaagggaacctcgaagtcaacagaaacaaatcctcccatcatgaaacaaactctgcctacatgttatctccaaagccacagaagaaatttgtggaccaggcttgtggcccaagtcattcaaaagaaagtatggtgagtcccaagatctctgctggacatcaacactgtggtcagagcagctcgacccccatcaacactcggattgaaccttactacagcatctataacagcagcccttcccaggaggagagcagcccatgtaacttacagccagtaaactcttttggatttgccaattcatatattgccatgcattatcacaccactaatgacttagtgcaggaatatgacagcacttcagccaagcagattccagtcccctccgtttaaagtcatggaggctataggatcttatgtaaacagtttttgtttctgatagtaatggactttattctaacttgagatcagtggcggatcaaaacctacaagattcaactgaaaagttggcagttatggttttctttcatctgatgtgtcagtatctgttgatttgctttgtagtttgttgacatcttaagatttgatgtgaaagttttagattttttaccctgctctttgcctcagtcttttgtaccgagcctttaaatagatgccaggaatgaagctactgtgttaaagtagaaagtcaaccgattatcatgatttgagtcagtgttatgtgacttcaaaataaggtattgactggattttttttaaagaatgtgaaaatatgatttttgctgaggtgttatttttattaattgaattgtaaattttgattt

SEQ ID NO: 403138 - DNA, 640 bp, Homo sapiens
tctgtttctgggtgtgcatttttgtgtgtaggcttatctgtcttgggcctcttttgtcacatattgctcatctgtgagctgaggccctgactcactgagtatttttggggagcagaagaaggagacatttctctccgaaaatgaactcaacaggccaccttcaggatgcccccaatgccacctcgctccatgtgcctcactcacaggaaggaaacagcacctctctccaggagggtcttcaggatctcatccacacagccaccttggtgacctgtacttttctactggcggtcatcttctgcctgggttcctatggcaacttcattgtcttcttgtccttcttcgatccagccttcaggaaattcagaaccaactttgatttcatgatcctgaacctgtccttctgtgacctcttcatttgtggagtgacagcccccatgttcacctttgtgttattcttcagctcagccagtagtatcccggatgctttctgcttcactttccatctcaccagttcaggcttcatcatcatgtctctgaagacagtggcagtgatcgccctgcaccggctccggatggtgttggggaaacagcctaatcgcacggcctcctttccctgcaccgtactcctcaccctgct

SEQ ID NO: 403139 - DNA, 319 bp, Homo sapiens
acgaaaagcacagaagcagaaacatagcatatggtgagtagaccagtttgattatgcacactaagagtgtaattaagaatgggagttataataaagtctgaaacttctgtcatttattttcagaggagcaggctactggttggcaaattcagatccatcaggaaaactcgtaataatgcatatgttcatcacttcctgaaaacgctgcacgtacaaaaagtcataattcttgggctaaaaatttagaattctgagcatttatcatgtgggtcaggaaaactggcccctgttcctctgcctcccttcacctggcatcacc

SEQ ID NO: 403140 - DNA, 668 bp, Homo sapiens
tgctgttgctgtgtctggggttgaccctcgtctgtgcccaggaggaagaaaacaatgatgctgtgacaagcaacttcgatctgtcaaaggtagagttatggaacgcattgacttctggctctggggagtggtttcagggattctgaagccatgtggatcctattgtagggcaggagttccttaacatatcagacaaaagcattggtttctgatcttgggttaagagcaattgtaccatatgaaaagatgacaatgcttggggatctccatcctccctaaaggggcagtggaaagagccctaggtgtggtgccaactgatctgagttctatcttcacttcaccattatgagccctggcccacaggccagagttcaaggaaagaagtgtccatgtggtatccccactcctcttttcttacccaatgaccttatttattgcagatttcaggagagtggtattcggttctcttggcctctgactgcagggaaaagatagaagaagatggaagcatgagggtttttgtcaaacacattgattacctggggaattcttctctgacttttaaattgcatgaaatataagtatggccttttttagttggggaaggaaaaacagaagcctgggtatggtcttgaacacacacacattcactgatccaggacttgatg

SEQ ID NO: 403141 - DNA, 964 bp, Homo sapiens
tgagacctgaggtgaagataaaggatgggtgggtatttcttcagaattcagcagaaagatttgccaacctttaagtagacacgccgttccaaatttgtaataatgtaaatgctttctaccaaattgtgtaatgaatatatttgaaatggtgattgatattattaatagatatgtttgacttattagaatatcatttaccaacatttagcaaaatcgagatagaatagcaagggtcattgatgagtaagttccatgcagatatgtaccttcctgtaacatttaccagatggagacttttgggtgtgtgccaaaagtgatgaattaaccgtgaaagaatgtgagacaaatgaagtgtgaaggtagttcaaaggtccttaaagagacagaacagcccactcttgccttcataagatttgctagagaaagaagtaggtgcctagtaaagtatttagggaaatctcagtctggctagtccttacaagaaagaaatcctttgaaaggaatacaatattcataatgtgactgttttaaaataaatttttatatgtttaatatttgtaaaaagtcctcattgagattttcctctcttcatcttattttgccatttctgtggtataaaataggtttttaggaaatttgactttgatttactcgtggaccattgcttaggaatgattaggttgcaaattggggattgtctgtaagacaatggctttttatttgggtgaggactgaagaacacatctcatgataggattattgaataaaatctgttgtttctgtgaatgctgaaaatggcagttggaaaacatatttattgcatttcatcaatgggcctctgtgcattggctattttgaaattgaatttacacatttcaaatggtcatataagcagtcattttgtggaatgaagcataattcaagactgggagttgggctatactgcaagttatgaataagatac

SEQ ID NO: 403142 - DNA, 412 bp, Homo sapiens
ggatatgtttgtttcttcaccacgcttcagtgctttttggaaaaagtggaaaacagcggggcggctggaagacaaacattttatgtgaacgtttggttttcttgataatcagagcaacctccgtgtgccttacttgaagtaactctagcgagttttgctatgtccctaggacggcatagcgtacacaacgcatcatgaagtatggatgcgattctggcaccaactgttccgttcctgctttcaccagaagctttgcgtctttaagcttcctttcattagaatttggatccaagtttgtggggaagactgtgaattcaatggaaagtgtcctttttttttttttttttaatttaagaactacttcaccttaaatcccacttctctaataaaataacttttactgtaaatttcc

SEQ ID NO: 403143 - DNA, 718 bp, Homo sapiens
agcggagggtggaggcgggaccagccgccgccgtctccgtctcggtgtcccggcccctacagcgcccggcagccgcggcgggaggagcggaaactgtcgggtgcgtcccgttcggagccgcgccggccgagaaggcgccgaagaagcagcgaggcggcctctgtccggcccggacccgccgagcggcgtgcgcgccccctccccgtagcctcgcggcgcggcctcgccccggcccctcccgagctcatcgcgggcccacggagcggccccggaggcccgagcgcgcccacctgagcccccgcgctggcgccatggcggagcaggagagcctggaattcggcaaggcagacttcgtgctgatggacaccgtctccatgcccgagttcatggccaacctcaggctcagatttgaaaaagggcgcatctatacgttcattggagaagtcgtcgtttctgtgaacccttacaagttgttgaacatctatggaagagacacaattgagcagtataaaggccgtgagctgtatgagagaccgcctcacctttttgctattgcggatgctgcttacaaggctatgaagaggcgatcaaaagacacttgtattgtgatatcaggggaaagtggagctggtaaaacggaagccagtaagtacattatgcagtatattgcggccatcaccaaccccagtcagagagcagaggttgaaaggtaagagca

SEQ ID NO: 403144 - DNA, 425 bp, Homo sapiens
agagagcagaagtacaaggcagtggagctgcgtttgctggcaggcatctatcctccaggcataaaatcagaacacttttatctctaaagaactgaaaaactggagaaaacatttttctttctagtatacgggggtgccacctctatatctttccatacttctgataaacttcccataaacatagcatgcccaaacatattttcttgcttttttcatacatgtgattgggcaggtaaagggtcaaccagacattgcaggaaagctacacacataaataggaaaaccaagataaacataaaaattgatccaaaagaaatagagatgatataggaaacagaagaaaaaaatagtaactatcatttgtatcctgagaaagatttaagatagttatatccataaaagagtaacagcttggcatttattta

SEQ ID NO: 403145 - DNA, 378 bp, Homo sapiens
gggccacagagatgggtccatgacaaaatttgtgtcaacacttgtcaatcctaggggttttcttttgagttctcaggggagtagactccctgtgtatcactgaccatgaagctgaacacatgcagtcccaggagctgctggcagccacgtgcccaccaacaatcaagagctaagaattgggcaacatcatggaaggaagactgtggggaaaaagaaactgagtccctgctgaggcttgttgcttacctgaggccaaccatgcccttgaactcttctcttttgtgaagagatacattctctttacttttaaaaattcattttattgaatcttctcttccttgcaacctgtaaatatattcatattacaaagtcccaaac

SEQ ID NO: 403146 - DNA, 390 bp, Homo sapiens
agcaaaggagttcatgtttcatgaaccagtgacacttaatgctgattgttcaatgacttggatttcttaggtaatagctttacttgatatattgtgtatttttggtttaattgttggtcagtttggtattccatatggtagtgctactcaaaatgtgttgtgaacccttggtggcccatagagtcaaaactattttcataataatgctaaaacattatttgcctttttcattgtgttgacgtttgcagtgatggtgccaaagcaatagagggtaagactgttggtgccttagcatgaatcaagatagtggcaccaaacttgactagttatcactgtattctttgctatcacatactcactgttaaaataaataaaaaatttaaaaattaa

SEQ ID NO: 403147 - DNA, 340 bp, Homo sapiens
gcaccaccactgtagtgccctacaagagaaattcaatgcaaaggaaatttgtccttccaaaggggagaatactgcaacatgtttctaaaaagtaagttcttgtatccattacttatataaaagagatttgcatcttctgcctatatctgtaaatcaatcatcatcacgtttgtgacaaccattcataaagtgtacaaaccactcagtgggttcacattctggctcatgttatccaagcaacacttggaattatgtgtccttgggaaaaatataatcagtttcttcatttagaatatgtaataacattaccacctatccgactgctgtgaagaaaacataa

SEQ ID NO: 403148 - DNA, 717 bp, Homo sapiens
tatgtgaaaaatgagttactgacatttgtcaatcagtctttgccttattcctctggttggtgtgaaacaaagtggtgcagagaattttagactgttgctaccatttgtactccaaatgatagcatattcctgattttcaataaccagataaggatggacttttcttgcctgtgccaccaaatatcattcctaataaaacaccaaagtttatcatcttgtgataaacatagagaaactctattcaagataggtgcacatctacttgtaattagaattagttaatgagactaagcattctaaatgtcctgcttcacagcaggtactatggggaattgagttcatttggtaatatattttgattttgtctgatttctaataagactgatgaactatcccctaaacatttttattagcacatagtatgtgtcagctcttggggttgataccatgaagagtaagatacaatctcactacctagaaatgagtctacccaaatagagactctttttaatgctttcaacccataaaaacatttttggggggattctactgaagaagcaatggagacatccattggaggttaacagtattcctttgagtggtgtgattaaaggtgcttttatattttccaagtttttagtttgtttgttttgcagaaaatgtatttaatgttctataagtgggaaaataaagattttttaaagtgataaacaagga

SEQ ID NO: 403149 - DNA, 185 bp, Homo sapiens
ctctgggtctctgctctcctctgtgtcagacctaggaggcctgaggattacttagttgttctgtctctgggtccacaggcagaatttggcccatccaaagactggccaagtgccaaaaaaaggcctgattaggccctgaaattcagtgaaattctgcctgaagaaacctcttattgaatttgaaa

SEQ ID NO: 403150 - DNA, 427 bp, Homo sapiens
agggtgaataaatagacaatctgtcttacaggacataaaagtatctttccaaagagaaaaactgtgtttaaaatcatccatagcttttggttattaaaaatgttcacagggcctcaagcaatgtaacatagctccttcaatttttcactggtgtctaaaacctataaaatgtcaaaatattgttcaaatctcacctcgctgtgagacctgacctgactgcaccactgtttgaagtggcagcttcacgcttccttccctgctttctttttctccttaccatttgctgccatttgatatactagaaagtttacttgtttttacttgtcttctctcagtagaatttgagctccaagaaggcaggggcttttgtattttgtttttgttgttgttgttgcttgtttggttggtttttgagacagtctcactc

SEQ ID NO: 403151 - DNA, 564 bp, Homo sapiens
cgccccgcgggctcccggtggctgcttcccgtccgctgtcctctgctgccagtcccctgccccgggcaaagcccatctggtccgccgagcaggccggagctattgggagtggcggatcctcccaccccagccggatctgggccatggccgagcctggagagggactgccagaggaggtgctggcactcatcttccgccacctgtccctgagagaccgtgctgccgccgccagggtctgcagggcctgggccgccgctgctacctgcagcgccgtgtggcacgacacaaaaatcagacgccccacccgctcggtcctggacacactgcccccctctcttgcctccacccctctgcggactctgcagctccgcggccccggcgcagggagagggagggcacgggcgcgggccgggcctcaagggacttgcccagcccacaccaggtcgcgcaccggcgatttctcctgtagaacaaagaaggaaatagagggaccgagaggggtgggactcgaacccaagtctcccactcatctcaccccaccccaccccactccaccccacccca

SEQ ID NO: 403152 - DNA, 1844 bp, Homo sapiens
aataataattgctgacgtattgactgcctagtatataccaaccattgtttttaagtgccttacatatattaactaatttaatccttatgaaaaccttgtgtggtagataggtattatcattacctccattgcccagataggaaactgaggcaaagagacttaatcacttcccacgggtcactcagctagggaatggcagaggcagaattcgaacctagcagtccggaggccatgccaagactccttagagacagctgagaaagcccagttcctaaaatatcattggctctccatgtccaggtttcatcctgtggcagacgccactgaaatcttctaaaaggataggatgcgagttccctcctttggggcaacagtcgtggtctgaacagagacgtggggagggaggcaggaaatgggatggcagctggaaccccagctaaggggtgggtagaggcttctccgctggtcgcagggactcagctgaggccttttctgcacggctctaacccaagttgcgaatgtgagctggaaggcatgctgccaccttatctgtccgcctgcctcgaccacattcacaacctacggctggaatttgagccatcgaggaagccgagccgccgggcggccatcgagctgctgatggttctggcgggccgtgccccggggctgcgaggcctgcgcctggagtgccgcggagaaaaaccgctcttcgacgcgggccgcgacgtcctggaggctgtgcacgctgtatgcggggcggccagccagctacgccacctcgacctgcggcgcttgtccttcacactggacgacgcgctggtgctgcaggcggcgcgcagctgtcccgagctccacagcctttttctggacaacagtaccctagtgggcagcgtgggtcccggctcagtgctcgagctactggaggcctgcccgcgcctgcgcgctctcggcctgcacctagccagtttgtcgcacgccatcctcgaagcactggcggcgccagaccgagcgcctttcgcgctcttggctctgcggtgcgcgtgccccgaagatgcacgcgcgtccccgctgcccaacgaagcctgggtcgcgttgcgccgccgccaccctgggctggcagtggagctggagctggagcccgcgctgcccgctgagagcgtgacgcgcgtcctgcagccagccgtccccgtggctgcgctgcgcctcaacctctcaggcgacaccgtaggcccagtgcgcttcgcagcacaccactacgccgcaaccctgtgcgcgctcgaggtgcgcgcagccgcttcggccgagctgaacgccgcgctggaggagctggcggcgcgctgcgcggccctgcgcgaggtgcattgtttctgcgtggtgagccactcggtgctggacgccttccgcgcgcactgcccgcgcctgcgcacctataccctcaagctcacgcgcgagccgcatccctggaggcctacgctcgtggcgtgattgggcgacttctctcccccgtccccgtggacgtaagcgctctgagagggaacgggggggggtgtccaggcgcgccccgagtgctagtgccttcttttgggattgttgccccccgggtctttaccgagttgggaactgtgatggcatcgggaccagtcctgggcgccctgagaccactcgctgctctcaccctctgcagacgccccacccgctcggtcctggacacactgcccccctctcttgcctccacccctctgcggactctgcagctccgcggccccggcgcagggagagggagggcacgggcgcgggccgggcctcaagggtgagtgtgaaataaacaaatcctgcagtgtttc

SEQ ID NO: 403153 - DNA, 1632 bp, Homo sapiens
cgccccgcgggctcccggtggctgcttcccgtccgctgtcctctgctgccagtcccctgccccgggcaaagcccatctggtccgccgagcaggccggagctattgggagtggcggatcctcccaccccagccggatctgggccatggccgagcctggagagggactgccagaggaggtgctggcactcatcttccgccacctgtccctgagagaccgtgctgccgccgccagggtctgcagggcctgggccgccgctgctacctgcagcgccgtgtggcacgacacaaaaatcagttgcgaatgtgagctggaaggcatgctgccaccttatctgtccgcctgcctcgaccacattcacaacctacggctggaatttgagccatcgaggaagccgagccgccgggcggccatcgagctgctgatggttctggcgggccgtgccccggggctgcgaggcctgcgcctggagtgccgcggagaaaaaccgctcttcgacgcgggccgcgacgtcctggaggctgtgcacgctgtatgcggggcggccagccagctacgccacctcgacctgcggcgcttgtccttcacactggacgacgcgctggtgctgcaggcggcgcgcagctgtcccgagctccacagcctttttctggacaacagtaccctagtgggcagcgtgggtcccggctcagtgctcgagctactggaggcctgcccgcgcctgcgcgctctcggcctgcacctagccagtttgtcgcacgccatcctcgaagcactggcggcgccagaccgagcgcctttcgcgctcttggctctgcggtgcgcgtgccccgaagatgcacgcgcgtccccgctgcccaacgaagcctgggtcgcgttgcgccgccgccaccctgggctggcagtggagctggagctggagcccgcgctgcccgctgagagcgtgacgcgcgtcctgcagccagccgtccccgtggctgcgctgcgcctcaacctctcaggcgacaccgtaggcccagtgcgcttcgcagcacaccactacgccgcaaccctgtgcgcgctcgaggtgcgcgcagccgcttcggccgagctgaacgccgcgctggaggagctggcggcgcgctgcgcggccctgcgcgaggtgcattgtttctgcgtggtgagccactcggtgctggacgccttccgcgcgcactgcccgcgcctgcgcacctataccctcaagctcacgcgcgagccgcatccctggaggcctacgctcgtggcgtgattgggcgacttctctcccccgtccccgtggacacgccccacccgctcggtcctggacacactgcccccctctcttgcctccacccctctgcggactctgcagctccgcggccccggcgcagggagagggagggcacgggcgcgggccgggcctcaaggagcgggaccagtttcctcgtaagcgaccagagccgtttcgccaaggaagtgctgccccagtatttcaagcatagcaacatggcgagcttcgtgcgccaactcaacatgtacggttttcggaaggtggtgagcatcgagcagggcggcctgcttaggccggagcgcgaccacgtcgagttccagcacccgagcttcgtgcgcggccg

SEQ ID NO: 403154 - DNA, 1627 bp, Homo sapiens
cgccccgcgggctcccggtggctgcttcccgtccgctgtcctctgctgccagtcccctgccccgggcaaagcccatctggtccgccgagcaggccggagctattgggagtggcggatcctcccaccccagccggatctgggccatggccgagcctggagagggactgccagaggaggtgctggcactcatcttccgccacctgtccctgagagaccgtgctgccgccgccagggtctgcagggcctgggccgccgctgctacctgcagcgccgtgtggcacgacacaaaaatcagttgcgaatgtgagctggaaggcatgctgccaccttatctgtccgcctgcctcgaccacattcacaacctacggctggaatttgagccatcgaggaagccgagccgccgggcggccatcgagctgctgatggttctggcgggccgtgccccggggctgcgaggcctgcgcctggagtgccgcggagaaaaaccgctcttcgacgcgggccgcgacgtcctggaggctgtgcacgctgtatgcggggcggccagccagctacgccacctcgacctgcggcgcttgtccttcacactggacgacgcgctggtgctgcaggcggcgcgcagctgtcccgagctccacagcctttttctggacaacagtaccctagtgggcagcgtgggtcccggctcagtgctcgagctactggaggcctgcccgcgcctgcgcgctctcggcctgcacctagccagtttgtcgcacgccatcctcgaagcactggcggcgccagaccgagcgcctttcgcgctcttggctctgcggtgcgcgtgccccgaagatgcacgcgcgtccccgctgcccaacgaagcctgggtcgcgttgcgccgccgccaccctgggctggcagtggagctggagctggagcccgcgctgcccgctgagagcgtgacgcgcgtcctgcagccagccgtccccgtggctgcgctgcgcctcaacctctcaggcgacaccgtaggcccagtgcgcttcgcagcacaccactacgccgcaaccctgtgcgcgctcgaggtgcgcgcagccgcttcggccgagctgaacgccgcgctggaggagctggcggcgcgctgcgcggccctgcgcgaggtgcattgtttctgcgtggtgagccactcggtgctggacgccttccgcgcgcactgcccgcgcctgcgcacctataccctcaagctcacgcgcgagccgcatccctggaggcctacgctcgtggcgtgattgggcgacttctctcccccgtccccgtggacgtaagcgctctgagagggaacgggggggggtgtccaggcgcgccccgagtgctagtgccttcttttgggattgttgccccccgggtctttaccgagttgggaactgtgatggcatcgggaccagtcctgggcgccctgagaccactcgctgctctcaccctctgcagacgccccacccgctcggtcctggacacactgcccccctctcttgcctccacccctctgcggactctgcagctccgcggccccggcgcagggagagggagggcacgggcgcgggccgggcctcaagggtgagtgtgaaataaacaaatcctgcagtgtttc

SEQ ID NO: 403155 - DNA, 1569 bp, Homo sapiens
cgccccgcgggctcccggtggctgcttcccgtccgctgtcctctgctgccagtcccctgccccgggcaaagcccatctggtccgccgagcaggccggagctattgggagtggcggatcctcccaccccagccggatctgggccatggccgagcctggagagggactgccagaggaggtgctggcactcatcttccgccacctgtccctgagagaccgtgctgccgccgccagggtctgcagggcctgggccgccgctgctacctgcagcgccgtgtggcacgacacaaaaatcagttgcgaatgtgagctggaaggcatgctgccaccttatctgtccgcctgcctcgaccacattcacaacctacggctggaatttgagccatcgaggaagccgagccgccgggcggccatcgagctgctgatggttctggcgggccgtgccccggggctgcgaggcctgcgcctggagtgccgcggagaaaaaccgctcttcgacgcgggccgcgacgtcctggaggctgtgcacgctgtatgcggggcggccagccagctacgccacctcgacctgcggcgcttgtccttcacactggacgacgcgctggtgctgcaggcggcgcgcagctgtcccgagctccacagcctttttctggacaacagtaccctagtgggcagcgtgggtcccggctcagtgctcgagctactggaggcctgcccgcgcctgcgcgctctcggcctgcacctagccagtttgtcgcacgccatcctcgaagcactggcggcgccagaccgagcgcctttcgcgctcttggctctgcggtgcgcgtgccccgaagatgcacgcgcgtccccgctgcccaacgaagcctgggtcgcgttgcgccgccgccaccctgggctggcagtggagctggagctggagcccgcgctgcccgctgagagcgtgacgcgcgtcctgcagccagccgtccccgtggctgcgctgcgcctcaacctctcaggcgacaccgtaggcccagtgcgcttcgcagcacaccactacgccgcaaccctgtgcgcgctcgaggtgcgcgcagccgcttcggccgagctgaacgccgcgctggaggagctggcggcgcgctgcgcggccctgcgcgaggtgcattgtttctgcgtggtgagccactcggtgctggacgccttccgcgcgcactgcccgcgcctgcgcacctataccctcaagctcacgcgcgagccgcatccctggaggcctacgctcgtggcgtgattgggcgacttctctcccccgtccccgtggacacgccccacccgctcggtcctggacacactgcccccctctcttgcctccacccctctgcggactctgcagctccgcggccccggcgcagggagagggagggcacgggcgcgggccgggcctcaagggacttgcccagcccacaccaggtcgcgcaccggcgatttctcctgtagaacaaagaaggaaatagagggaccgagaggggtgggactcgaacccaagtctcccactcatctcaccccaccccaccccactccaccccacccca

SEQ ID NO: 403156 - DNA, 819 bp, Homo sapiens
gtcccctgccccgggcaaagcccatctggtccgccgagcaggtaagacaccagcgcccaaggttagacggcaggaagacccgactttgggggtttgcgattcttacgaggcggggggctcgtaagagctacagctgccagacttcggtaaatcaagggggcgccccctggagaccagaattttctggtacccctggggatccggcttcaagatcgctgctaccagtgggcactcaaaacggggtgcccatgggtcccaggtacaagcccggccgaacgtatctgaagccccaggaaacacgtggcacaaattccgggagaaactgttagcccggaagatatgggaacattaactggcgagtagtgtgaagccttgtgtacacaaacctttaagaaccttaaaacaagattggcggccgggcgcggtggctcacgcctgtaatcccagcactttggaaggccgaggcaggtggatcacctgaggtcaggagtttgagaccagcctggccaatatggtgaaaccccgtctctactaaaaatacaaaaattagcccggcgaggtggcgcgcgcctggagtcccagctactcgggaggctgaggcagaagaatcgcttgaacccgcgaggcggagtttgcagtgagccgagatctcgccactgcactccagcctgggcgacacagctagattccgtctcaaaacaaaacaaaacaaaaacaaacaggattggcaacttcaaagaggacgcacactttccagtaacccatccccctctaaaggctgcgctccagggtgggtctgcggagttccagccgaaccca

SEQ ID NO: 403157 - DNA, 503 bp, Homo sapiens
aaaatccctgccaaacagcagttccacctggccttggaaccagcggttcccctggcaaacccttccatctgattgtgaggaagctcttcttactaagctcaaattgggttgtcctacaacttccaccctgagctgcactcctcagaaccatacagaatccctctcccctgtgacagcaattcagagaatggaggctgcctggttattcagaacagaatgttatggaaaggctcaggtctcaaggccaactactcccctcttggttgtgtaaccttgagaatgttacgtacttttctgagcctgattcttcaattgttttctagggaaatcagtgagataatgacataatttatctagcacagagaaggcactcagtaatgtctagttgctcattcagtcaatgattcattcattgaaaatagtcctttagttccaagttgttcccacatttaaacatcctcagttcccttggtggtgcctcatgctttccagtggtaccagaa

SEQ ID NO: 403158 - DNA, 300 bp, Homo sapiens
tttccctcttccctttctcctcccaccttgaacaggtatacacgtgcaaacacacaccacaacacaccatttcacactcctccatccaatggcaggcatcggggtcccatgtgacagatggacaggctcagtttttaggaagacttgtggggttggttacagaggagagaagtttctgcccagcgtgcttcttagccagactgataaagccctaggtctgaagtcagggaaggcttcctggaggtgatgtcatgactgggggcatggacatcaagtacagccttgaaggatgggatttga

SEQ ID NO: 403159 - DNA, 680 bp, Homo sapiens
gtttccagaggatcccctgtggagggagattccatgcttgtatgcatacactactgtagcttgtttttttcattttagaccttctctattgatttcctacgctgcaagatgaagcttcatctcttatataaccctcctctcacacgcacaattctttatactaagctctcaataccattttctaattttcttaatattcattgtttatattttcatggctaaatattgcttacagctgagcatatgcagtgattttatttctttgccagttcaaatttttcttttctctggagtcaacaattattttattggtttacatttcttagtaccagtcacaaattcaggcccccagtttctgataggactacagaactctgcagtcaacacctcactcatcctgaatcccagtaattttctgtgttggattctgagtcctggattacacattgtcttctctcttggcatgcctcctcattttgatggagcacatcctctagcagctttttgagaaagggtttacagggaggaaattctttgagagcttacgtgtctgaaaatgtctttatttgagcctcctacccaactgataggctagctatagaatgctagaatggaaatagttttcctttagaattgttacttttgagaagttacctttttttgagaagtctcaagtcttt

SEQ ID NO: 403160 - DNA, 1505 bp, Homo sapiens
ggttcgtcacgggattcggagccgggcggctacgggcggggtgtcgcagctctcttcgacgtacctgtcctcaggagccgcggcggcgactgcgcctcggacggccgtcggggccgagaaccatgagccccaggggcacgggctgctccgccgggctgctgatgactgtcggctggctgcttctggcgggcctccagtccgcgcgcgggaccaacgtcaccgctgccgtccaggatgccggcctggcccacgaaggcgagggcgaggaggagaccgaaaacaacgacagcgagaccgcggagaactacgctccgcctgaaaccgaggatgtttcaaataggaatgtcgtcaaagaagtagaattcggaatgtgcaccgttacatgtggtattggtgttagagaagttatattaacaaatggatgccctggtggtgaatccaagtgtgttgtacgggtagaagaatgccgtggaccaacagattgtggctggggtaaaccaatttcagaaagtcttgaaagtgttagattggcatgtattcacacatctcccttaaatcgtttcaaatatatgtggaaacttctaagacaagaccaacaatccattatacttgtaaatgattcagcaatcctagaagtacgcaaggaaagtcaccccttggctttcgagtgtgacacactggataataatgaaatagtagcaactattaaattcacagtctatacgagcagtgaattgcagatgagaagatcaagcctaccagccactgatgcagccctaatttttgtgctgaccataggagtcattatctgtgtatttataattttcttattgatcttcataatcataaattgggcagcagtcaaggctttctggggggcaaaagcctctacacctgaggtacaatccgagcagagttctgtgagatacaaagattcaacttctcttgaccaattaccaacagaaatgcctggtgaagatgatgctttaagtgaatggaatgaatgatgtttgaatgatatataacaaaccaaaggatattacagaatattagattcattattacaaaaataaaatacacattgaaatactttaataatgttgcgatggattgccacagtgtgaaggaaatgcagtgtggggataggactattttatcagtgcatttttccagtacagttatcaaatattacttttaatttgttctcaacacttatttcaggtaatagcttggggatatttatctaaagtacccccaacaaatcttctaagtgcatttttgatcactttgataacttcttaggtgatttgcctgttttgtcttaaataagaacaatgtaatatagaaatgctttacatattagactttctctcccctggaagcactgggttgaacttgctaaagtaaatcatactttagaatctcttcagggaatgtgacatacaaagtttgtaagacatgaagtaataacgataatgataacaataaatgcttacttagtgaaa

SEQ ID NO: 403161 - DNA, 659 bp, Homo sapiens
cggctccgttgctcccgcggcgcgaggcgctctcgctctcctgctcctccgccgcggcggcgactgcgcctcggacggccgtcggggccgagaaccatgagccccaggggcacgggctgctccgccgggctgctgatgactgtcggctggctgcttctggcgggcctccagtccgcgcgcgggaccaacgtcaccgctgccgtccaggatgccggcctggcccacgaaggcgagggcgaggaggagaccgaaaacaacgacagcgagaccgcggagaactacgctccgcctgaaaccgaggatgtttcacatacggaatgtcgtcaaagacacgtacgaacttcggaactgtgcaaccagttaaacatgtggtattgcgtgttcgacgaagttactattacacaacatggcatgccctggtggtagaatccaaagtggttgtacgctacggcgtacgaagcaatgccagtggaccaaccacgacttggatgcgccttgccgtgctaacaccaccaagtatttcacctaccaagatccttggagaagcctgcgtaacccactttgcggccatgctcatttacacccacatttcttccccattaagactccgcgtttcaacccactctgctgcgcccaacttgctaacgaacaagaaccca

SEQ ID NO: 403162 - DNA, 1524 bp, Homo sapiens
ggttcgtcacgggattcggagccgggcggctacgggcggggtgtcgcagctctcttcgacgtacctgtcctcaggagccgcggcggcgactgcgcctcggacggccgtcggggccgagaaccatgagccccaggggcacgggctgctccgccgggctgctgatgactgtcggctggctgcttctggcgggcctccagtccgcgcgcgggaccaacgtcaccgctgccgtccaggatgccggcctggcccacgaaggcgagggcgaggaggagaccgaaaacaacgacagcgagaccgcggagaactacgctccgcctgaaaccgaggatgtttcaaataggaatgtcgtcaaagaagtagaattcggaatgtgcaccgttacatgtggtattggtgttagagaagttatattaacaaatggatgccctggtggtgaatccaagtgtgttgtacgggtagaagaatgccgtggaccaacagattgtggctggggtaaaccaatttcagaaagtcttgaaagtgttagattggcatgtattcacacatctcccttaaatcgtttcaaatatatgtggaaacttctaagacaagaccaacaatccattatacttgtaaatgattcagcaatcctagaagtacgcaaggaaagtcaccccttggctttcgagtgtgacacactggataataatgaaatagtagcaactattaaattcacagtctatacgagcagtggtttgtgtgttttctctagaattgcagatgagaagatcaagcctaccagccactgatgcagccctaatttttgtgctgaccataggagtcattatctgtgtatttataattttcttattgatcttcataatcataaattgggcagcagtcaaggctttctggggggcaaaagcctctacacctgaggtacaatccgagcagagttctgtgagatacaaagattcaacttctcttgaccaattaccaacagaaatgcctggtgaagatgatgctttaagtgaatggaatgaatgatgtttgaatgatatataacaaaccaaaggatattacagaatattagattcattattacaaaaataaaatacacattgaaatactttaataatgttgcgatggattgccacagtgtgaaggaaatgcagtgtggggataggactattttatcagtgcatttttccagtacagttatcaaatattacttttaatttgttctcaacacttatttcaggtaatagcttggggatatttatctaaagtacccccaacaaatcttctaagtgcatttttgatcactttgataacttcttaggtgatttgcctgttttgtcttaaataagaacaatgtaatatagaaatgctttacatattagactttctctcccctggaagcactgggttgaacttgctaaagtaaatcatactttagaatctcttcagggaatgtgacatacaaagtttgtaagacatgaagtaataacgataatgataacaataaatgcttacttagtgaaa

SEQ ID NO: 403163 - DNA, 1576 bp, Homo sapiens
ggttcgtcacgggattcggagccgggcggctacgggcggggtgtcgcagctctcttcgacgtacctgtcctcaggagccgcggcggcgactgcgcctcggacggccgtcggggccgagaaccatgagccccaggggcacgggctgctccgccgggctgctgatgactgtcggctggctgcttctggcgggcctccagtccgcgcgcgggaccaacgtcaccgctgccgtccaggatgccggcctggcccacgaaggcgagggcgaggaggagaccgaaaacaacgacagcgagaccgcggagaactacgctccgcctgaaaccgaggatgtttcaaataggaatgtcgtcaaagaagtagaattcggaatgtgcaccgttacatgtggtattggtgttagagaagttatattaacaaatggatgccctggtggtgaatccaagtgtgttgtacgggtagaagaatgccgtggaccaacagattgtggctggggtaaaccaatttcagaaagtcttgaaagtgttagattggcatgtattcacacatctcccttaaatcgtttcaaatatatgtggaaacttctaagacaagaccaacaatccattatacttgtaaatgattcagcaatcctagaagtacgcaaggaaagtcaccccttggctttcgagtgtgacacactggataataatgaaatagtagcaactattaaattcacagtctatacgagcagtgtgaattgcaaagccctgtccgtgatgtctcctacatgttgccttgaaactgtccatcgcctttcattactcctgtgactgccctagttcaggctgccccgtctctttatgtagatgctttttaaaacaatctcatgacttgcttctccaactatgagagagcttttaaatgcaacttttacaattttacacgggcagcagtcaaggctttctggggggcaaaagcctctacacctgaggtacaatccgagcagagttctgtgagatacaaagattcaacttctcttgaccaattaccaacagaaatgcctggtgaagatgatgctttaagtgaatggaatgaatgatgtttgaatgatatataacaaaccaaaggatattacagaatattagattcattattacaaaaataaaatacacattgaaatactttaataatgttgcgatggattgccacagtgtgaaggaaatgcagtgtggggataggactattttatcagtgcatttttccagtacagttatcaaatattacttttaatttgttctcaacacttatttcaggtaatagcttggggatatttatctaaagtacccccaacaaatcttctaagtgcatttttgatcactttgataacttcttaggtgatttgcctgttttgtcttaaataagaacaatgtaatatagaaatgctttacatattagactttctctcccctggaagcactgggttgaacttgctaaagtaaatcatactttagaatctcttcagggaatgtgacatacaaagtttgtaagacatgaagtaataacgataatgataacaataaatgcttacttagtgaaa

SEQ ID NO: 403164 - DNA, 524 bp, Homo sapiens
aagtataactcagtccgtgtctctctctatcttgagagccagtgaagccaacagggagtgtgatactgatctctctgctacaagaggcctgcctccatgtgagtagacctacagttttccagaactgcctgctgctgaatgggttaagtctaattccagtgctcaatattacgaagcccgctttcgtgaagatataagccatgtcttccaacattggctttgtcaatccatgtgattagatatgggcaggtgccgggtgggcaagtggtgctattcattagtcttcctcaaaccccagcacccctctgaagaaagcaatcttttcttatttatccctgtatcaccacaacatgatatgtttgcgataaatgtttattgcatggatgtaattgagataaatttacttttctgtccttggccaagggggatgaactagttgatccctaacatgtctctctgtgtaaatatcctctgacacccttaagctgtctcaggtataaattatgaatactttctaaaagatt

SEQ ID NO: 403165 - DNA, 360 bp, Homo sapiens
aaaaaccttttactgttaaaattatttcttcatatatatatatatatatatatatatatatatatatatgtgtgtgtgtgtgtgtgtatatgtgtgtgtgtgtttggtgaaaaacatcattttacagttcttgtaaagctgtctgtctcctagaaccttagtgtctctgtaggtagtttgcattgcattaagaattctgtgtgacagctgacagaaatccaacccccgaattatcacagggtactttcctatcaaaaagtatacttgggttttgtaagtattagacctggtatttttcttttttggtattttatctttagttttaatgttgtagtaaatgtttaccttttattttctctt

SEQ ID NO: 403166 - DNA, 469 bp, Homo sapiens
taacaccgcttaaagattagccactgctagacagtgatcctcaggtatatggtctcaggattggccccaagcacacggtgtgtgtgtgtgtataaatatatcttcacaaagcataggtacccattaaagccatattgctttgctgaatggttctaatagctacagatgatttctagcctgaaagaaaagcaccacgaattgtttgaagttgacttgtcagatgtggcatgcttggtctaagttttgacaggaagggtatgtgggtaggggtgtacggagcatctcatgagaccagttctcctcctgagaggtccgtgatgttggaactgttgccccagatggactttgcccttgtgagactttatacttttcaatgcagtttttccctctttaaaactcgccagcttttatgtagtgttttataaaattacaggaataaaaagaatatcttttatgctttttaaaaaaa

SEQ ID NO: 403167 - DNA, 284 bp, Homo sapiens
caaggcgctgcaggtaaacataaggaaggtattaaaagtagctaatatttatggagtgtttcctgtgtgccagactttgttctaagggtttcatatgcagtaacttatctgattttcataaaacccttgcgaggtggttcctatgactgcacctgtttatactgttgaggaactgagacacagaaatgtttaataacttgccccagggttgcacaactagagagtggaagagctgggagcaaatcctgattccaggcttacagtgctaactatgtgttctatgg

SEQ ID NO: 403168 - DNA, 902 bp, Homo sapiens
cttctataatcttcgtaacaacatgaaatatgtattattgtccttatgctacagatgaaaaaactgtggaatacaggggccaatgtgtctctagcctcatttaataagaggtggatctgagatctgaacacaggcaattggatctagaatctatgttctttaccatgaaactatgttgctccctgtctaaatacatgcattaaacaaatggtaaattataagcagataatttctacttaatggttcaaatggtaaattataagcagataatttctctaaaaatacaaaaattagccagatgtggtgatgcacacttgtaatcccagctacttgggaagctgaggtgggaggatcgcttgaacctgggaggcagagattgaagtgagcagagatcacgccactgcactccagcctgggcaacagagcaagactccatctcaaaaaaaaaaaagaaaagaaaatcttctatgttataaacttaaatttcatgtgaatggaagattgagaaatgatggctgatggcctaagctctgggtagaatttcaactttttgcatgtttatcaaatggctttaatgttcctgccttttcctggttattatttaaaaaaaagtaatgtttccagaaaccatttaacaactgataactggaaaattttttggaagaggttagctagacaggttatacgggttttttttttttcctcatacagtttttttaaaaattgagaaataattcatgttttctttttttttttcagtatacaattcagtggtttatactatattcacaaactgtgtacccatcacatcactaattccagaatattttcatctcctcaaaaagaaaccctgtacccatcagcagtcaccctaattcttcattttacttagccccgggcag

SEQ ID NO: 403169 - DNA, 294 bp, Homo sapiens
ctaaaactactaacataaagcaacaacaaaaccccagaagatttgaaaagggcacgttaaactgaaatgtctaaaactagtgtttctggctgtccgtgattctagttggctctgtttccacctgtgtgcaaatgtagtccccaatttctttaaattcctggcccattgcatacagttctcactaataatacttaagagttcctagagttgccagataaaacacaagatgtgaactgagtgaatgagtaattacttagtatatttcaaatattgaatgggacacacttatactaa

SEQ ID NO: 403170 - DNA, 413 bp, Homo sapiens
tctgctttatgtgtttctatatgttatttggcacaaagttgttcttatgtgaatattattacttttgcattatgaagtgtctttcttcggctcatttaatgcctttttggcctgaattcttccttactgcatgtcaaaatactctgctttctttttgtttgcatttatttgatatattcccattctcgactcccctcctttttatctgcctttctgagtcactttgttttagatgtatctcttatgtacagcctagagctgggttttgctttgtaagctagtctgaaagtcttttttatttagttagatgagtcatgtccatttatataattgatatgactgatatgtttagtctcagatttgtcattttattttatatttactgtgtgtcttctactatttatttgggtttt

SEQ ID NO: 403171 - DNA, 253 bp, Homo sapiens
tgggttccaacaaaactttatttaccaaaagagttagctgctgggtttggccaatccttgccttaggtcagtcaccacgtcactgagtacttggctgccctaactaaagttggattctattagcaaagaagaaagaggaatggctatgtgtagagcctgccacagggacggtggctccaaaacactcccgggagagttgagatgtgacactgtgagaaccagatactgatggaggactgtcaggaagccaggg

SEQ ID NO: 403172 - DNA, 432 bp, Homo sapiens
ctgtcttcagggattagcttaaatgctgccttccaaagtctcgcctagccagtgatatgctaataaatgtttaacaaatttctctatgaaaaaaaagggccttgatttgtagcatttgtcagttccatgatataagccctgattcaagcaaccactctggacagtgccaaatgtgcagtcaggaagagaggtacgtgatgagctcccactagcaagtgggggctggctcctgtaccccactgctcctagctctgctgtcagaattgaaccaaatttcttgacccataatgctgtttctcagtttatattaaagcatacatctaattctgcctgtctggtctaccttttccacttcaactttaagatccttgaagaccagtattgaattgtatttatccaacacagagccttttacagaatggtaaactctgt

SEQ ID NO: 403173 - DNA, 1298 bp, Homo sapiens
gaggagaagaagccactaacattgcaggatcgtgtagcgaaacttctgtaggtacttaataattttagagtactctactttttaattaaaaaatcaacttatggttcattagaaaaaacgtggaaattacaaataatatttttaaagaaaatgaaaaaaaaattcctggaaccccaccactcagaaagtcaccagggaacggcccgctgggtttttttccagactcttccatctgtggactttgctttaagagacgtttaagacttacagcgcagtcgcccgggaaggcctgagaagctttcggaagcaaggtggtttgctcgtgattgcatttgattgcaaggagacaggagcccaagctgtgaccagtgacgcagactggaagtcccgtttactgggagagaagaggttaaggaacacccaggtgaacaattaggtcctccacaatgaagacaggtaatgtggaggaaagagagcttgtcatggttcttgctcaagtaccaactctatggacccaggacaggtttgtcccatgacctgctgtgaacagtgtgttgtctgatagaagattcggttggcaaaccatctctctattgccttacagagcaagcaaagaagatggatcgattgaagagccatctgactgtgtgctttctaccttctgtgccctttttaatcctagtatccactctagccaccgctaagagtgtgactaacagcactttaaatggcactaacgtggtcttgggctctgtgcccgtaatcattgccagaactgaccatatcatagtcaaggaagggaacagtgccttgattaactgtagtgtttatggcatccctgacccacagttcaagtggtataattccattggcaagctgctgaaagaagaagaggatgagaaggagagaggaggaggtaggctttaaagttgtatcaaatgtcataataaaatataaacaggagctttggagccagcacccgtgatgttagttcttctcatgcaaatgatttaaagatctcatcttgtcttgtttttctaaggcaggagagaatatatatccttaaggattcaaagaagcaattaattcatttttttccctcattgacacagaagacaaaggacaaacacagaagtctttttaaaggcttcttggaattttgtaatataatacatccaatacattatagagacaaatgtaaaatggattttcctaaataatatattcaatttttaagggagttttgttttctttcatggagatggctggaataaacaatatagccattgtttatcatt

SEQ ID NO: 403174 - DNA, 564 bp, Homo sapiens
acttgcacatggcctgggcctttgggctccccactgtgaggcctctcacggtgggacccaggctttgggtagctggctccatgctctagcaaagcctcacttagcagtggggaggtcccaagaagagaagcgagatacccatataaagcaagcctgcttagccttccagggtccttcaaatcttaccaaatgaaagccagcttgctccacctactgtcaagccagcatctcattctccccattcttgtctcttaaacaactactcaaaaaaggagagccatgaaagtcaccagcctagaaaattacagtcgacttcatgagcttcatttggatttctcatcatgcaatagcaaagtcacagttattcctactgagatcacaatgatgctgccagagcctcccctgagcttgagagccctcctcttctaagcagcatttggagcatcctccattgtatagtgggaaagtggatatctggctttccttccttcctgaggaaattatgaacaagaagaacaaactccaagctaaatacaagtcacgacttttccagaatccaaaagt

SEQ ID NO: 403175 - DNA, 6337 bp, Homo sapiens
  misc_feature (6239)..(6239): n is a, c, g, or t
  misc_feature (6298)..(6298): n is a, c, g, or t
actgcaggccaggtaccttagcaggtctttctgcagggctgagctatcgctagggaacccacggtgactgaatcaaagggaagaaagacccaagacctggatctcccttttacatggaccctaaagcaaaggaaaatggcaaatgcacgacagcggcctcctgaacatcaccaaggtatccttctcagaccgaggtaaatacacgtgtgtggcttctaacatctacggcaccgtgaacaacacggtgaccttgcgcgtcatcttcacttctggagacatgggtgtctactacatggtcgtgtgcctggtggccttcaccatcgtcatggtcctcaatatcacccgcctgtgcatgatgagcagccatctaaagaagactgagaaggccatcaatgagttctttaggaccgaaggtgcagagaagctgcagaaggcatttgagatcgccaagcgcatccccatcatcacctccgccaaaactctagagcttgccaaagtcacccagttcaaaaccatggagttcgcccgctacatcgaagagcttgccaggagcgtgcctctgccgcctctcattatgaactgcaggactatcatggaggagattatggaggtggttgggctggaggagcaggggcagaattttgtgaggcatactccagagggccaggaggccgcagacagggatgaggtctacacaatccccaactctctgaagcggagcgactcccctgccgctgactcggacgcctcatcgctgcacgagcaacctcagcaaattgccatcaaggtgtcagttcacccgcagtccaaaaaagagcatgcagatgaccaagagggtggacagtttgaagtcaaagatgtagaggagacagaactgtcggcggaacattcccccgaaactgcagaaccttctaccgatgtcacgtccaccgagctaacatctgaagagccaacacctgttgaggtaccagataaggtactgccgccagcttacctggaagccacagagccagcagtgacacatgacaaaaacacctgcattatttacgaaagccatgtctaataccaaccccgaaaagctatgcatatcaagaaaatcaggggctgctccttgtaatacagatgtagtacgcacttgccgctaagccttaccaggagactctcatcccttaggtaggagtgatgccactttaaaaggagaaacacctgcctgcagtgaatgggactggaatttccccagtagagaagggtgcgagaaacatcagggtgcagaattgataccagacagaaggtgtctatgtgataatgagtttcagaggctgatctctgccaaataccttaattggtgatgccttcttggcaaagagtacaccactgtaagatattctgagttcaagaaccctgtccagtgccccctgcattgcttttccttttaaaaagtataggtctgctacaatagcaaatgcacgtacgtgggttttttgcagtttcttctcagttttaattttgcttttcctttataatggggtcattgttattaatactaattgttctttctggtttagtcctcattgccacttttgtccttatgtttccctagaacacgtacctcagagactttggtatcagtcaccagtaccagggctgatatctacaagtcacattacatttgtcatgttccaaagtagttacgaggcttgttatttttttttcattccccaggcctatttccatagatagctttttttgtttgtttccaacgaagctgctgttaaacgaaactgagaaaaactttgccccggaatagcactttaatagtcaaaaatgtgtttacctgtctgattgagtgagccttttggtgagctcagctgagatgtagagggagattgtaaaaggttaaatatacccacaccacccatgaaagtcactgtttaagttacatcatcctccaaataaagactgattctttacctggaaaatatattgcttccaaagacatcagattcagtggattcctgtaggttatagaatattggcttccaaacaggcttgcagggaccatatgctgttggatgacatataaccaggtccacttttatgaactgcatagctgacttggttgtccttaaagaggaaagcgaaaggttagggtaatagcaaagggaactgtgccatcagattttatgccaaaactgttgaataattatgcagtcctgcaagaaagtggttatatgtgaggtgcgtgatgttatggaaagaagacaaaattagtcatccaaaggcttaatacccactgtgccaataaccagctgcctggctttggacaagtctggacctcaggtcccttatctgtagaaggggcagatgacatgagctctgagcactgttgaaatggtatcactgtcacacagaaccaaaccaatattcacatccttgctccttttcacaatgactttaaagatttttgctttcatctcttggtccacctaacattttcatgcttcattacttaaataagaatgttggttttgagaaatagcattttaaacaaattgtggatcttctccttccaaaaaaaccattaggaccacatctgcaattaagatttaatattggtgagaatgagtggttttatttaattttcccttaaaagcaaaggagacagtaatcttaataaattcataggggccgtggccacatcaggtaatggggttatgatgtccaagattgcatggatcacattggtgatgagagcagacccagatgtttagtcctcactctgtcaccatctgaggaggtgaccttggacaactcccttcctctctctgggatttaatctttttcatctgtaaaatatgcaggtagtactcgagggtctacaggatcccttctagttgaaacatttatagttcacagaaagtttgcagtcttccaggataaccaacccccgttgcatgagacaagcaaaaaatgggtccatgaaattggatacttttgccatccaaactttacaacaaacattatctggctctgtaattgagagcagtgggcttggttttaaacctagccttgattagtttgtttatagataactgttgtggaaggtgatagaactagtcatggagtttgatgagacatctcttgaaaaggactgaactgttgacttctggttagaagtgctttgggcagtcacataaagaaatgagcagtgagaaatcaggagaaattatgactcctgttgggctttctggactagcattgtatgtttttgggttgcagaaaagttttaacaccacctcttagaatataaaaattttccagttgtcatggaggtccacagattcattaccatgggtttatatgcccaaagcaacaacagaggacttaagttcattttgtgatactgtatggatgttaccccatcctattcagttgtcattccacccaaacccatgtgtaggtttccacatggaaaggagaaggcatccattccacctagacattgaatagtgataataagctaaaagtgggcagattttcagtggagcaagagcagaaatatgcggccaaagaatgtttcctgattggttttgctgctttagactgcagtggggagagcttatgtagattttcaaaactttctccctctttaaggcatcataatgctctcggttttgataacaactgacataaagggaggttgacttaaaatgggaatttctccttccaaaaatgctacactcttcctatccatcctacagcttctttatgaaatgagaggccctcctgctagaatatgaaatgcagaagacctcatgactttcagctgatttttcaaagataaagtgaactgttcagcttcatagaaattcatgcgagtgtgactgaacgtgtgtgcatacacactcgtgcacattggactcatttgggcagttttaaaagcttcacactaaatccaaagcctcgtcctttgggtcgtatgtagtcgtttgtaaaatcaatttctggcttctgagtcatcctggtcatatctctagcaatgtttttcttgaaattctgaaaatgattcacatatgtgtgtacatttaattcacttagatgatctgtaaacttggatggtatttattctaaatggggaaaacaattttatatggaaaaatctatgtaatttataatggttttgttttatatattatattttcatatctctagggcacatctatcctcatctttttgtataccatacttagcaaaaagaaatactaatacttgactaaaatctctaggaaccaaacgtgatacatgtgatatatagcttctagaaatcgctctaaaaatctctgaatgtctcatccatcccaagcattattgtgctgtgtcattatgtccagaatgatttgtcttggatgcttatgagcatttgtttttcacaactaaggttgaaagacctgacatctcacacaatggggttctggaattcccctttcctcctttatctgtttttattgtttgtttcatttttaattgcaccagtctatgttgtcgaaactttgttttgaagggcaaatgtgagataacaagaaagcaatgtgatggaaagactggatgaatttacctatggctatgtaaattattttaatggactgataagatgtttcaagtctcatgcttggatctttatttattggtgatctaggatctgctcagctctttagcacatgaagaaaatcaggtacaaaggacatttgcatgtttggaacagcatgctctaagccccgtgcagccaacacaaattaacttgactgtagaaacaccaattccagctgctggaagaaatggtttagaaaggcaaaccagataccttttattctgccctaggaaatacagtgttgatcagtgctaaaactcttcagtggcagtcactgtggttcttttaactggggatttcctttcagtgtttcatttggtaccaaaacagaacatttaccttacatttcagatactctgttttctcagcattgttcagatactttcctttaccgctcttcacgtacccttttggcattgagtaattctataaatgtttctatccttggtttttaaaccaagttattcatactcttaaaatatctaccaaatctcattgtattttcacatattttgagcatcaagatactggtcattttaaaaaatccttcagtaaatagcacagtttattttcctaatgacatttttagggtttcttcattgatcaaccaggtttgggttacacaaatcaattgtgggggaaaaatcaaataaaacaattgcttattatattttccaaaggactgagcatttatcttttattcacgaagatatcatatgaggatgataatgatctttaacagattttttagagatagaatttataaagaggctgatactaagaatactacaatcaaaattgaagctagagaatgtaaaaatagaaagtaaatagttctaagaatattctggcataaattatttttatttagccaataaaatagcctccaaatgtatatctcagacaccatagagctgctaacaatgagaatcaaggaagatgcttgcacttagatttcgtttgttgtatttcagtagttctggatgtcctttgttaaaattggaaaatggaaaaatgtctcgacagaaatgtcaatctggtgattctgtgaactgtaaaatgttcacttttaaaaataaagttgtaaacaagttactcatataagttggtattacagtagcaaaaacagaaaaccatgtgatccatcctgtattttgattgatgctttaataaagggtttgcacagctgtgaaaaaaaaaaaaaaaaaaaaaaaaactcgagctcgtgccgaattcggcacgagcggcacgaggccacaaaggcccagttatctctctttcttgctatagggcacaggaggtctttggtgtattagtgtgactctatgtatagcacccaaaggaaagactactgtgcacacgagtgtagcagtcttttatgggtaatctgcaaaacgtaacttgaccaccgtagttctgtttctaataacgccaaacacattttctttcaggttaacatcagatcccagaaaacagtgttctaaagaagacggtggtggatggtgggataatagatgtcatgcagccaatccaaacggcagatactactggggtggacagtacacctgggacatggcaaagcatggcacanatgatggtgtagtatggatgaattggaaggggtcatggttctcaatgaagaaatgagtntgtgtgacacatttttgacatatgttttggattttcttt

SEQ ID NO: 403176 - DNA, 6624 bp, Homo sapiens
gaggagaagaagccactaacattgcaggatcgtgtagcgaaacttctgtaggtacttaataattttagagtactctactttttaattaaaaaatcaacttatggttcattagaaaaaacgtggaaattacaaataatatttttaaagaaaatgaaaaaaaaattcctggaaccccaccactcagaaagtcaccagggaacggcccgctgggtttttttccagactcttccatctgtggactttgctttaagagacgtttaagacttacagcgcagtcgcccgggaaggcctgagaagctttcggaagcaaggtggtttgctcgtgattgcatttgattgcaaggagacaggagcccaagctgtgaccagtgacgcagactggaagtcccgtttactgggagagaagaggttaaggaacacccaggtgaacaattaggtcctccacaatgaagacaggtaatgtggaggaaagagagcttgtcatggttcttgctcaagtaccaactctatggacccaggacaggtttgtcccatgacctgctgtgaacagtgtgttgtctgatagaagattcggttggcaaaccatctctctattgccttacagagcaagcaaagaagatggatcgattgaagagccatctgactgtgtgctttctaccttctgtgccctttttaatcctagtatccactctagccaccgctaagagtgtgactaacagcactttaaatggcactaacgtggtcttgggctctgtgcccgtaatcattgccagaactgaccatatcatagtcaaggaagggaacagtgccttgattaactgtagtgtttatggcatccctgacccacagttcaagtggtataattccattggcaagctgctgaaagaagaagaggatgagaaggagagaggaggaggaaaatggcaaatgcacgacagcggcctcctgaacatcaccaaggtatccttctcagaccgaggtaaatacacgtgtgtggcttctaacatctacggcaccgtgaacaacacggtgaccttgcgcgtcatcttcacttctggagacatgggtgtctactacatggtcgtgtgcctggtggccttcaccatcgtcatggtcctcaatatcacccgcctgtgcatgatgagcagccatctaaagaagactgagaaggccatcaatgagttctttaggaccgaaggtgcagagaagctgcagaaggcatttgagatcgccaagcgcatccccatcatcacctccgccaaaactctagagcttgccaaagtcacccagttcaaaaccatggagttcgcccgctacatcgaagagcttgccaggagcgtgcctctgccgcctctcattatgaactgcaggactatcatggaggagattatggaggtggttgggctggaggagcaggggcagaattttgtgaggcatactccagagggccaggaggccgcagacagggatgaggtctacacaatccccaactctctgaagcggagcgactcccctgccgctgactcggacgcctcatcgctgcacgagcaacctcagcaaattgccatcaaggtgtcagttcacccgcagtccaaaaaagagcatgcagatgaccaagagggtggacagtttgaagtcaaagatgtagaggagacagaactgtcggcggaacattcccccgaaactgcagaaccttctaccgatgtcacgtccaccgagctaacatctgaagagccaacacctgttgaggtaccagataaggtactgccgccagcttacctggaagccacagagccagcagtgacacatgacaaaaacacctgcattatttacgaaagccatgtctaataccaaccccgaaaagctatgcatatcaagaaaatcaggggctgctccttgtaatacagatgtagtacgcacttgccgctaagccttaccaggagactctcatcccttaggtaggagtgatgccactttaaaaggagaaacacctgcctgcagtgaatgggactggaatttccccagtagagaagggtgcgagaaacatcagggtgcagaattgataccagacagaaggtgtctatgtgataatgagtttcagaggctgatctctgccaaataccttaattggtgatgccttcttggcaaagagtacaccactgtaagatattctgagttcaagaaccctgtccagtgccccctgcattgcttttccttttaaaaagtataggtctgctacaatagcaaatgcacgtacgtgggttttttgcagtttcttctcagttttaattttgcttttcctttataatggggtcattgttattaatactaattgttctttctggtttagtcctcattgccacttttgtccttatgtttccctagaacacgtacctcagagactttggtatcagtcaccagtaccagggctgatatctacaagtcacattacatttgtcatgttccaaagtagttacgaggcttgttatttttttttcattccccaggcctatttccatagatagctttttttgtttgtttccaacgaagctgctgttaaacgaaactgagaaaaactttgccccggaatagcactttaatagtcaaaaatgtgtttacctgtctgattgagtgagccttttggtgagctcagctgagatgtagagggagattgtaaaaggttaaatatacccacaccacccatgaaagtcactgtttaagttacatcatcctccaaataaagactgattctttacctggaaaatatattgcttccaaagacatcagattcagtggattcctgtaggttatagaatattggcttccaaacaggcttgcagggaccatatgctgttggatgacatataaccaggtccacttttatgaactgcatagctgacttggttgtccttaaagaggaaagcgaaaggttagggtaatagcaaagggaactgtgccatcagattttatgccaaaactgttgaataattatgcagtcctgcaagaaagtggttatatgtgaggtgcgtgatgttatggaaagaagacaaaattagtcatccaaaggcttaatacccactgtgccaataaccagctgcctggctttggacaagtctggacctcaggtcccttatctgtagaaggggcagatgacatgagctctgagcactgttgaaatggtatcactgtcacacagaaccaaaccaatattcacatccttgctccttttcacaatgactttaaagatttttgctttcatctcttggtccacctaacattttcatgcttcattacttaaataagaatgttggttttgagaaatagcattttaaacaaattgtggatcttctccttccaaaaaaaccattaggaccacatctgcaattaagatttaatattggtgagaatgagtggttttatttaattttcccttaaaagcaaaggagacagtaatcttaataaattcataggggccgtggccacatcaggtaatggggttatgatgtccaagattgcatggatcacattggtgatgagagcagacccagatgtttagtcctcactctgtcaccatctgaggaggtgaccttggacaactcccttcctctctctgggatttaatctttttcatctgtaaaatatgcaggtagtactcgagggtctacaggatcccttctagttgaaacatttatagttcacagaaagtttgcagtcttccaggataaccaacccccgttgcatgagacaagcaaaaaatgggtccatgaaattggatacttttgccatccaaactttacaacaaacattatctggctctgtaattgagagcagtgggcttggttttaaacctagccttgattagtttgtttatagataactgttgtggaaggtgatagaactagtcatggagtttgatgagacatctcttgaaaaggactgaactgttgacttctggttagaagtgctttgggcagtcacataaagaaatgagcagtgagaaatcaggagaaattatgactcctgttgggctttctggactagcattgtatgtttttgggttgcagaaaagttttaacaccacctcttagaatataaaaattttccagttgtcatggaggtccacagattcattaccatgggtttatatgcccaaagcaacaacagaggacttaagttcattttgtgatactgtatggatgttaccccatcctattcagttgtcattccacccaaacccatgtgtaggtttccacatggaaaggagaaggcatccattccacctagacattgaatagtgataataagctaaaagtgggcagattttcagtggagcaagagcagaaatatgcggccaaagaatgtttcctgattggttttgctgctttagactgcagtggggagagcttatgtagattttcaaaactttctccctctttaaggcatcataatgctctcggttttgataacaactgacataaagggaggttgacttaaaatgggaatttctccttccaaaaatgctacactcttcctatccatcctacagcttctttatgaaatgagaggccctcctgctagaatatgaaatgcagaagacctcatgactttcagctgatttttcaaagataaagtgaactgttcagcttcatagaaattcatgcgagtgtgactgaacgtgtgtgcatacacactcgtgcacattggactcatttgggcagttttaaaagcttcacactaaatccaaagcctcgtcctttgggtcgtatgtagtcgtttgtaaaatcaatttctggcttctgagtcatcctggtcatatctctagcaatgtttttcttgaaattctgaaaatgattcacatatgtgtgtacatttaattcacttagatgatctgtaaacttggatggtatttattctaaatggggaaaacaattttatatggaaaaatctatgtaatttataatggttttgttttatatattatattttcatatctctagggcacatctatcctcatctttttgtataccatacttagcaaaaagaaatactaatacttgactaaaatctctaggaaccaaacgtgatacatgtgatatatagcttctagaaatcgctctaaaaatctctgaatgtctcatccatcccaagcattattgtgctgtgtcattatgtccagaatgatttgtcttggatgcttatgagcatttgtttttcacaactaaggttgaaagacctgacatctcacacaatggggttctggaattcccctttcctcctttatctgtttttattgtttgtttcatttttaattgcaccagtctatgttgtcgaaactttgttttgaagggcaaatgtgagataacaagaaagcaatgtgatggaaagactggatgaatttacctatggctatgtaaattattttaatggactgataagatgtttcaagtctcatgcttggatctttatttattggtgatctaggatctgctcagctctttagcacatgaagaaaatcaggtacaaaggacatttgcatgtttggaacagcatgctctaagccccgtgcagccaacacaaattaacttgactgtagaaacaccaattccagctgctggaagaaatggtttagaaaggcaaaccagataccttttattctgccctaggaaatacagtgttgatcagtgctaaaactcttcagtggcagtcactgtggttcttttaactggggatttcctttcagtgtttcatttggtaccaaaacagaacatttaccttacatttcagatactctgttttctcagcattgttcagatactttcctttaccgctcttcacgtacccttttggcattgagtaattctataaatgtttctatccttggtttttaaaccaagttattcatactcttaaaatatctaccaaatctcattgtattttcacatattttgagcatcaagatactggtcattttaaaaaatccttcagtaaatagcacagtttattttcctaatgacatttttagggtttcttcattgatcaaccaggtttgggttacacaaatcaattgtgggggaaaaatcaaataaaacaattgcttattatattttccaaaggactgagcatttatcttttattcacgaagatatcatatgaggatgataatgatctttaacagattttttagagatagaatttataaagaggctgatactaagaatactacaatcaaaattgaagctagagaatgtaaaaatagaaagtaaatagttctaagaatattctggcataaattatttttatttagccaataaaatagcctccaaatgtatatctcagacaccatagagctgctaacaatgagaatcaaggaagatgcttgcacttagatttcgtttgttgtatttcagtagttctggatgtcctttgttaaaattggaaaatggaaaaatgtctcgacagaaatgtcaatctggtgattctgtgaactgtaaaatgttcacttttaaaaataaagttgtaaacaagttactcatataagttggtattacagtagcaaaaacagaaaaccatgtgatccatcctgtattttgattgatgctttaataaagggtttgcacagctgtg

SEQ ID NO: 403177 - DNA, 6339 bp, Homo sapiens
ggccgctgtcgggctggccatggcgaggggtgcacggcggccacctgagtggcgcggcggtgtcagagcccaagctgtgaccagtgacgcagactggaagtcccgtttactgggagagaagaggttaaggaacacccaggtgaacaattaggtcctccacaatgaagacaggtaatgtggaggaaagagagcttgtcatggttcttgctcaagtaccaactctatggacccaggacaggtttgtcccatgacctgctgtgaacagtgtgttgtctgatagaagattcggttggcaaaccatctctctattgccttacagagcaagcaaagaagatggatcgattgaagagccatctgactgtgtgctttctaccttctgtgccctttttaatcctagtatccactctagccaccgctaagagtgtgactaacagcactttaaatggcactaacgtggtcttgggctctgtgcccgtaatcattgccagaactgaccatatcatagtcaaggaagggaacagtgccttgattaactgtagtgtttatggcatccctgacccacagttcaagtggtataattccattggcaagctgctgaaagaagaagaggatgagaaggagagaggaggaggaaaatggcaaatgcacgacagcggcctcctgaacatcaccaaggtatccttctcagaccgaggtaaatacacgtgtgtggcttctaacatctacggcaccgtgaacaacacggtgaccttgcgcgtcatcttcacttctggagacatgggtgtctactacatggtcgtgtgcctggtggccttcaccatcgtcatggtcctcaatatcacccgcctgtgcatgatgagcagccatctaaagaagactgagaaggccatcaatgagttctttaggaccgaaggtgcagagaagctgcagaaggcatttgagatcgccaagcgcatccccatcatcacctccgccaaaactctagagcttgccaaagtcacccagttcaaaaccatggagttcgcccgctacatcgaagagcttgccaggagcgtgcctctgccgcctctcattatgaactgcaggactatcatggaggagattatggaggtggttgggctggaggagcaggggcagaattttgtgaggcatactccagagggccaggaggccgcagacagggatgaggtctacacaatccccaactctctgaagcggagcgactcccctgccgctgactcggacgcctcatcgctgcacgagcaacctcagcaaattgccatcaaggtgtcagttcacccgcagtccaaaaaagagcatgcagatgaccaagagggtggacagtttgaagtcaaagatgtagaggagacagaactgtcggcggaacattcccccgaaactgcagaaccttctaccgatgtcacgtccaccgagctaacatctgaagagccaacacctgttgaggtaccagataaggtactgccgccagcttacctggaagccacagagccagcagtgacacatgacaaaaacacctgcattatttacgaaagccatgtctaataccaaccccgaaaagctatgcatatcaagaaaatcaggggctgctccttgtaatacagatgtagtacgcacttgccgctaagccttaccaggagactctcatcccttaggtaggagtgatgccactttaaaaggagaaacacctgcctgcagtgaatgggactggaatttccccagtagagaagggtgcgagaaacatcagggtgcagaattgataccagacagaaggtgtctatgtgataatgagtttcagaggctgatctctgccaaataccttaattggtgatgccttcttggcaaagagtacaccactgtaagatattctgagttcaagaaccctgtccagtgccccctgcattgcttttccttttaaaaagtataggtctgctacaatagcaaatgcacgtacgtgggttttttgcagtttcttctcagttttaattttgcttttcctttataatggggtcattgttattaatactaattgttctttctggtttagtcctcattgccacttttgtccttatgtttccctagaacacgtacctcagagactttggtatcagtcaccagtaccagggctgatatctacaagtcacattacatttgtcatgttccaaagtagttacgaggcttgttatttttttttcattccccaggcctatttccatagatagctttttttgtttgtttccaacgaagctgctgttaaacgaaactgagaaaaactttgccccggaatagcactttaatagtcaaaaatgtgtttacctgtctgattgagtgagccttttggtgagctcagctgagatgtagagggagattgtaaaaggttaaatatacccacaccacccatgaaagtcactgtttaagttacatcatcctccaaataaagactgattctttacctggaaaatatattgcttccaaagacatcagattcagtggattcctgtaggttatagaatattggcttccaaacaggcttgcagggaccatatgctgttggatgacatataaccaggtccacttttatgaactgcatagctgacttggttgtccttaaagaggaaagcgaaaggttagggtaatagcaaagggaactgtgccatcagattttatgccaaaactgttgaataattatgcagtcctgcaagaaagtggttatatgtgaggtgcgtgatgttatggaaagaagacaaaattagtcatccaaaggcttaatacccactgtgccaataaccagctgcctggctttggacaagtctggacctcaggtcccttatctgtagaaggggcagatgacatgagctctgagcactgttgaaatggtatcactgtcacacagaaccaaaccaatattcacatccttgctccttttcacaatgactttaaagatttttgctttcatctcttggtccacctaacattttcatgcttcattacttaaataagaatgttggttttgagaaatagcattttaaacaaattgtggatcttctccttccaaaaaaaccattaggaccacatctgcaattaagatttaatattggtgagaatgagtggttttatttaattttcccttaaaagcaaaggagacagtaatcttaataaattcataggggccgtggccacatcaggtaatggggttatgatgtccaagattgcatggatcacattggtgatgagagcagacccagatgtttagtcctcactctgtcaccatctgaggaggtgaccttggacaactcccttcctctctctgggatttaatctttttcatctgtaaaatatgcaggtagtactcgagggtctacaggatcccttctagttgaaacatttatagttcacagaaagtttgcagtcttccaggataaccaacccccgttgcatgagacaagcaaaaaatgggtccatgaaattggatacttttgccatccaaactttacaacaaacattatctggctctgtaattgagagcagtgggcttggttttaaacctagccttgattagtttgtttatagataactgttgtggaaggtgatagaactagtcatggagtttgatgagacatctcttgaaaaggactgaactgttgacttctggttagaagtgctttgggcagtcacataaagaaatgagcagtgagaaatcaggagaaattatgactcctgttgggctttctggactagcattgtatgtttttgggttgcagaaaagttttaacaccacctcttagaatataaaaattttccagttgtcatggaggtccacagattcattaccatgggtttatatgcccaaagcaacaacagaggacttaagttcattttgtgatactgtatggatgttaccccatcctattcagttgtcattccacccaaacccatgtgtaggtttccacatggaaaggagaaggcatccattccacctagacattgaatagtgataataagctaaaagtgggcagattttcagtggagcaagagcagaaatatgcggccaaagaatgtttcctgattggttttgctgctttagactgcagtggggagagcttatgtagattttcaaaactttctccctctttaaggcatcataatgctctcggttttgataacaactgacataaagggaggttgacttaaaatgggaatttctccttccaaaaatgctacactcttcctatccatcctacagcttctttatgaaatgagaggccctcctgctagaatatgaaatgcagaagacctcatgactttcagctgatttttcaaagataaagtgaactgttcagcttcatagaaattcatgcgagtgtgactgaacgtgtgtgcatacacactcgtgcacattggactcatttgggcagttttaaaagcttcacactaaatccaaagcctcgtcctttgggtcgtatgtagtcgtttgtaaaatcaatttctggcttctgagtcatcctggtcatatctctagcaatgtttttcttgaaattctgaaaatgattcacatatgtgtgtacatttaattcacttagatgatctgtaaacttggatggtatttattctaaatggggaaaacaattttatatggaaaaatctatgtaatttataatggttttgttttatatattatattttcatatctctagggcacatctatcctcatctttttgtataccatacttagcaaaaagaaatactaatacttgactaaaatctctaggaaccaaacgtgatacatgtgatatatagcttctagaaatcgctctaaaaatctctgaatgtctcatccatcccaagcattattgtgctgtgtcattatgtccagaatgatttgtcttggatgcttatgagcatttgtttttcacaactaaggttgaaagacctgacatctcacacaatggggttctggaattcccctttcctcctttatctgtttttattgtttgtttcatttttaattgcaccagtctatgttgtcgaaactttgttttgaagggcaaatgtgagataacaagaaagcaatgtgatggaaagactggatgaatttacctatggctatgtaaattattttaatggactgataagatgtttcaagtctcatgcttggatctttatttattggtgatctaggatctgctcagctctttagcacatgaagaaaatcaggtacaaaggacatttgcatgtttggaacagcatgctctaagccccgtgcagccaacacaaattaacttgactgtagaaacaccaattccagctgctggaagaaatggtttagaaaggcaaaccagataccttttattctgccctaggaaatacagtgttgatcagtgctaaaactcttcagtggcagtcactgtggttcttttaactggggatttcctttcagtgtttcatttggtaccaaaacagaacatttaccttacatttcagatactctgttttctcagcattgttcagatactttcctttaccgctcttcacgtacccttttggcattgagtaattctataaatgtttctatccttggtttttaaaccaagttattcatactcttaaaatatctaccaaatctcattgtattttcacatattttgagcatcaagatactggtcattttaaaaaatccttcagtaaatagcacagtttattttcctaatgacatttttagggtttcttcattgatcaaccaggtttgggttacacaaatcaattgtgggggaaaaatcaaataaaacaattgcttattatattttccaaaggactgagcatttatcttttattcacgaagatatcatatgaggatgataatgatctttaacagattttttagagatagaatttataaagaggctgatactaagaatactacaatcaaaattgaagctagagaatgtaaaaatagaaagtaaatagttctaagaatattctggcataaattatttttatttagccaataaaatagcctccaaatgtatatctcagacaccatagagctgctaacaatgagaatcaaggaagatgcttgcacttagatttcgtttgttgtatttcagtagttctggatgtcctttgttaaaattggaaaatggaaaaatgtctcgacagaaatgtcaatctggtgattctgtgaactgtaaaatgttcacttttaaaaataaagttgtaaacaagttactcatataagttggtattacagtagcaaaaacagaaaaccatgtgatccatcctgtattttgattgatgctttaataaagggtttgcacagctgtg

SEQ ID NO: 403178 - DNA, 6101 bp, Homo sapiens
actgcaggccaggtaccttagcaggtctttctgcagggctgagctatcgctagggaacccacggtgactgaatcaaagggaagaaagacccaagacctggatctcccttttacatggaccctaaagcaaaggtcctgtaggtgaaaaatgttgaagagcctctcactcagactgagtgaatatgagaagaactagatggaaaaggcatcctcactaccgatagcaaggtcagacagtgttaggatttgtgccggaacatgtgtgtgtacatggcatgcacatgcacaaaaaggcgttcaaaaatcatcggtgagtcactcaaggagcacactgccattcactttgtgattagcctggaaaggagcaatttcatgtctcgtttctgctgaaaaggaaaatggcaaatgcacgacagcggcctcctgaacatcaccaaggtatccttctcagaccgaggtaaatacacgtgtgtggcttctaacatctacggcaccgtgaacaacacggtgaccttgcgcgtcatcttcacttctggagacatgggtgtctactacatggtcgtgtgcctggtggccttcaccatcgtcatggtcctcaatatcacccgcctgtgcatgatgagcagccatctaaagaagactgagaaggccatcaatgagttctttaggaccgaaggtgcagagaagctgcagaaggcatttgagatcgccaagcgcatccccatcatcacctccgccaaaactctagagcttgccaaagtcacccagttcaaaaccatggagttcgcccgctacatcgaagagcttgccaggagcgtgcctctgccgcctctcattatgaactgcaggactatcatggaggagattatggaggtggttgggctggaggagcaggggcagaattttgtgaggcatactccagagggccaggaggccgcagacagggatgaggtctacacaatccccaactctctgaagcggagcgactcccctgccgctgactcggacgcctcatcgctgcacgagcaacctcagcaaattgccatcaaggtgtcagttcacccgcagtccaaaaaagagcatgcagatgaccaagagggtggacagtttgaagtcaaagatgtagaggagacagaactgtcggcggaacattcccccgaaactgcagaaccttctaccgatgtcacgtccaccgagctaacatctgaagagccaacacctgttgaggtaccagataaggtactgccgccagcttacctggaagccacagagccagcagtgacacatgacaaaaacacctgcattatttacgaaagccatgtctaataccaaccccgaaaagctatgcatatcaagaaaatcaggggctgctccttgtaatacagatgtagtacgcacttgccgctaagccttaccaggagactctcatcccttaggtaggagtgatgccactttaaaaggagaaacacctgcctgcagtgaatgggactggaatttccccagtagagaagggtgcgagaaacatcagggtgcagaattgataccagacagaaggtgtctatgtgataatgagtttcagaggctgatctctgccaaataccttaattggtgatgccttcttggcaaagagtacaccactgtaagatattctgagttcaagaaccctgtccagtgccccctgcattgcttttccttttaaaaagtataggtctgctacaatagcaaatgcacgtacgtgggttttttgcagtttcttctcagttttaattttgcttttcctttataatggggtcattgttattaatactaattgttctttctggtttagtcctcattgccacttttgtccttatgtttccctagaacacgtacctcagagactttggtatcagtcaccagtaccagggctgatatctacaagtcacattacatttgtcatgttccaaagtagttacgaggcttgttatttttttttcattccccaggcctatttccatagatagctttttttgtttgtttccaacgaagctgctgttaaacgaaactgagaaaaactttgccccggaatagcactttaatagtcaaaaatgtgtttacctgtctgattgagtgagccttttggtgagctcagctgagatgtagagggagattgtaaaaggttaaatatacccacaccacccatgaaagtcactgtttaagttacatcatcctccaaataaagactgattctttacctggaaaatatattgcttccaaagacatcagattcagtggattcctgtaggttatagaatattggcttccaaacaggcttgcagggaccatatgctgttggatgacatataaccaggtccacttttatgaactgcatagctgacttggttgtccttaaagaggaaagcgaaaggttagggtaatagcaaagggaactgtgccatcagattttatgccaaaactgttgaataattatgcagtcctgcaagaaagtggttatatgtgaggtgcgtgatgttatggaaagaagacaaaattagtcatccaaaggcttaatacccactgtgccaataaccagctgcctggctttggacaagtctggacctcaggtcccttatctgtagaaggggcagatgacatgagctctgagcactgttgaaatggtatcactgtcacacagaaccaaaccaatattcacatccttgctccttttcacaatgactttaaagatttttgctttcatctcttggtccacctaacattttcatgcttcattacttaaataagaatgttggttttgagaaatagcattttaaacaaattgtggatcttctccttccaaaaaaaccattaggaccacatctgcaattaagatttaatattggtgagaatgagtggttttatttaattttcccttaaaagcaaaggagacagtaatcttaataaattcataggggccgtggccacatcaggtaatggggttatgatgtccaagattgcatggatcacattggtgatgagagcagacccagatgtttagtcctcactctgtcaccatctgaggaggtgaccttggacaactcccttcctctctctgggatttaatctttttcatctgtaaaatatgcaggtagtactcgagggtctacaggatcccttctagttgaaacatttatagttcacagaaagtttgcagtcttccaggataaccaacccccgttgcatgagacaagcaaaaaatgggtccatgaaattggatacttttgccatccaaactttacaacaaacattatctggctctgtaattgagagcagtgggcttggttttaaacctagccttgattagtttgtttatagataactgttgtggaaggtgatagaactagtcatggagtttgatgagacatctcttgaaaaggactgaactgttgacttctggttagaagtgctttgggcagtcacataaagaaatgagcagtgagaaatcaggagaaattatgactcctgttgggctttctggactagcattgtatgtttttgggttgcagaaaagttttaacaccacctcttagaatataaaaattttccagttgtcatggaggtccacagattcattaccatgggtttatatgcccaaagcaacaacagaggacttaagttcattttgtgatactgtatggatgttaccccatcctattcagttgtcattccacccaaacccatgtgtaggtttccacatggaaaggagaaggcatccattccacctagacattgaatagtgataataagctaaaagtgggcagattttcagtggagcaagagcagaaatatgcggccaaagaatgtttcctgattggttttgctgctttagactgcagtggggagagcttatgtagattttcaaaactttctccctctttaaggcatcataatgctctcggttttgataacaactgacataaagggaggttgacttaaaatgggaatttctccttccaaaaatgctacactcttcctatccatcctacagcttctttatgaaatgagaggccctcctgctagaatatgaaatgcagaagacctcatgactttcagctgatttttcaaagataaagtgaactgttcagcttcatagaaattcatgcgagtgtgactgaacgtgtgtgcatacacactcgtgcacattggactcatttgggcagttttaaaagcttcacactaaatccaaagcctcgtcctttgggtcgtatgtagtcgtttgtaaaatcaatttctggcttctgagtcatcctggtcatatctctagcaatgtttttcttgaaattctgaaaatgattcacatatgtgtgtacatttaattcacttagatgatctgtaaacttggatggtatttattctaaatggggaaaacaattttatatggaaaaatctatgtaatttataatggttttgttttatatattatattttcatatctctagggcacatctatcctcatctttttgtataccatacttagcaaaaagaaatactaatacttgactaaaatctctaggaaccaaacgtgatacatgtgatatatagcttctagaaatcgctctaaaaatctctgaatgtctcatccatcccaagcattattgtgctgtgtcattatgtccagaatgatttgtcttggatgcttatgagcatttgtttttcacaactaaggttgaaagacctgacatctcacacaatggggttctggaattcccctttcctcctttatctgtttttattgtttgtttcatttttaattgcaccagtctatgttgtcgaaactttgttttgaagggcaaatgtgagataacaagaaagcaatgtgatggaaagactggatgaatttacctatggctatgtaaattattttaatggactgataagatgtttcaagtctcatgcttggatctttatttattggtgatctaggatctgctcagctctttagcacatgaagaaaatcaggtacaaaggacatttgcatgtttggaacagcatgctctaagccccgtgcagccaacacaaattaacttgactgtagaaacaccaattccagctgctggaagaaatggtttagaaaggcaaaccagataccttttattctgccctaggaaatacagtgttgatcagtgctaaaactcttcagtggcagtcactgtggttcttttaactggggatttcctttcagtgtttcatttggtaccaaaacagaacatttaccttacatttcagatactctgttttctcagcattgttcagatactttcctttaccgctcttcacgtacccttttggcattgagtaattctataaatgtttctatccttggtttttaaaccaagttattcatactcttaaaatatctaccaaatctcattgtattttcacatattttgagcatcaagatactggtcattttaaaaaatccttcagtaaatagcacagtttattttcctaatgacatttttagggtttcttcattgatcaaccaggtttgggttacacaaatcaattgtgggggaaaaatcaaataaaacaattgcttattatattttccaaaggactgagcatttatcttttattcacgaagatatcatatgaggatgataatgatctttaacagattttttagagatagaatttataaagaggctgatactaagaatactacaatcaaaattgaagctagagaatgtaaaaatagaaagtaaatagttctaagaatattctggcataaattatttttatttagccaataaaatagcctccaaatgtatatctcagacaccatagagctgctaacaatgagaatcaaggaagatgcttgcacttagatttcgtttgttgtatttcagtagttctggatgtcctttgttaaaattggaaaatggaaaaatgtctcgacagaaatgtcaatctggtgattctgtgaactgtaaaatgttcacttttaaaaataaagttgtaaacaagttactcatataagttggtattacagtagcaaaaacagaaaaccatgtgatccatcctgtattttgattgatgctttaataaagggtttgcacagctgtg

SEQ ID NO: 403179 - DNA, 3561 bp, Homo sapiens
actgcaggccaggtaccttagcaggtctttctgcagggctgagctatcgctagggaacccacggtgactgaatcaaagggaagaaagacccaagacctggatctcccttttacatggaccctaaagcaaaggaaaatggcaaatgcacgacagcggcctcctgaacatcaccaaggtatccttctcagaccgaggtaaatacacgtgtgtggcttctaacatctacggcaccgtgaacaacacggtgaccttgcgcgtcatcttcacttctggagacatgggtgtctactacatggtcgtgtgcctggtggccttcaccatcgtcatggtcctcaatatcacccgcctgtgcatgatgagcagccatctaaagaagactgagaaggccatcaatgagttctttaggaccgaaggtgcagagaagctgcagaaggcatttgagatcgccaagcgcatccccatcatcacctccgccaaaactctagagcttgccaaagtcacccagttcaaaaccatggagttcgcccgctacatcgaagagcttgccaggagcgtgcctctgccgcctctcattatgaactgcaggactatcatggaggagattatggaggtggttgggctggaggagcaggggcagaattttgtgaggcatactccagagggccaggaggccgcagacagggatgaggtctacacaatccccaactctctgaagcggagcgactcccctgccgctgactcggacgcctcatcgctgcacgagcaacctcagcaaattgccatcaaggtgtcagttcacccgcagtccaaaaaagagcatgcagatgaccaagagggtggacagtttgaagtcaaagatgtagaggagacagaactgtcggcggaacattcccccgaaactgcagaaccttctaccgatgtcacgtccaccgagctaacatctgaagagccaacacctgttgaggtaccagataaggtactgccgccagcttacctggaagccacagagccagcagtgacacatgacaaaaacacctgcattatttacgaaagccatgtctaataccaaccccgaaaagctatgcatatcaagaaaatcaggggctgctccttgtaatacagatgtagtacgcacttgccgctaagccttaccaggagactctcatcccttaggtaggagtgatgccactttaaaaggagaaacacctgcctgcagtgaatgggactggaatttccccagtagagaagggtgcgagaaacatcagggtgcagaattgataccagacagaaggtgtctatgtgataatgagtttcagaggctgatctctgccaaataccttaattggtgatgccttcttggcaaagagtacaccactgtaagatattctgagttcaagaaccctgtccagtgccccctgcattgcttttccttttaaaaagtataggtctgctacaatagcaaatgcacgtacgtgggttttttgcagtttcttctcagttttaattttgcttttcctttataatggggtcattgttattaatactaattgttctttctggtttagtcctcattgccacttttgtccttatgtttccctagaacacgtacctcagagactttggtatcagtcaccagtaccagggctgatatctacaagtcacattacatttgtcatgttccaaagtagttacgaggcttgttatttttttttcattccccaggcctatttccatagatagctttttttgtttgtttccaacgaagctgctgttaaacgaaactgagaaaaactttgccccggaatagcactttaatagtcaaaaatgtgtttacctgtctgattgagtgagccttttggtgagctcagctgagatgtagagggagattgtaaaaggttaaatatacccacaccacccatgaaagtcactgtttaagttacatcatcctccaaataaagactgattctttacctggaaaatatattgcttccaaagacatcagattcagtggattcctgtaggttatagaatattggcttccaaacaggcttgcagggaccatatgctgttggatgacatataaccaggtccacttttatgaactgcatagctgacttggttgtccttaaagaggaaagcgaaaggttagggtaatagcaaagggaactgtgccatcagattttatgccaaaactgttgaataattatgcagtcctgcaagaaagtggttatatgtgaggtgcgtgatgttatggaaagaagacaaaattagtcatccaaaggcttaatacccactgtgccaataaccagctgcctggctttggacaagtctggacctcaggtcccttatctgtagaaggggcagatgacatgagctctgagcactgttgaaatggtatcactgtcacacagaaccaaaccaatattcacatccttgctccttttcacaatgactttaaagatttttgctttcatctcttggtccacctaacattttcatgcttcattacttaaataagaatgttggttttgagaaatagcattttaaacaaattgtggatcttctccttccaaaaaaaccattaggaccacatctgcaattaagatttaatattggtgagaatgagtggttttatttaattttcccttaaaagcaaaggagacagtaatcttaataaattcataggggccgtggccacatcaggtaatggggttatgatgtccaagattgcatggatcacattggtgatgagagcagacccagatgtttagtcctcactctgtcaccatctgaggaggtgaccttggacaactcccttcctctctctgggatttaatctttttcatctgtaaaatatgcaggtagtactcgagggtctacaggatcccttctagttgaaacatttatagttcacagaaagtttgcagtcttccaggataaccaacccccgttgcatgagacaagcaaaaaatgggtccatgaaattggatacttttgccatccaaactttacaacaaacattatctggctctgtaattgagagcagtgggcttggttttaaacctagccttgattagtttgtttatagataactgttgtggaaggtgatagaactagtcatggagtttgatgagacatctcttgaaaaggactgaactgttgacttctggttagaagtgctttgggcagtcacataaagaaatgagcagtgagaaatcaggagaaattatgactcctgttgggctttctggactagcattgtatgtttttgggttgcagaaaagttttaacaccacctcttagaatataaaaattttccagttgtcatggaggtccacagattcattaccatgggtttatatgctctaaggtcactaaccagagggactttaaaatttcattctctgtggaacactggtattcggaagtgttactcctcaatccttatctcacttcgactattttctaactcctctaatgtgtgtaagggtttctcacaatgtgaacagggcttcaatgtatcccattttcactctttggtacatatgtatcagttgttcg

SEQ ID NO: 403180 - DNA, 1053 bp, Homo sapiens
ccgctctagagtatccccgccactgaagagttttagcactgatcaacactgtatttcctagggcagaataaaaggtatctggtttgccttaggaaatacagtgttgatcagtgctaaaactcttcagtggcagtcactgtggttcttttaactggggatttcctttcagtgtttcatttggtaccaaaacagaacatttaccttacatttcagatactctgttttctcagcattgttcagatactttcctttaccgctcttcacgtacccttttggcattgagtaattctataaatgtttctatccttggtttttaaaccaagttattcatactcttaaaatatctaccaaatctcattgtattttcacatattttgagcatcaagatactggtcattttaaaaaatccttcagtaaatagcacagtttattttcctaatgacatttttagggtttcttcattgatcaaccaggtttgggttacacaaatcaattgtgggggaaaaatcaaataaaacaattgcttattatattttccaaaggactgagcatttatcttttattcacgaagatatcatatgaggatgataatgatctttaacagattttttagagatagaatttataaagaggctgatactaagaatactacaatcaaaattgaagctagagaatgtaaaaatagaaagtaaatagttctaagaatattctggcataaattatttttatttagccaataaaatagcctccaaatgtatatctcagacaccatagagctgctaacaatgagaatcaaggaagatgcttgcacttagatttcgtttgttgtatttcagtagttctggatgtcctttgttaaaattggaaaatggaaaaatgtctcgacagaaatgtcaatctggtgattctgtgaactgtaaaatgttcacttttaaaaataaagttgtaaacaagttactcatataagttggtattacagtagcaaaaacagaaaaccatgtgatccatcctgtattttgattgatgctttaataaagggtttgcacagctgtg

SEQ ID NO: 403181 - DNA, 1391 bp, Homo sapiens
acttgcacatggcctgggcctttgggctccccactgtgaggcctctcacggtgggacccaggctttgggtagctggctccatgctctagcaaagcctcacttagcagtggggaggtcccaagaagagaagcgagatacccatataaagcaagcctgcttagccttccagggtccttcaaatcttaccaaatgaaagccagcttgctccacctactgtcaagccagcatctcattctccccattcttgtctcttaaacaactactcaaaaaaggagagccatgaaagtcaccagcctagaaaattacagtcgacttcatgagcttcatttggatttctcatcatgcaatagcaaagtcacagttattcctactgagatcacaatgatgctgccagagcctcccctgagcttgagagccctcctcttctaagcagcatttggaggttcttgctcaagtaccaactctatggacccaggacagagcaagcaaagaagatggatcgattgaagagccatctgactgtgtgctttctaccttctgtgccctttttaatcctagtatccactctagccaccgctaagagtgtgactaacagcactttaaatggcactaacgtggtcttgggctctgtgcccgtaatcattgccagaactgaccatatcatagtcaaggaagggaacagtgccttgattaactgtagtgtttatggcatccctgacccacagttcaagtggtataattccattggcaagctgctgaaagaagaagaggatgagaaggagagaggaggaggtaggctttaaagttgtatcaaatgtcataataaaatataaacaggagctttggagccagcacccgtgatgttagttcttctcatgcaaatgatttaaagatctcatcttgtcttgtttttctaaggcaggagagaatatatatccttaaggattcaaagaagcaattaattcatttttttccctcattgacacagaagacaaaggacaaacacagaagtctttttaaaggcttcttggaattttgtaatataatacatccaatacattatagagacaaatgtaaaatggattttcctaaataatatattcaatttttaagggagttttgttttctttcatggagatggctggaataaacaatatagccattgtttatcattaaatgtccatttaattcattggccgtggatttaaagaccacacttctgaaagaaacctcagtgcaagtctcagccactggctgggattcctggagacctggctgcagtttctaggctgaggcagggagggagggaggatgcaataacaaggaaggatgtgggacaacaggagactgcttggtttttaataaatgcatttctgaccaaaaagtgtgag

SEQ ID NO: 403182 - DNA, 6205 bp, Homo sapiens
ggccgctgtcgggctggccatggcgaggggtgcacggcggccacctgagtggcgcggcggtgtcaggttcttgctcaagtaccaactctatggacccaggacaggtttgtcccatgacctgctgtgaacagtgtgttgtctgatagaagattcggttggcaaaccatctctctattgccttacagagcaagcaaagaagatggatcgattgaagagccatctgactgtgtgctttctaccttctgtgccctttttaatcctagtatccactctagccaccgctaagagtgtgactaacagcactttaaatggcactaacgtggtcttgggctctgtgcccgtaatcattgccagaactgaccatatcatagtcaaggaagggaacagtgccttgattaactgtagtgtttatggcatccctgacccacagttcaagtggtataattccattggcaagctgctgaaagaagaagaggatgagaaggagagaggaggaggaaaatggcaaatgcacgacagcggcctcctgaacatcaccaaggtatccttctcagaccgaggtaaatacacgtgtgtggcttctaacatctacggcaccgtgaacaacacggtgaccttgcgcgtcatcttcacttctggagacatgggtgtctactacatggtcgtgtgcctggtggccttcaccatcgtcatggtcctcaatatcacccgcctgtgcatgatgagcagccatctaaagaagactgagaaggccatcaatgagttctttaggaccgaaggtgcagagaagctgcagaaggcatttgagatcgccaagcgcatccccatcatcacctccgccaaaactctagagcttgccaaagtcacccagttcaaaaccatggagttcgcccgctacatcgaagagcttgccaggagcgtgcctctgccgcctctcattatgaactgcaggactatcatggaggagattatggaggtggttgggctggaggagcaggggcagaattttgtgaggcatactccagagggccaggaggccgcagacagggatgaggtctacacaatccccaactctctgaagcggagcgactcccctgccgctgactcggacgcctcatcgctgcacgagcaacctcagcaaattgccatcaaggtgtcagttcacccgcagtccaaaaaagagcatgcagatgaccaagagggtggacagtttgaagtcaaagatgtagaggagacagaactgtcggcggaacattcccccgaaactgcagaaccttctaccgatgtcacgtccaccgagctaacatctgaagagccaacacctgttgaggtaccagataaggtactgccgccagcttacctggaagccacagagccagcagtgacacatgacaaaaacacctgcattatttacgaaagccatgtctaataccaaccccgaaaagctatgcatatcaagaaaatcaggggctgctccttgtaatacagatgtagtacgcacttgccgctaagccttaccaggagactctcatcccttaggtaggagtgatgccactttaaaaggagaaacacctgcctgcagtgaatgggactggaatttccccagtagagaagggtgcgagaaacatcagggtgcagaattgataccagacagaaggtgtctatgtgataatgagtttcagaggctgatctctgccaaataccttaattggtgatgccttcttggcaaagagtacaccactgtaagatattctgagttcaagaaccctgtccagtgccccctgcattgcttttccttttaaaaagtataggtctgctacaatagcaaatgcacgtacgtgggttttttgcagtttcttctcagttttaattttgcttttcctttataatggggtcattgttattaatactaattgttctttctggtttagtcctcattgccacttttgtccttatgtttccctagaacacgtacctcagagactttggtatcagtcaccagtaccagggctgatatctacaagtcacattacatttgtcatgttccaaagtagttacgaggcttgttatttttttttcattccccaggcctatttccatagatagctttttttgtttgtttccaacgaagctgctgttaaacgaaactgagaaaaactttgccccggaatagcactttaatagtcaaaaatgtgtttacctgtctgattgagtgagccttttggtgagctcagctgagatgtagagggagattgtaaaaggttaaatatacccacaccacccatgaaagtcactgtttaagttacatcatcctccaaataaagactgattctttacctggaaaatatattgcttccaaagacatcagattcagtggattcctgtaggttatagaatattggcttccaaacaggcttgcagggaccatatgctgttggatgacatataaccaggtccacttttatgaactgcatagctgacttggttgtccttaaagaggaaagcgaaaggttagggtaatagcaaagggaactgtgccatcagattttatgccaaaactgttgaataattatgcagtcctgcaagaaagtggttatatgtgaggtgcgtgatgttatggaaagaagacaaaattagtcatccaaaggcttaatacccactgtgccaataaccagctgcctggctttggacaagtctggacctcaggtcccttatctgtagaaggggcagatgacatgagctctgagcactgttgaaatggtatcactgtcacacagaaccaaaccaatattcacatccttgctccttttcacaatgactttaaagatttttgctttcatctcttggtccacctaacattttcatgcttcattacttaaataagaatgttggttttgagaaatagcattttaaacaaattgtggatcttctccttccaaaaaaaccattaggaccacatctgcaattaagatttaatattggtgagaatgagtggttttatttaattttcccttaaaagcaaaggagacagtaatcttaataaattcataggggccgtggccacatcaggtaatggggttatgatgtccaagattgcatggatcacattggtgatgagagcagacccagatgtttagtcctcactctgtcaccatctgaggaggtgaccttggacaactcccttcctctctctgggatttaatctttttcatctgtaaaatatgcaggtagtactcgagggtctacaggatcccttctagttgaaacatttatagttcacagaaagtttgcagtcttccaggataaccaacccccgttgcatgagacaagcaaaaaatgggtccatgaaattggatacttttgccatccaaactttacaacaaacattatctggctctgtaattgagagcagtgggcttggttttaaacctagccttgattagtttgtttatagataactgttgtggaaggtgatagaactagtcatggagtttgatgagacatctcttgaaaaggactgaactgttgacttctggttagaagtgctttgggcagtcacataaagaaatgagcagtgagaaatcaggagaaattatgactcctgttgggctttctggactagcattgtatgtttttgggttgcagaaaagttttaacaccacctcttagaatataaaaattttccagttgtcatggaggtccacagattcattaccatgggtttatatgcccaaagcaacaacagaggacttaagttcattttgtgatactgtatggatgttaccccatcctattcagttgtcattccacccaaacccatgtgtaggtttccacatggaaaggagaaggcatccattccacctagacattgaatagtgataataagctaaaagtgggcagattttcagtggagcaagagcagaaatatgcggccaaagaatgtttcctgattggttttgctgctttagactgcagtggggagagcttatgtagattttcaaaactttctccctctttaaggcatcataatgctctcggttttgataacaactgacataaagggaggttgacttaaaatgggaatttctccttccaaaaatgctacactcttcctatccatcctacagcttctttatgaaatgagaggccctcctgctagaatatgaaatgcagaagacctcatgactttcagctgatttttcaaagataaagtgaactgttcagcttcatagaaattcatgcgagtgtgactgaacgtgtgtgcatacacactcgtgcacattggactcatttgggcagttttaaaagcttcacactaaatccaaagcctcgtcctttgggtcgtatgtagtcgtttgtaaaatcaatttctggcttctgagtcatcctggtcatatctctagcaatgtttttcttgaaattctgaaaatgattcacatatgtgtgtacatttaattcacttagatgatctgtaaacttggatggtatttattctaaatggggaaaacaattttatatggaaaaatctatgtaatttataatggttttgttttatatattatattttcatatctctagggcacatctatcctcatctttttgtataccatacttagcaaaaagaaatactaatacttgactaaaatctctaggaaccaaacgtgatacatgtgatatatagcttctagaaatcgctctaaaaatctctgaatgtctcatccatcccaagcattattgtgctgtgtcattatgtccagaatgatttgtcttggatgcttatgagcatttgtttttcacaactaaggttgaaagacctgacatctcacacaatggggttctggaattcccctttcctcctttatctgtttttattgtttgtttcatttttaattgcaccagtctatgttgtcgaaactttgttttgaagggcaaatgtgagataacaagaaagcaatgtgatggaaagactggatgaatttacctatggctatgtaaattattttaatggactgataagatgtttcaagtctcatgcttggatctttatttattggtgatctaggatctgctcagctctttagcacatgaagaaaatcaggtacaaaggacatttgcatgtttggaacagcatgctctaagccccgtgcagccaacacaaattaacttgactgtagaaacaccaattccagctgctggaagaaatggtttagaaaggcaaaccagataccttttattctgccctaggaaatacagtgttgatcagtgctaaaactcttcagtggcagtcactgtggttcttttaactggggatttcctttcagtgtttcatttggtaccaaaacagaacatttaccttacatttcagatactctgttttctcagcattgttcagatactttcctttaccgctcttcacgtacccttttggcattgagtaattctataaatgtttctatccttggtttttaaaccaagttattcatactcttaaaatatctaccaaatctcattgtattttcacatattttgagcatcaagatactggtcattttaaaaaatccttcagtaaatagcacagtttattttcctaatgacatttttagggtttcttcattgatcaaccaggtttgggttacacaaatcaattgtgggggaaaaatcaaataaaacaattgcttattatattttccaaaggactgagcatttatcttttattcacgaagatatcatatgaggatgataatgatctttaacagattttttagagatagaatttataaagaggctgatactaagaatactacaatcaaaattgaagctagagaatgtaaaaatagaaagtaaatagttctaagaatattctggcataaattatttttatttagccaataaaatagcctccaaatgtatatctcagacaccatagagctgctaacaatgagaatcaaggaagatgcttgcacttagatttcgtttgttgtatttcagtagttctggatgtcctttgttaaaattggaaaatggaaaaatgtctcgacagaaatgtcaatctggtgattctgtgaactgtaaaatgttcacttttaaaaataaagttgtaaacaagttactcatataagttggtattacagtagcaaaaacagaaaaccatgtgatccatcctgtattttgattgatgctttaataaagggtttgcacagctgtg

SEQ ID NO: 403183 - DNA, 5839 bp, Homo sapiens
actgcaggccaggtaccttagcaggtctttctgcagggctgagctatcgctagggaacccacggtgactgaatcaaagggaagaaagacccaagacctggatctcccttttacatggaccctaaagcaaaggaaaatggcaaatgcacgacagcggcctcctgaacatcaccaaggtatccttctcagaccgaggtaaatacacgtgtgtggcttctaacatctacggcaccgtgaacaacacggtgaccttgcgcgtcatcttcacttctggagacatgggtgtctactacatggtcgtgtgcctggtggccttcaccatcgtcatggtcctcaatatcacccgcctgtgcatgatgagcagccatctaaagaagactgagaaggccatcaatgagttctttaggaccgaaggtgcagagaagctgcagaaggcatttgagatcgccaagcgcatccccatcatcacctccgccaaaactctagagcttgccaaagtcacccagttcaaaaccatggagttcgcccgctacatcgaagagcttgccaggagcgtgcctctgccgcctctcattatgaactgcaggactatcatggaggagattatggaggtggttgggctggaggagcaggggcagaattttgtgaggcatactccagagggccaggaggccgcagacagggatgaggtctacacaatccccaactctctgaagcggagcgactcccctgccgctgactcggacgcctcatcgctgcacgagcaacctcagcaaattgccatcaaggtgtcagttcacccgcagtccaaaaaagagcatgcagatgaccaagagggtggacagtttgaagtcaaagatgtagaggagacagaactgtcggcggaacattcccccgaaactgcagaaccttctaccgatgtcacgtccaccgagctaacatctgaagagccaacacctgttgaggtaccagataaggtactgccgccagcttacctggaagccacagagccagcagtgacacatgacaaaaacacctgcattatttacgaaagccatgtctaataccaaccccgaaaagctatgcatatcaagaaaatcaggggctgctccttgtaatacagatgtagtacgcacttgccgctaagccttaccaggagactctcatcccttaggtaggagtgatgccactttaaaaggagaaacacctgcctgcagtgaatgggactggaatttccccagtagagaagggtgcgagaaacatcagggtgcagaattgataccagacagaaggtgtctatgtgataatgagtttcagaggctgatctctgccaaataccttaattggtgatgccttcttggcaaagagtacaccactgtaagatattctgagttcaagaaccctgtccagtgccccctgcattgcttttccttttaaaaagtataggtctgctacaatagcaaatgcacgtacgtgggttttttgcagtttcttctcagttttaattttgcttttcctttataatggggtcattgttattaatactaattgttctttctggtttagtcctcattgccacttttgtccttatgtttccctagaacacgtacctcagagactttggtatcagtcaccagtaccagggctgatatctacaagtcacattacatttgtcatgttccaaagtagttacgaggcttgttatttttttttcattccccaggcctatttccatagatagctttttttgtttgtttccaacgaagctgctgttaaacgaaactgagaaaaactttgccccggaatagcactttaatagtcaaaaatgtgtttacctgtctgattgagtgagccttttggtgagctcagctgagatgtagagggagattgtaaaaggttaaatatacccacaccacccatgaaagtcactgtttaagttacatcatcctccaaataaagactgattctttacctggaaaatatattgcttccaaagacatcagattcagtggattcctgtaggttatagaatattggcttccaaacaggcttgcagggaccatatgctgttggatgacatataaccaggtccacttttatgaactgcatagctgacttggttgtccttaaagaggaaagcgaaaggttagggtaatagcaaagggaactgtgccatcagattttatgccaaaactgttgaataattatgcagtcctgcaagaaagtggttatatgtgaggtgcgtgatgttatggaaagaagacaaaattagtcatccaaaggcttaatacccactgtgccaataaccagctgcctggctttggacaagtctggacctcaggtcccttatctgtagaaggggcagatgacatgagctctgagcactgttgaaatggtatcactgtcacacagaaccaaaccaatattcacatccttgctccttttcacaatgactttaaagatttttgctttcatctcttggtccacctaacattttcatgcttcattacttaaataagaatgttggttttgagaaatagcattttaaacaaattgtggatcttctccttccaaaaaaaccattaggaccacatctgcaattaagatttaatattggtgagaatgagtggttttatttaattttcccttaaaagcaaaggagacagtaatcttaataaattcataggggccgtggccacatcaggtaatggggttatgatgtccaagattgcatggatcacattggtgatgagagcagacccagatgtttagtcctcactctgtcaccatctgaggaggtgaccttggacaactcccttcctctctctgggatttaatctttttcatctgtaaaatatgcaggtagtactcgagggtctacaggatcccttctagttgaaacatttatagttcacagaaagtttgcagtcttccaggataaccaacccccgttgcatgagacaagcaaaaaatgggtccatgaaattggatacttttgccatccaaactttacaacaaacattatctggctctgtaattgagagcagtgggcttggttttaaacctagccttgattagtttgtttatagataactgttgtggaaggtgatagaactagtcatggagtttgatgagacatctcttgaaaaggactgaactgttgacttctggttagaagtgctttgggcagtcacataaagaaatgagcagtgagaaatcaggagaaattatgactcctgttgggctttctggactagcattgtatgtttttgggttgcagaaaagttttaacaccacctcttagaatataaaaattttccagttgtcatggaggtccacagattcattaccatgggtttatatgcccaaagcaacaacagaggacttaagttcattttgtgatactgtatggatgttaccccatcctattcagttgtcattccacccaaacccatgtgtaggtttccacatggaaaggagaaggcatccattccacctagacattgaatagtgataataagctaaaagtgggcagattttcagtggagcaagagcagaaatatgcggccaaagaatgtttcctgattggttttgctgctttagactgcagtggggagagcttatgtagattttcaaaactttctccctctttaaggcatcataatgctctcggttttgataacaactgacataaagggaggttgacttaaaatgggaatttctccttccaaaaatgctacactcttcctatccatcctacagcttctttatgaaatgagaggccctcctgctagaatatgaaatgcagaagacctcatgactttcagctgatttttcaaagataaagtgaactgttcagcttcatagaaattcatgcgagtgtgactgaacgtgtgtgcatacacactcgtgcacattggactcatttgggcagttttaaaagcttcacactaaatccaaagcctcgtcctttgggtcgtatgtagtcgtttgtaaaatcaatttctggcttctgagtcatcctggtcatatctctagcaatgtttttcttgaaattctgaaaatgattcacatatgtgtgtacatttaattcacttagatgatctgtaaacttggatggtatttattctaaatggggaaaacaattttatatggaaaaatctatgtaatttataatggttttgttttatatattatattttcatatctctagggcacatctatcctcatctttttgtataccatacttagcaaaaagaaatactaatacttgactaaaatctctaggaaccaaacgtgatacatgtgatatatagcttctagaaatcgctctaaaaatctctgaatgtctcatccatcccaagcattattgtgctgtgtcattatgtccagaatgatttgtcttggatgcttatgagcatttgtttttcacaactaaggttgaaagacctgacatctcacacaatggggttctggaattcccctttcctcctttatctgtttttattgtttgtttcatttttaattgcaccagtctatgttgtcgaaactttgttttgaagggcaaatgtgagataacaagaaagcaatgtgatggaaagactggatgaatttacctatggctatgtaaattattttaatggactgataagatgtttcaagtctcatgcttggatctttatttattggtgatctaggatctgctcagctctttagcacatgaagaaaatcaggtacaaaggacatttgcatgtttggaacagcatgctctaagccccgtgcagccaacacaaattaacttgactgtagaaacaccaattccagctgctggaagaaatggtttagaaaggcaaaccagataccttttattctgccctaggaaatacagtgttgatcagtgctaaaactcttcagtggcagtcactgtggttcttttaactggggatttcctttcagtgtttcatttggtaccaaaacagaacatttaccttacatttcagatactctgttttctcagcattgttcagatactttcctttaccgctcttcacgtacccttttggcattgagtaattctataaatgtttctatccttggtttttaaaccaagttattcatactcttaaaatatctaccaaatctcattgtattttcacatattttgagcatcaagatactggtcattttaaaaaatccttcagtaaatagcacagtttattttcctaatgacatttttagggtttcttcattgatcaaccaggtttgggttacacaaatcaattgtgggggaaaaatcaaataaaacaattgcttattatattttccaaaggactgagcatttatcttttattcacgaagatatcatatgaggatgataatgatctttaacagattttttagagatagaatttataaagaggctgatactaagaatactacaatcaaaattgaagctagagaatgtaaaaatagaaagtaaatagttctaagaatattctggcataaattatttttatttagccaataaaatagcctccaaatgtatatctcagacaccatagagctgctaacaatgagaatcaaggaagatgcttgcacttagatttcgtttgttgtatttcagtagttctggatgtcctttgttaaaattggaaaatggaaaaatgtctcgacagaaatgtcaatctggtgattctgtgaactgtaaaatgttcacttttaaaaataaagttgtaaacaagttactcatataagttggtattacagtagcaaaaacagaaaaccatgtgatccatcctgtattttgattgatgctttaataaagggtttgcacagctgtg

SEQ ID NO: 403184 - DNA, 6512 bp, Homo sapiens
ccgtaatgtctggtgatgttccccagcctgtgggaggcagatgagattgaaaccagggtgtacatgagtgacctggagcccataagtaacagtaacacagagcagagagcgctagatgaggtggagctcagaggagcatgggaagttgaatgagacagtaaggagcattctggaagctataatgggtagttaggagaatgccagagtgattctgatgcagtccttccaaatgccggcagagcccaagctgtgaccagtgacgcagactggaagtcccgtttactgggagagaagaggttaaggaacacccaggtgaacaattaggtcctccacaatgaagacaggtaatgtggaggaaagagagcttgtcatggttcttgctcaagtaccaactctatggacccaggacaggtttgtcccatgacctgctgtgaacagtgtgttgtctgatagaagattcggttggcaaaccatctctctattgccttacagagcaagcaaagaagatggatcgattgaagagccatctgactgtgtgctttctaccttctgtgccctttttaatcctagtatccactctagccaccgctaagagtgtgactaacagcactttaaatggcactaacgtggtcttgggctctgtgcccgtaatcattgccagaactgaccatatcatagtcaaggaagggaacagtgccttgattaactgtagtgtttatggcatccctgacccacagttcaagtggtataattccattggcaagctgctgaaagaagaagaggatgagaaggagagaggaggaggaaaatggcaaatgcacgacagcggcctcctgaacatcaccaaggtatccttctcagaccgaggtaaatacacgtgtgtggcttctaacatctacggcaccgtgaacaacacggtgaccttgcgcgtcatcttcacttctggagacatgggtgtctactacatggtcgtgtgcctggtggccttcaccatcgtcatggtcctcaatatcacccgcctgtgcatgatgagcagccatctaaagaagactgagaaggccatcaatgagttctttaggaccgaaggtgcagagaagctgcagaaggcatttgagatcgccaagcgcatccccatcatcacctccgccaaaactctagagcttgccaaagtcacccagttcaaaaccatggagttcgcccgctacatcgaagagcttgccaggagcgtgcctctgccgcctctcattatgaactgcaggactatcatggaggagattatggaggtggttgggctggaggagcaggggcagaattttgtgaggcatactccagagggccaggaggccgcagacagggatgaggtctacacaatccccaactctctgaagcggagcgactcccctgccgctgactcggacgcctcatcgctgcacgagcaacctcagcaaattgccatcaaggtgtcagttcacccgcagtccaaaaaagagcatgcagatgaccaagagggtggacagtttgaagtcaaagatgtagaggagacagaactgtcggcggaacattcccccgaaactgcagaaccttctaccgatgtcacgtccaccgagctaacatctgaagagccaacacctgttgaggtaccagataaggtactgccgccagcttacctggaagccacagagccagcagtgacacatgacaaaaacacctgcattatttacgaaagccatgtctaataccaaccccgaaaagctatgcatatcaagaaaatcaggggctgctccttgtaatacagatgtagtacgcacttgccgctaagccttaccaggagactctcatcccttaggtaggagtgatgccactttaaaaggagaaacacctgcctgcagtgaatgggactggaatttccccagtagagaagggtgcgagaaacatcagggtgcagaattgataccagacagaaggtgtctatgtgataatgagtttcagaggctgatctctgccaaataccttaattggtgatgccttcttggcaaagagtacaccactgtaagatattctgagttcaagaaccctgtccagtgccccctgcattgcttttccttttaaaaagtataggtctgctacaatagcaaatgcacgtacgtgggttttttgcagtttcttctcagttttaattttgcttttcctttataatggggtcattgttattaatactaattgttctttctggtttagtcctcattgccacttttgtccttatgtttccctagaacacgtacctcagagactttggtatcagtcaccagtaccagggctgatatctacaagtcacattacatttgtcatgttccaaagtagttacgaggcttgttatttttttttcattccccaggcctatttccatagatagctttttttgtttgtttccaacgaagctgctgttaaacgaaactgagaaaaactttgccccggaatagcactttaatagtcaaaaatgtgtttacctgtctgattgagtgagccttttggtgagctcagctgagatgtagagggagattgtaaaaggttaaatatacccacaccacccatgaaagtcactgtttaagttacatcatcctccaaataaagactgattctttacctggaaaatatattgcttccaaagacatcagattcagtggattcctgtaggttatagaatattggcttccaaacaggcttgcagggaccatatgctgttggatgacatataaccaggtccacttttatgaactgcatagctgacttggttgtccttaaagaggaaagcgaaaggttagggtaatagcaaagggaactgtgccatcagattttatgccaaaactgttgaataattatgcagtcctgcaagaaagtggttatatgtgaggtgcgtgatgttatggaaagaagacaaaattagtcatccaaaggcttaatacccactgtgccaataaccagctgcctggctttggacaagtctggacctcaggtcccttatctgtagaaggggcagatgacatgagctctgagcactgttgaaatggtatcactgtcacacagaaccaaaccaatattcacatccttgctccttttcacaatgactttaaagatttttgctttcatctcttggtccacctaacattttcatgcttcattacttaaataagaatgttggttttgagaaatagcattttaaacaaattgtggatcttctccttccaaaaaaaccattaggaccacatctgcaattaagatttaatattggtgagaatgagtggttttatttaattttcccttaaaagcaaaggagacagtaatcttaataaattcataggggccgtggccacatcaggtaatggggttatgatgtccaagattgcatggatcacattggtgatgagagcagacccagatgtttagtcctcactctgtcaccatctgaggaggtgaccttggacaactcccttcctctctctgggatttaatctttttcatctgtaaaatatgcaggtagtactcgagggtctacaggatcccttctagttgaaacatttatagttcacagaaagtttgcagtcttccaggataaccaacccccgttgcatgagacaagcaaaaaatgggtccatgaaattggatacttttgccatccaaactttacaacaaacattatctggctctgtaattgagagcagtgggcttggttttaaacctagccttgattagtttgtttatagataactgttgtggaaggtgatagaactagtcatggagtttgatgagacatctcttgaaaaggactgaactgttgacttctggttagaagtgctttgggcagtcacataaagaaatgagcagtgagaaatcaggagaaattatgactcctgttgggctttctggactagcattgtatgtttttgggttgcagaaaagttttaacaccacctcttagaatataaaaattttccagttgtcatggaggtccacagattcattaccatgggtttatatgcccaaagcaacaacagaggacttaagttcattttgtgatactgtatggatgttaccccatcctattcagttgtcattccacccaaacccatgtgtaggtttccacatggaaaggagaaggcatccattccacctagacattgaatagtgataataagctaaaagtgggcagattttcagtggagcaagagcagaaatatgcggccaaagaatgtttcctgattggttttgctgctttagactgcagtggggagagcttatgtagattttcaaaactttctccctctttaaggcatcataatgctctcggttttgataacaactgacataaagggaggttgacttaaaatgggaatttctccttccaaaaatgctacactcttcctatccatcctacagcttctttatgaaatgagaggccctcctgctagaatatgaaatgcagaagacctcatgactttcagctgatttttcaaagataaagtgaactgttcagcttcatagaaattcatgcgagtgtgactgaacgtgtgtgcatacacactcgtgcacattggactcatttgggcagttttaaaagcttcacactaaatccaaagcctcgtcctttgggtcgtatgtagtcgtttgtaaaatcaatttctggcttctgagtcatcctggtcatatctctagcaatgtttttcttgaaattctgaaaatgattcacatatgtgtgtacatttaattcacttagatgatctgtaaacttggatggtatttattctaaatggggaaaacaattttatatggaaaaatctatgtaatttataatggttttgttttatatattatattttcatatctctagggcacatctatcctcatctttttgtataccatacttagcaaaaagaaatactaatacttgactaaaatctctaggaaccaaacgtgatacatgtgatatatagcttctagaaatcgctctaaaaatctctgaatgtctcatccatcccaagcattattgtgctgtgtcattatgtccagaatgatttgtcttggatgcttatgagcatttgtttttcacaactaaggttgaaagacctgacatctcacacaatggggttctggaattcccctttcctcctttatctgtttttattgtttgtttcatttttaattgcaccagtctatgttgtcgaaactttgttttgaagggcaaatgtgagataacaagaaagcaatgtgatggaaagactggatgaatttacctatggctatgtaaattattttaatggactgataagatgtttcaagtctcatgcttggatctttatttattggtgatctaggatctgctcagctctttagcacatgaagaaaatcaggtacaaaggacatttgcatgtttggaacagcatgctctaagccccgtgcagccaacacaaattaacttgactgtagaaacaccaattccagctgctggaagaaatggtttagaaaggcaaaccagataccttttattctgccctaggaaatacagtgttgatcagtgctaaaactcttcagtggcagtcactgtggttcttttaactggggatttcctttcagtgtttcatttggtaccaaaacagaacatttaccttacatttcagatactctgttttctcagcattgttcagatactttcctttaccgctcttcacgtacccttttggcattgagtaattctataaatgtttctatccttggtttttaaaccaagttattcatactcttaaaatatctaccaaatctcattgtattttcacatattttgagcatcaagatactggtcattttaaaaaatccttcagtaaatagcacagtttattttcctaatgacatttttagggtttcttcattgatcaaccaggtttgggttacacaaatcaattgtgggggaaaaatcaaataaaacaattgcttattatattttccaaaggactgagcatttatcttttattcacgaagatatcatatgaggatgataatgatctttaacagattttttagagatagaatttataaagaggctgatactaagaatactacaatcaaaattgaagctagagaatgtaaaaatagaaagtaaatagttctaagaatattctggcataaattatttttatttagccaataaaatagcctccaaatgtatatctcagacaccatagagctgctaacaatgagaatcaaggaagatgcttgcacttagatttcgtttgttgtatttcagtagttctggatgtcctttgttaaaattggaaaatggaaaaatgtctcgacagaaatgtcaatctggtgattctgtgaactgtaaaatgttcacttttaaaaataaagttgtaaacaagttactcatataagttggtattacagtagcaaaaacagaaaaccatgtgatccatcctgtattttgattgatgctttaataaagggtttgcacagctgtg

SEQ ID NO: 403185 - DNA, 6324 bp, Homo sapiens
ctgagatcgcgccactgcactcgagcctggtgacagaacgagactctgtctgaaaaaaacaaaaaaaagaaaaatgatactaatatcctagaaccttacctaggtacactaagactactgttagaaccaaactaacaaaattataattttcattaacaactgctgccatttactaagtcgctgcaccaagtgacatatattatttctaatccttataataagccctacagtgaagtgttattaatcctcatgtatacagatgagaaaccaggtgaaaccagagggtatgacacaaccagagtgtggccagcgggtattcattctccctctgtgccccaccacatcatcctttaggtcctgtaggtgaaaaatgttgaagagcctctcactcagactgagtgaatatgagaagaactagatggaaaaggcatcctcactaccgatagcaaggtcagacagtgttaggatttgtgccggaacatgtgtgtgtacatggcatgcacatgcacaaaaaggcgttcaaaaatcatcggtgagtcactcaaggagcacactgccattcactttgtgattagcctggaaaggagcaatttcatgtctcgtttctgctgaaaaggaaaatggcaaatgcacgacagcggcctcctgaacatcaccaaggtatccttctcagaccgaggtaaatacacgtgtgtggcttctaacatctacggcaccgtgaacaacacggtgaccttgcgcgtcatcttcacttctggagacatgggtgtctactacatggtcgtgtgcctggtggccttcaccatcgtcatggtcctcaatatcacccgcctgtgcatgatgagcagccatctaaagaagactgagaaggccatcaatgagttctttaggaccgaaggtgcagagaagctgcagaaggcatttgagatcgccaagcgcatccccatcatcacctccgccaaaactctagagcttgccaaagtcacccagttcaaaaccatggagttcgcccgctacatcgaagagcttgccaggagcgtgcctctgccgcctctcattatgaactgcaggactatcatggaggagattatggaggtggttgggctggaggagcaggggcagaattttgtgaggcatactccagagggccaggaggccgcagacagggatgaggtctacacaatccccaactctctgaagcggagcgactcccctgccgctgactcggacgcctcatcgctgcacgagcaacctcagcaaattgccatcaaggtgtcagttcacccgcagtccaaaaaagagcatgcagatgaccaagagggtggacagtttgaagtcaaagatgtagaggagacagaactgtcggcggaacattcccccgaaactgcagaaccttctaccgatgtcacgtccaccgagctaacatctgaagagccaacacctgttgaggtaccagataaggtactgccgccagcttacctggaagccacagagccagcagtgacacatgacaaaaacacctgcattatttacgaaagccatgtctaataccaaccccgaaaagctatgcatatcaagaaaatcaggggctgctccttgtaatacagatgtagtacgcacttgccgctaagccttaccaggagactctcatcccttaggtaggagtgatgccactttaaaaggagaaacacctgcctgcagtgaatgggactggaatttccccagtagagaagggtgcgagaaacatcagggtgcagaattgataccagacagaaggtgtctatgtgataatgagtttcagaggctgatctctgccaaataccttaattggtgatgccttcttggcaaagagtacaccactgtaagatattctgagttcaagaaccctgtccagtgccccctgcattgcttttccttttaaaaagtataggtctgctacaatagcaaatgcacgtacgtgggttttttgcagtttcttctcagttttaattttgcttttcctttataatggggtcattgttattaatactaattgttctttctggtttagtcctcattgccacttttgtccttatgtttccctagaacacgtacctcagagactttggtatcagtcaccagtaccagggctgatatctacaagtcacattacatttgtcatgttccaaagtagttacgaggcttgttatttttttttcattccccaggcctatttccatagatagctttttttgtttgtttccaacgaagctgctgttaaacgaaactgagaaaaactttgccccggaatagcactttaatagtcaaaaatgtgtttacctgtctgattgagtgagccttttggtgagctcagctgagatgtagagggagattgtaaaaggttaaatatacccacaccacccatgaaagtcactgtttaagttacatcatcctccaaataaagactgattctttacctggaaaatatattgcttccaaagacatcagattcagtggattcctgtaggttatagaatattggcttccaaacaggcttgcagggaccatatgctgttggatgacatataaccaggtccacttttatgaactgcatagctgacttggttgtccttaaagaggaaagcgaaaggttagggtaatagcaaagggaactgtgccatcagattttatgccaaaactgttgaataattatgcagtcctgcaagaaagtggttatatgtgaggtgcgtgatgttatggaaagaagacaaaattagtcatccaaaggcttaatacccactgtgccaataaccagctgcctggctttggacaagtctggacctcaggtcccttatctgtagaaggggcagatgacatgagctctgagcactgttgaaatggtatcactgtcacacagaaccaaaccaatattcacatccttgctccttttcacaatgactttaaagatttttgctttcatctcttggtccacctaacattttcatgcttcattacttaaataagaatgttggttttgagaaatagcattttaaacaaattgtggatcttctccttccaaaaaaaccattaggaccacatctgcaattaagatttaatattggtgagaatgagtggttttatttaattttcccttaaaagcaaaggagacagtaatcttaataaattcataggggccgtggccacatcaggtaatggggttatgatgtccaagattgcatggatcacattggtgatgagagcagacccagatgtttagtcctcactctgtcaccatctgaggaggtgaccttggacaactcccttcctctctctgggatttaatctttttcatctgtaaaatatgcaggtagtactcgagggtctacaggatcccttctagttgaaacatttatagttcacagaaagtttgcagtcttccaggataaccaacccccgttgcatgagacaagcaaaaaatgggtccatgaaattggatacttttgccatccaaactttacaacaaacattatctggctctgtaattgagagcagtgggcttggttttaaacctagccttgattagtttgtttatagataactgttgtggaaggtgatagaactagtcatggagtttgatgagacatctcttgaaaaggactgaactgttgacttctggttagaagtgctttgggcagtcacataaagaaatgagcagtgagaaatcaggagaaattatgactcctgttgggctttctggactagcattgtatgtttttgggttgcagaaaagttttaacaccacctcttagaatataaaaattttccagttgtcatggaggtccacagattcattaccatgggtttatatgcccaaagcaacaacagaggacttaagttcattttgtgatactgtatggatgttaccccatcctattcagttgtcattccacccaaacccatgtgtaggtttccacatggaaaggagaaggcatccattccacctagacattgaatagtgataataagctaaaagtgggcagattttcagtggagcaagagcagaaatatgcggccaaagaatgtttcctgattggttttgctgctttagactgcagtggggagagcttatgtagattttcaaaactttctccctctttaaggcatcataatgctctcggttttgataacaactgacataaagggaggttgacttaaaatgggaatttctccttccaaaaatgctacactcttcctatccatcctacagcttctttatgaaatgagaggccctcctgctagaatatgaaatgcagaagacctcatgactttcagctgatttttcaaagataaagtgaactgttcagcttcatagaaattcatgcgagtgtgactgaacgtgtgtgcatacacactcgtgcacattggactcatttgggcagttttaaaagcttcacactaaatccaaagcctcgtcctttgggtcgtatgtagtcgtttgtaaaatcaatttctggcttctgagtcatcctggtcatatctctagcaatgtttttcttgaaattctgaaaatgattcacatatgtgtgtacatttaattcacttagatgatctgtaaacttggatggtatttattctaaatggggaaaacaattttatatggaaaaatctatgtaatttataatggttttgttttatatattatattttcatatctctagggcacatctatcctcatctttttgtataccatacttagcaaaaagaaatactaatacttgactaaaatctctaggaaccaaacgtgatacatgtgatatatagcttctagaaatcgctctaaaaatctctgaatgtctcatccatcccaagcattattgtgctgtgtcattatgtccagaatgatttgtcttggatgcttatgagcatttgtttttcacaactaaggttgaaagacctgacatctcacacaatggggttctggaattcccctttcctcctttatctgtttttattgtttgtttcatttttaattgcaccagtctatgttgtcgaaactttgttttgaagggcaaatgtgagataacaagaaagcaatgtgatggaaagactggatgaatttacctatggctatgtaaattattttaatggactgataagatgtttcaagtctcatgcttggatctttatttattggtgatctaggatctgctcagctctttagcacatgaagaaaatcaggtacaaaggacatttgcatgtttggaacagcatgctctaagccccgtgcagccaacacaaattaacttgactgtagaaacaccaattccagctgctggaagaaatggtttagaaaggcaaaccagataccttttattctgccctaggaaatacagtgttgatcagtgctaaaactcttcagtggcagtcactgtggttcttttaactggggatttcctttcagtgtttcatttggtaccaaaacagaacatttaccttacatttcagatactctgttttctcagcattgttcagatactttcctttaccgctcttcacgtacccttttggcattgagtaattctataaatgtttctatccttggtttttaaaccaagttattcatactcttaaaatatctaccaaatctcattgtattttcacatattttgagcatcaagatactggtcattttaaaaaatccttcagtaaatagcacagtttattttcctaatgacatttttagggtttcttcattgatcaaccaggtttgggttacacaaatcaattgtgggggaaaaatcaaataaaacaattgcttattatattttccaaaggactgagcatttatcttttattcacgaagatatcatatgaggatgataatgatctttaacagattttttagagatagaatttataaagaggctgatactaagaatactacaatcaaaattgaagctagagaatgtaaaaatagaaagtaaatagttctaagaatattctggcataaattatttttatttagccaataaaatagcctccaaatgtatatctcagacaccatagagctgctaacaatgagaatcaaggaagatgcttgcacttagatttcgtttgttgtatttcagtagttctggatgtcctttgttaaaattggaaaatggaaaaatgtctcgacagaaatgtcaatctggtgattctgtgaactgtaaaatgttcacttttaaaaataaagttgtaaacaagttactcatataagttggtattacagtagcaaaaacagaaaaccatgtgatccatcctgtattttgattgatgctttaataaagggtttgcacagctgtg

SEQ ID NO: 403186 - DNA, 1515 bp, Homo sapiens
gaggagaagaagccactaacattgcaggatcgtgtagcgaaacttctgtaggtacttaataattttagagtactctactttttaattaaaaaatcaacttatggttcattagaaaaaacgtggaaattacaaataatatttttaaagaaaatgaaaaaaaaattcctggaaccccaccactcagaaagtcaccagggaacggcccgctgggtttttttccagactcttccatctgtggactttgctttaagagacgtttaagacttacagcgcagtcgcccgggaaggcctgagaagctttcggaagcaaggtggtttgctcgtgattgcatttgattgcaaggagacaggagcccaagctgtgaccagtgacgcagactggaagtcccgtttactgggagagaagaggttaaggaacacccaggtgaacaattaggtcctccacaatgaagacaggtaatgtggaggaaagagagcttgtcatggttcttgctcaagtaccaactctatggacccaggacaggtttgtcccatgacctgctgtgaacagtgtgttgtctgatagaagattcggttggcaaaccatctctctattgccttacagagcaagcaaagaagatggatcgattgaagagccatctgactgtgtgctttctaccttctgtgccctttttaatcctagtatccactctagccaccgctaagagtgtgactaacagcactttaaatggcactaacgtggtcttgggctctgtgcccgtaatcattgccagaactgaccatatcatagtcaaggaagggaacagtgccttgattaactgtagtgtttatggcatccctgacccacagttcaagtggtataattccattggcaagctgctgaaagaagaagaggatgagaaggagagaggaggaggtaggctttaaagttgtatcaaatgtcataataaaatataaacaggagctttggagccagcacccgtgatgttagttcttctcatgcaaatgatttaaagatctcatcttgtcttgtttttctaaggcaggagagaatatatatccttaaggattcaaagaagcaattaattcatttttttccctcattgacacagaagacaaaggacaaacacagaagtctttttaaaggcttcttggaattttgtaatataatacatccaatacattatagagacaaatgtaaaatggattttcctaaataatatattcaatttttaagggagttttgttttctttcatggagatggctggaataaacaatatagccattgtttatcattaaatgtccatttaattcattggccgtggatttaaagaccacacttctgaaagaaacctcagtgcaagtctcagccactggctgggattcctggagacctggctgcagtttctaggctgaggcagggagggagggaggatgcaataacaaggaaggatgtgggacaacaggagactgcttggtttttaataaatgcatttctgaccaaaaagtgtgag

SEQ ID NO: 403187 - DNA, 782 bp, Homo sapiens
aaatagattcagagaaacatacacatacacaaaagaaaataagaatactgtgatagccttttgaaatgtcaacttggataagctagtaatgaaacactaatctagatgttgctgtgaaggtattttgtatgtgattaaagtccataataagtttactttaagtaagagattaccctagataattatggcctgattcaatcatttgaagggtcttaaaaagcagagttgagacttccctagtaaaggagaaattctgtgtgtggactgcagtttcaacctgtgcctatgggttctaacccgcccttcctgatggaacagcctatgaatttcagacttgtctagtcagctccacactcatgtaagctaactatttataacatgtatctcctactgggtctgcttctctggttgaaccatgactgatacaaataccatgtccatacaacaatgatactgaaatctttcctaaaattgcttaatgaataaaaacttccaaatttattaagactaaatagcattaagaccaaatagactactgccaaatatcaatgcttcaaacactttctagaaaaagtaattgataaatgaagacatacagagatggaaatatttatttatttttttagacagaatctcattctgtcaccaaagacagaataaaatggtacaatcatggctgactgcagtctccaactcctgagctcaagtgatcatctcacctcagacttaaaagtagctgggactacagatgcatgccaccatacctggcttttttttttttt

SEQ ID NO: 403188 - DNA, 455 bp, Homo sapiens
ctcccctgacatgtcatttacttgaattgaaacaaaagaaatttaaagcactgttttcttctatattccttccctcttcagattctccttatttaataaagcaaaattactttgacttctctagtttagaaattacctgaaattaaaacagaaaatggtcgggtgcagtggcatgagccaccaggtccagctaatttttgtatttttagtagagatgggccacctttgagtagcactgtttgatcctatcataacatcatgcctagtgtgctagtttgcatccattctaggaatggcaggcttgtcttctcaaataacatgtatcagttcatctgtggtatataccattttagaataaatttgaaaacttggctaggtctgactttgctttttaaatgtcctctaaatcggtgatgaaagtaactaaagagttaaattcctttaaaggaaagagc

SEQ ID NO: 403189 - DNA, 305 bp, Homo sapiens
tccgggggcattccactggcaaagggaagaaagcttcaggtgggcatgcatacaacactgcacatgctcacctcccaagggtaaggaggccactgtgtgtgcaggcagatcatccttaaagaagaatgaagggaaaggggctcaagatgccggaagtgggccagcatataaagtcttaggatcaacttagggtcaaggtgaaatggggcacttgtccttcaagtcacccggttgggtcccttccaagtgcactttcctttctttcctgctctaaagctttttaataaacttccacccttactctc

SEQ ID NO: 403190 - DNA, 455 bp, Homo sapiens
aaggtggccttctgtttttcacataacatcgctgtgcctcggttccttatttgtaagataaagagattatattcaatattctgtcgtgtaattgaggtggcctgaagaatgacgtgactggggagaacaacacggctctggcaaggatgtattgttatttttgtcttgctcatccaaatagttcatcttcctttatcttggtccatttatgctgttgtaacaaaatattcaagactgggtaatttagaaagaacagaaatcaattttctcacagttctggagctgagaggtccaagatcaaggcatcagcagatttggttgtttggataagcgctgctctcaagtcgcattgctgcgtcccacagtggggagggatgctgtgtcctcacctggaggaaggcagaaggcaaacgagctaactccccatgaagcctctttcataaggaccttaatcc

SEQ ID NO: 403191 - DNA, 633 bp, Homo sapiens
ccttgggaaggtaaaacaaagatgatttattgatgggaaggatggaattgatagaatgtgagggaaagggagaactcaaggggaatactctgattttttagcctgtcattggttggatggtgaagcaggcaacaaaaatgggggggcctgggcaaagattaggggggggggagccagagtttcatttggagctcatcagtttgaaatctcagtgagacttccaaattgaataggcagttggatgcagagatgtggagcttgggcctggagatgcacattgtttggagatataaatggtgtttatagacctatggttttataatacatcccttggagagatagagagaaaccagagccaaagaccgaacccagggtcactccaccacttggaggctgggccagtggctggaatgcacagcagcacggggcctggtgtatagtaggtgttcaacaaatctttgttgctgaggaaatcagcaccagcagtagtgactgcttatgcagtttctggagcagcttgcttctgaagtcagattcatggatatcacaagctcgaagacaaacgaacagagatgttttgctcactttagttaatagatttgatcaattaaacctgtttttggaagtgaaaaa

SEQ ID NO: 403192 - DNA, 320 bp, Homo sapiens
tggtcacttcattccatgccaccgtggtggagcccctgagccaagagctcaggaaggggcccagcagctttcacgctcactggtgtgcgagttgtacagtagacgtcacacaagtccatggattggctgagtgtctgctgtcacccaaatttcagatttttgaatacaaaaattagctgggtatggtggcagtcgtctgtagttccagctacttgggaggctgagacgggagactcttgaacccgggaggcagagattgcagtgagctgagattgtgccacagcactccagcctgggtgacagagcaagactccatctga

SEQ ID NO: 403193 - DNA, 462 bp, Homo sapiens
gatatgttgtgtcactatcattcagttcaaatacttttctaattttcctcttggtttcattgttgagccaatgatcattcaggaggaggtcatttaatttccatgtatttgcatagctttgagggttccttttggagttgatttctcattttattccactgtgatctgagaaagtacttgctataatttcaattttcttaaatttgttgagacttgttttgtggcctatcatatggtctatctcggagaatgttccatgtgctgattaatataatttttattctgcggttgtcaggtagaatgttctgtaagtatctgttaagtacatttgttctagggtacagtttatgtccattgtttctttgttgaccttctcttgatgacttgtctagtgctgtcagtggagtactgaagtcccccactattactgtgttgctgtctatgtcattccttaggtctagt

SEQ ID NO: 403194 - DNA, 381 bp, Homo sapiens
actgcactccagtctgggcaacagagcgagactccgtctcccccaaccaaaaaaaataaaataaaataaaagtggtatgcatatatatgtatgcagaaaaaacaggaaagaggaacagtttttttttcttttttgcttatttgtcttctaaattttctatattctaagtgttctataatccttttataattaaagaaaaaaattttaagttttatttcaggacaccattggaattaatactgaataaattaactaaaatgaggctgggtatagtggcttatgcctataatcccagcactttgggaggccgaggtgggtggatcacttgaggccaggagttcgagaccagcctgggtgacatagtgagatcttgtatctgca

SEQ ID NO: 403195 - DNA, 466 bp, Homo sapiens
ctcttcctgtgcctggtaacccctgaataactactgtgtagttaatcctttattgcctctgtaagagaatgctggaggtcaaacatagcagagattaataataatatgagtgataacggataaaacgcgtagcactgactacctaccaggcactgtcctgagtgctttacatgtattaacccatttaatcatcagtcaacacagcatgatgttattggtagatattattattacgtatatattctacagatggagaaactatgacctagagtgaccccaatgtcaccagctaagggtggggctgggtttaaaccaggccagtctagcttgtaacctctatgtcatattggaatagactctagcacagtggttataggttcctactaaaagaggttaaaaaccatgacagctatgctttaagaatacatacttgaatgtaagtgttagccctgacatccaatttgtc

SEQ ID NO: 403196 - DNA, 460 bp, Homo sapiens
gctgtgttgactcctaaatttatatgtgaaggtcagagtaaagagggcaaagtcattagtaagagtttagcttgagcttttaatcaataaatcagatacgaaaatgacccaaagacctagtgagaaagattacatggaattacagtcaagtactgcttaatgatggggatacatttcgagaaatgcatcgttaggcaattttgtagttgttccagcatcatggagtgcactttcacaaacctagatggtatagcctaccatacacctaggcaacatggtatagactattgatcctaggctacagacttgtacaacatgttactaaatactgcaggcaattgtaacacaatggtatttatgtatctaaacatagaaatggtacagtaaaaatacagtaaaaagatttaaaatggtactcctatataggtcagctccataataaatttagggaaccactatc

SEQ ID NO: 403197 - DNA, 471 bp, Homo sapiens
gcaggaagggagagcagaggaaacagaagttgcttaggagggagttgggcaggctctgtccccagcagatccaagggtccctgacaaagagaacacctcacctccgcccctccccagaggcacacagaatgccccctcccaccacctccaggctgttaattcacacccacccaggctgcccccaggctccccagacctgtgccagtcaagcctggcctgtggctgtgacacctgcattaccccagacggttgcctgacctaggcctgtccttctatctgctttgtttttatgttgattactaggtgaagcacagtgttaaaaacgggaagaaaaggctaggaatgcagttatgggagtgtgaggctgggttggaataggtgggagaaagtccagggctgagtgtgtggaccctgctctagggatctgaccggctcaagctcccaggccattaaacaaagttgttaatgtca

SEQ ID NO: 403198 - DNA, 438 bp, Homo sapiens
cacagggggtcctttctgctctgactcctggcttctgctgccagggcttggaggcttggaggtggcctctgtcccaacaagagtcctcaaaatcctcagtttgtccaggtgagggatcctgggtgggggaggttcccagggctgcggcagcacagaccataccttgtcagtgtcaagccctgactgacccaggagtgccaggtggtggtgtgctcactgccagaaaggggccagtatttgaagagcagtggaatgtgctgggcacgctgtgcaggcattcctcagccctcctggggctctaagggtgttattggggtatgctgccatacagaatattagaaagcaaaagaaagacgcggttgtcgggaggcagagcttgcagtgagccgagatcacaccactgcactctggcctgggcgacagagcgagactccgtct

SEQ ID NO: 403199 - DNA, 250 bp, Homo sapiens
tactatttaacaagcaaattgacctctattatttcttatatgttgataaatacaacatgtctttgaaaattatgtttcacattgtattcttttgtgggggtgtttacagttttgtttttactttctttggaggttattcagtttggcatgatagctctcctcagtaacgctttatttgtctgtgtgccacttttcactttctttttctcaatggaacctagaagcattaaacacatctcttaattgttaa

SEQ ID NO: 403200 - DNA, 1403 bp, Homo sapiens
aacgggaatggtttttaagactaccctttcgagatttctgccttatgaatatattcacgctgactcccggccggtcggacattcctgctttattgtgttaattgctctctgggttttggggggctgggggttgctttgcggtgggcagaaagccccttgcatcctgagctccttggagtagggaccgcatatcgcctgtgtgagccagatcgctccgcagccgctgacttgtccccgtctccgggagggcatttaaatttcggctcaccgcatttctgacagccggagacggacactgcggcgcgtcccgcccgcctgtccccgcggcgattccaacccgccctgatccttttaagaagttggcatttggctttttaaaaagcaataatacaatttaaaacctgggtctctagaggtgttaggacgtggtgttgggtaggcgcaggcaggggaaaagggaggcgaggatgtgtccgattctcctggaatcgttgacttggaaaaaccagggcgaatctccgcacccagccctgactcccctgccgcggccgccctcgggtgtcctcgcgcccgagatgcggaggaactgcgaggagcggggctctgggcggttccagaacagctgctacccttggtggggtggctccgggggaggtatcgcagcggggtctctggcgcagttgcatctccgtattgagtgcgaagggaggtgcccctattattatttgacaccccccttgtatttatggaggggtgttaaagcccgcggctgagctcgccactccagccggcgagagaaagaagaaaagctggcaaaaggagtgttggacgggggcggtactgggggtggggacgggggcggtggagagggaaggttgggaggggctgcggtgccggcgggggtaggagagcggctagggcgcgagtgggaacagccgcagcggaggggccccggcgcggagcggggttcacgcagccgctagcgcccaggcgcctctcgccttctccttcaggtggcgcaaaactttgtgccttggattttggcaaattgttttcctcaccgccacctcccgcggcttcttaagggcgccagggccgatttcgattcctctgccgctgcggggccgactcccgggctttgcgctccgggctcccgggggagcgggggctcggcgggcaccaagccgctggttcactaagtgcgtctccgagatagcaggggactgtccaaagggggtgaaagggtgctccctttattcccccaccaagaccacccagccgctttaggggatagctctgcaaggggagaggttcgggactgtggcgcgcactgcgcgctgcgccaggtttccgcaccaagacccctttaactcaagactgcctcccgctttgtgtgccccgct

SEQ ID NO: 403201 - DNA, 624 bp, Homo sapiens
  misc_feature (22)..(22): n is a, c, g, or t
tccgggaaggcgacccgcgcgncgcccgcggcggagagcggcagggggggcgggggcggtactgggggtggggacgggggcggtggagagggaaggttgggaggggctgcggtgccggcgggggtaggagagcggctagggcgcgagtgggaacagccgcagcggaggggccccggcgcggagcggggttcacgcagccgctagcgcccaggcgcctctcgccttctccttcaggtggcgcaaaactttgtgccttggattttggcaaattgttttcctcaccgccacctcccgcggcttcttaagggcgccagggccgatttcgattcctctgccgctgcggggccgactcccgggctttgcgctccgggctcccgggggagcgggggctcggcgggcaccaagccgctggttcactaagtgcgtctccgagatagcaggggactgtccaaagggggtgaaagggtgctccctttattcccccaccaagaccacccagccgctttaggggatagctctgcaaggggagaggttcgggactgtggcgcgcactgcgcgctgcgccaggtttccgcaccaagacccctttaactcaagactgcctcccgctttgtgtgccccgct

SEQ ID NO: 403202 - DNA, 103 bp, Homo sapiens
ggcaatagctttaactacatttataaagtcatttaaaatataacaacataggaaacaacaaaaacaatacaaagtgaagcaactctaatacagtaaaactttc

SEQ ID NO: 403203 - DNA, 471 bp, Homo sapiens
cagttcaatcaatgccactttatgtgattaggtttctctgtgtaatctactgatttcttctttcagtcaacatttacagggtgcccaaagtgtaccagatactgtgctagaccctgggaatataaagttaaaaagatctcaagttgttcacagtctagcctggagaaaaaaggagactaaacaatccattgtacaatccactgtaatccattacaatacaaaatgaagagccctggaatagagataagaataaagtgctatgcaggaacagaaaaccaaacaccacatgttctcactcacaagtgggagttgaacagtgagaacgcatgggcacagggaggggaacaacacacactggggcctctcgggggaggggcgaggatgacaggttgataggtgcagcaaaccaccatggcacatgcatacctatgtaacaaacctgcacattctgcacatgtatcccagaactta

SEQ ID NO: 403204 - DNA, 527 bp, Homo sapiens
tctggctttgccctggaacctgggatgaatccactccgactggatgtgagtaccaggtattatctgagaacgtgatttgaaactgctccctagatagggcccattccttagtcaggggttcctagtggctgtggaataattcacatttgtcattagactgtaaggaccatcactttattgcttttgtgtcccttcattgtgccgagccatgcaccatgcatccagcagggaatcctgtgagtgccttttcacaaaagcttccagctgcacgaggtcggcccttagcgcttttaaaggtaggcaactgacatgtccactcaggacacagaccccagcaaggtgctagcaggtcttctcagggctctcgtgatggttccaggcccagtcattggtcggcgatccagaggagacacgctcctcacttttggaattctacactttagaggaagaacccaaacgaaaagctaggagacaagccagtggggtgaggaacagattaaagccacttgcttctcaaatgaggacat

SEQ ID NO: 403205 - DNA, 461 bp, Homo sapiens
tgagatttaaaatacactgctaaagattaagagcagatttggacgctacagaagaaaagatcagtaaacaaagatgtaccaatagaaaatatccaaaatgaaacatgggaaaggaaagggtttctaactatgaaaaaaatgcattagtagaatgcgggacaacttcaattattttaatatacaagtaatgagagtcctaaaaggaaagaagagagagggaggatatgaaaacaattcgaaaaaataatttctaggaattttagcacttttactttaaaaaaaaaaactatacaaattcaataagcttaacaaactcaaaacacaagaaacatgaagaaaactagataaaaataccctgtaatcagccaaaaccactgcaaaaaaaaatcttattaaaaaccagaggaaaaaacacatgaataaaaataagaataccagtagattccttatcacaaataatg

SEQ ID NO: 403206 - DNA, 501 bp, Homo sapiens
ctcagcagccagaggcttctcagcacttctgcgttcccatctgggtgggaactgcatggcctgtttaagcacaaggagggggagtgtggggaagggggagcagagtgagtggggaggtcagaaaggcaggcactggttcatgtagggtggttgatacagtttggatgtttgtcctctccaaatctcatactgaaatctgaccctcaatgctggaggtgggacctggtgggaggtgcttgggtgacatgggccaatccctcatgaatggcctggtgccctccctgtggtaatgaattcccatgagatctgattgttagaaagagcctaggtagctcctctctcttgctccatctgtcactgtgggacacctctgctacccttcccctcccaccaggagggtaagcttcctgaggccctgaccccaagcagatgctgctgccatgcctccggtactgcctgcagaactgtggaccaaataaacctctcttctttataaacggc

SEQ ID NO: 403207 - DNA, 4885 bp, Homo sapiens
  misc_feature (1029)..(1029): n is a, c, g, or t
  misc_feature (1237)..(1237): n is a, c, g, or t
  misc_feature (1314)..(1314): n is a, c, g, or t
  misc_feature (1323)..(1323): n is a, c, g, or t
  misc_feature (1338)..(1338): n is a, c, g, or t
  misc_feature (1342)..(1342): n is a, c, g, or t
  misc_feature (1347)..(1347): n is a, c, g, or t
  misc_feature (1374)..(1374): n is a, c, g, or t
  misc_feature (1377)..(1377): n is a, c, g, or t
  misc_feature (1848)..(1848): n is a, c, g, or t
  misc_feature (2048)..(2049): n is a, c, g, or t
  misc_feature (2052)..(2052): n is a, c, g, or t
  misc_feature (2069)..(2069): n is a, c, g, or t
  misc_feature (2481)..(2481): n is a, c, g, or t
  misc_feature (2875)..(2875): n is a, c, g, or t
  misc_feature (2916)..(2916): n is a, c, g, or t
  misc_feature (2922)..(2922): n is a, c, g, or t
  misc_feature (3126)..(3126): n is a, c, g, or t
agttgcgtgccgtggtggagcagacagagcggtcccggaagctggcggagcaggagctgattgagactagtgagcgggtgcagctgctgcattcccagtacaccagcctcatcaaccagagatcaggcggagccagacggcactgaagatgctgacaagtctgcctacctcatggggctgaactcagctgacctgctcaaggggctgtgccaccctcgggtgaaagtgggcaacgagtatgtcaccaaggggcagaatgtccagcaggtgatatatgccactggggcactggccaaggcagtgtatgagaggatgttcaactggatggtgacgcgcatcaatgccaccctggagaccaagcagccacgccagtacttcataggagtcctggacatcgctggcttcgagatcttcgatttcaacagctttgagcagctctgcatcaacttcaccaacgagaagctgcagcagttcttcaaccaccacatgtttgtgctggagcaggaggagtacaagaaggagggcatcgagtggacattcattgactttggcatggacctgcaggcctgcattgacctcatcgagaagcccatgggcatcatgtccatcctggaggaggagtgcatgttccccaaggccactgacatgaccttcaaggccaagctgtacgacaaccacctgggcaagtccaacaatttccagaagccacgcaacatcaaggggaagcaggaagcccacttctccctgatccactacgccggcactgtggactacaacatcctgggctggctggaaaaaaacaaggatcctctcaacgagactgttgtggccctgtaccagaagtcctccctcaagctcatggccactctcttctcctcctacgcaactgccgatactggggacagtggtaaaagcaaaggaggcaagaaaaagggctcatccttccagacggtgtcggctctccaccgggaaaatctcaacaagctaatgaccaacctgaggaccacccatcctcactttgtgcgttgnatcatccccaatgagcggaaggctccaggggtgatggacaaccccctggtcatgcaccagctgcgctgcaatggcgtgctggagggcatccgcatctgcaggaagggcttccccaaccgcatcctctacggggacttccggcagaggtatcgcatcctgaacccagtggccatccctgagggacagttcattgatagcaggaaggggncagagaagctgctcagctctctggacattgatcacaaccagtacaagtttggccacaccaaggtgttcttcaaggcngggctgctngggctgctggagganatgngggangagaggctgagccgcatcatcacgcgnatncaggcccaagcccggggccagctcatgcgcattgagttcaagaagatagtggaacgcagggatgccctgctggtaatccagtggaacattcgggccttcatgggggtcaagaattggccctggatgaagctctacttcaagatcaagccgctgctgaagagcgcagagacggagaaggagatggccaccatgaaggaagagttcgggcgcatcaaagagacgctggagaagtccgaggctcgccgcaaggagctggaggagaagatggtgtccctgctgcaggagaagaatgacctgcagctccaagtgcaggcggaacaagacaacctcaatgatgctgaggagcgctgcgaccagctgatcaaaaacaagattcagctggaggccaaagtaaaggagatgaatgagaggctggaggatgaggaggagatgaacgcggagctcactgccaagaagcgcaagctggaagangagtgctcagagctcaagaaggacattgatgacctggagctgacactggccaaggtggagaaggagaagcatgcaacagagaacaaggtgaagaacctaacagaggagatggctgggctggatgaaatcatcgctaagctgaccaaggagaagaaagctctacaagaggcccatcagcaggccctggatgaccttcaggnngangaagacaaggtcaacancctgtccaagtctaaggtcaagctggagcagcaggtggatgatctggagggatccctagagcaagagaagaaggtgcgcatggacctggagcgagcaaagcggaaactggagggcgacctgaagctgacccaggagagcatcatggacctggaaaatgataaactgcagctggaagaaaagcttaagaagaaggagtttgacattaatcagcagaacagtaagattgaggatgagcaggtgctggcccttcaactacagaagaaactgaaggaaaaccaggcacgcatcgaggagctggaggaggagctggaggccgagcgcaccgccagggctaaggtggagaagctgcgctcagacctgtctcgggagctggaggagatcagcgagcggctggaagaggccggcggggcnacgtccgtgcagatcgagatgaacaagaagcgcgaggccgagttccagaagatgcggcgggacctggaggaggccacgctgcagcacgaggccactgccgcggccctgcgcaagaagcacgccgacagcgtggccgagctgggcgagcagatcgacaacctgcagcgggtgaagcagaagctggagaaggagaagagcgagttcaagctggagctggatgacgtcacctccaacatggagcagatcatcaaggccaaggcaaacctggagaaagtgtctcggacgctggaggaccaggccaatgagtaccgcgtgaagctagaagaggcccaacgctccctcaatgatttcaccacccagcgagccaagctgcagaccgagaatggagagttgncccggcagctagaggaaaaggaggcgctaatctcgcagctnacccgngggaagctctcttatacccagcaaatggaggacctcaaaaggcagctggaggaggagggcaaggcgaagaacgccctggcccatgcactgcagtcggcccggcatgactgcgacctgctgcgggagcagtacgaggaggagacagaggccaaggccgagctgcagcgcgtcctgtccaaggccaactcggaggtggcccagtgnaggaccaagtatgagacggacgccattcagcggactgaggagctcgaagaggccaaaaagaagctggcccagcggctgcaggatgccgaggaggccgtggaggctgttaatgccaagtgctcctcactggagaagaccaagcaccggctacagaatgagatagaggacttgatggtggacgtagagcgctccaatgctgctgctgcagccctggacaagaagcagagaaactttgacaagatcctggccgagtggaagcagaagtatgaggagtcgcagtctgagctggagtcctcacagaaggaggctcgctccctcagcacagagctcttcaagctcaagaacgcctacgaggagtccctggagcacctagagaccttcaagcgggagaacaagaaccttcaggaggaaatctcggaccttactgagcagctaggagaaggaggaaagaatgtgcatgagctggagaaggtccgcaaacagctggaggtggagaagctggagctgcagtcagccctggaggaggcagaggcctccctggagcacgaggagggcaagatcctccgggcccagctagagttcaaccagatcaaggcagagatcgagcggaagctggcagagaaggacgaggagatggaacaggccaagcgcaaccaccagcgggtggtggactcgctgcagacctccctggatgcagagacacgcagccgcaacgaggtcctgagggtgaagaagaagatggaaggagacctcaatgagatggagatccagctcagccacgccaaccgcatggctgccgaggcccagaagcaagtcaagagcctccagagcttgctgaaggacacccagatccagctggacgatgcggtccgtgccaacgacgacctgaaggagaacatcgccatcgtggagcggcgcaacaacctgctgcaggctgagctggaggagctgcgtgccgtggtggagcagacagagcggtcccggaagctggcggagcaggagctgattgagaccagcgagcgggtgcagctgctgcattcccagaacaccagcctcatcaaccagaagaagaagatggatgctgacctgtcccagctccagtcggaagtggaggaggcagtgcaggagtgcagaaacgccgaggagaaggccaagaaggccatcacggatgccgccatgatggcagaggagctgaagaaggagcaggacaccagcgcccacctggagcgcatgaagaagaacatggagcagaccattaaggacctgcagcaccggctggacgaggccgagcagatcgccctcaagggcggcaagaagcagctgcagaagctggaagcgcgggtgcgggagctggagggtgagctggaggccgagcagaagcgcaacgcagagtcggtgaagggcatgaggaagagcgagcggcgcatcaaggagctcacctaccagacagaggaagacaaaaagaacctgctgcggctacaggacctggtggacaagctgcaactgaaggtcaaggcctacaagcgccaggccgaggaggcggaggagcaagccaacaccaacctgtccaagttccgcaaggtgcagcatgagctggatgaggcagaggagcgggcggacatcgctgagtcccaggtcaacaagcttcgagccaagagccgtgacattggtgccaagcaaaaaatgcacgatgaggagtgacactgcctcgggaacctcactcttgccaacctgtaataaatatgagtgccaaactctg

SEQ ID NO: 403208 - DNA, 5956 bp, Homo sapiens
  misc_feature (2100)..(2100): n is a, c, g, or t
  misc_feature (2308)..(2308): n is a, c, g, or t
  misc_feature (2385)..(2385): n is a, c, g, or t
  misc_feature (2394)..(2394): n is a, c, g, or t
  misc_feature (2409)..(2409): n is a, c, g, or t
  misc_feature (2413)..(2413): n is a, c, g, or t
  misc_feature (2418)..(2418): n is a, c, g, or t
  misc_feature (2445)..(2445): n is a, c, g, or t
  misc_feature (2448)..(2448): n is a, c, g, or t
  misc_feature (2919)..(2919): n is a, c, g, or t
  misc_feature (3119)..(3120): n is a, c, g, or t
  misc_feature (3123)..(3123): n is a, c, g, or t
  misc_feature (3140)..(3140): n is a, c, g, or t
  misc_feature (3552)..(3552): n is a, c, g, or t
  misc_feature (3946)..(3946): n is a, c, g, or t
  misc_feature (3987)..(3987): n is a, c, g, or t
  misc_feature (3993)..(3993): n is a, c, g, or t
  misc_feature (4197)..(4197): n is a, c, g, or t
gaattcacagatagagagactctgcggcccagattcttcaggattctccgtgaagggataaccaggggaagcaccaagatgaccgatgcccagatggctgactttggggcagcggcccagtacctccgcaagtcagagaaggagcgtctagaggcccagacccggccctttgacattcgcactgagtgcttcgtgcccgatgacaaggaagagtttgtcaaagccaagattttgtcccgggagggaggcaaggtcattgctgaaaccgagaatgggaagacggtgactgtgaaggaggaccaggtgttgcagcagaacccacccaagttcgacaagattgaggacatggccatgctgaccttcctgcacgagcccgcggtgcttttcaacctcaaggagcgctacgcggcctggatgatatatacctactcgggcctcttctgtgtcactgtcaacccctacaagtggctgccggtgtacaatgccgaggtggtggccgcctaccggggcaagaagaggagtgaggccccgccccacatcttctccatctccgacaacgcctatcagtacatgctgacagatcgggagaaccagtccatcctcatcacgggagaatccggggcggggaagactgtgaacaccaagcgtgtcatccagtactttgccagcattgcagccataggtgaccgtggcaagaaggacaatgccaatgcgaacaagggcaccctggaggaccagatcatccaggccaaccccgctctggaggccttcggcaatgccaagactgtccggaacgacaactcctcccgctttgggaaattcattaggatccactttggggccactggaaagctggcttctgcagacatagagacctacctgctggagaagtcccgggtgatcttccagctgaaagctgagagaaactaccacatcttctaccagattctgtccaacaagaagccggagttgctggacatgctgctggtcaccaacaatccctacgactacgccttcgtgtctcagggagaggtgtccgtggcctccattgatgactccgaggagctcatggccaccgatagtgcctttgacgtgctgggcttcacttcagaggagaaagctggcgtctacaagctgacgggagccatcatgcactacgggaacatgaagttcaagcagaagcagcgggaggagcaggcggagccagacggcaccgaagatgctgacaagtctgcctacctcatggggctgaactcagctgacctgctcaaggggctgtgccaccctcgggtgaaagtgggcaacgagtatgtcaccaaggggcagaatgtccagcaggtgatatatgccactggggcactggccaaggcagtgtatgagaggatgttcaactggatggtgacgcgcatcaatgccaccctggagaccaagcagccacgccagtacttcataggagtcctggacatcgctggcttcgagatcttcgatttcaacagctttgagcagctctgcatcaacttcaccaacgagaagctgcagcagttcttcaaccaccacatgtttgtgctggagcaggaggagtacaagaaggagggcatcgagtggacattcattgactttggcatggacctgcaggcctgcattgacctcatcgagaagcccatgggcatcatgtccatcctggaggaggagtgcatgttccccaaggccactgacatgaccttcaaggccaagctgtacgacaaccacctgggcaagtccaacaatttccagaagccacgcaacatcaaggggaagcaggaagcccacttctccctgatccactacgccggcactgtggactacaacatcctgggctggctggaaaaaaacaaggatcctctcaacgagactgttgtggccctgtaccagaagtcctccctcaagctcatggccactctcttctcctcctacgcaactgccgatactggggacagtggtaaaagcaaaggaggcaagaaaaagggctcatccttccagacggtgtcggctctccaccgggaaaatctcaacaagctaatgaccaacctgaggaccacccatcctcactttgtgcgttgnatcatccccaatgagcggaaggctccaggggtgatggacaaccccctggtcatgcaccagctgcgctgcaatggcgtgctggagggcatccgcatctgcaggaagggcttccccaaccgcatcctctacggggacttccggcagaggtatcgcatcctgaacccagtggccatccctgagggacagttcattgatagcaggaaggggncagagaagctgctcagctctctggacattgatcacaaccagtacaagtttggccacaccaaggtgttcttcaaggcngggctgctngggctgctggagganatgngggangagaggctgagccgcatcatcacgcgnatncaggcccaagcccggggccagctcatgcgcattgagttcaagaagatagtggaacgcagggatgccctgctggtaatccagtggaacattcgggccttcatgggggtcaagaattggccctggatgaagctctacttcaagatcaagccgctgctgaagagcgcagagacggagaaggagatggccaccatgaaggaagagttcgggcgcatcaaagagacgctggagaagtccgaggctcgccgcaaggagctggaggagaagatggtgtccctgctgcaggagaagaatgacctgcagctccaagtgcaggcggaacaagacaacctcaatgatgctgaggagcgctgcgaccagctgatcaaaaacaagattcagctggaggccaaagtaaaggagatgaatgagaggctggaggatgaggaggagatgaacgcggagctcactgccaagaagcgcaagctggaagangagtgctcagagctcaagaaggacattgatgacctggagctgacactggccaaggtggagaaggagaagcatgcaacagagaacaaggtgaagaacctaacagaggagatggctgggctggatgaaatcatcgctaagctgaccaaggagaagaaagctctacaagaggcccatcagcaggccctggatgaccttcaggnngangaagacaaggtcaacancctgtccaagtctaaggtcaagctggagcagcaggtggatgatctggagggatccctagagcaagagaagaaggtgcgcatggacctggagcgagcaaagcggaaactggagggcgacctgaagctgacccaggagagcatcatggacctggaaaatgataaactgcagctggaagaaaagcttaagaagaaggagtttgacattaatcagcagaacagtaagattgaggatgagcaggtgctggcccttcaactacagaagaaactgaaggaaaaccaggcacgcatcgaggagctggaggaggagctggaggccgagcgcaccgccagggctaaggtggagaagctgcgctcagacctgtctcgggagctggaggagatcagcgagcggctggaagaggccggcggggcnacgtccgtgcagatcgagatgaacaagaagcgcgaggccgagttccagaagatgcggcgggacctggaggaggccacgctgcagcacgaggccactgccgcggccctgcgcaagaagcacgccgacagcgtggccgagctgggcgagcagatcgacaacctgcagcgggtgaagcagaagctggagaaggagaagagcgagttcaagctggagctggatgacgtcacctccaacatggagcagatcatcaaggccaaggcaaacctggagaaagtgtctcggacgctggaggaccaggccaatgagtaccgcgtgaagctagaagaggcccaacgctccctcaatgatttcaccacccagcgagccaagctgcagaccgagaatggagagttgncccggcagctagaggaaaaggaggcgctaatctcgcagctnacccgngggaagctctcttatacccagcaaatggaggacctcaaaaggcagctggaggaggagggcaaggcgaagaacgccctggcccatgcactgcagtcggcccggcatgactgcgacctgctgcgggagcagtacgaggaggagacagaggccaaggccgagctgcagcgcgtcctgtccaaggccaactcggaggtggcccagtgnaggaccaagtatgagacggacgccattcagcggactgaggagctcgaagaggccaaaaagaagctggcccagcggctgcaggatgccgaggaggccgtggaggctgttaatgccaagtgctcctcactggagaagaccaagcaccggctacagaatgagatagaggacttgatggtggacgtagagcgctccaatgctgctgctgcagccctggacaagaagcagagaaactttgacaagatcctggccgagtggaagcagaagtatgaggagtcgcagtctgagctggagtcctcacagaaggaggctcgctccctcagcacagagctcttcaagctcaagaacgcctacgaggagtccctggagcacctagagaccttcaagcgggagaacaagaaccttcaggaggaaatctcggaccttactgagcagctaggagaaggaggaaagaatgtgcatgagctggagaaggtccgcaaacagctggaggtggagaagctggagctgcagtcagccctggaggaggcagaggcctccctggagcacgaggagggcaagatcctccgggcccagctagagttcaaccagatcaaggcagagatcgagcggaagctggcagagaaggacgaggagatggaacaggccaagcgcaaccaccagcgggtggtggactcgctgcagacctccctggatgcagagacacgcagccgcaacgaggtcctgagggtgaagaagaagatggaaggagacctcaatgagatggagatccagctcagccacgccaaccgcatggctgccgaggcccagaagcaagtcaagagcctccagagcttgctgaaggacacccagatccagctggacgatgcggtccgtgccaacgacgacctgaaggagaacatcgccatcgtggagcggcgcaacaacctgctgcaggctgagctggaggagctgcgtgccgtggtggagcagacagagcggtcccggaagctggcggagcaggagctgattgagaccagcgagcgggtgcagctgctgcattcccagaacaccagcctcatcaaccagaagaagaagatggatgctgacctgtcccagctccagtcggaagtggaggaggcagtgcaggagtgcagaaacgccgaggagaaggccaagaaggccatcacggatgccgccatgatggcagaggagctgaagaaggagcaggacaccagcgcccacctggagcgcatgaagaagaacatggagcagaccattaaggacctgcagcaccggctggacgaggccgagcagatcgccctcaagggcggcaagaagcagctgcagaagctggaagcgcgggtgcgggagctggagggtgagctggaggccgagcagaagcgcaacgcagagtcggtgaagggcatgaggaagagcgagcggcgcatcaaggagctcacctaccagacagaggaagacaaaaagaacctgctgcggctacaggacctggtggacaagctgcaactgaaggtcaaggcctacaagcgccaggccgaggaggcggaggagcaagccaacaccaacctgtccaagttccgcaaggtgcagcatgagctggatgaggcagaggagcgggcggacatcgctgagtcccaggtcaacaagcttcgagccaagagccgtgacattggtgccaagcaaaaaatgcacgatgaggagtgacactgcctcgggaacctcactcttgccaacctgtaataaatatgagtgccaaactctg

SEQ ID NO: 403209 - DNA, 714 bp, Homo sapiens
agttgcgtgccgtggtggagcagacagagcggtcccggaagctggcggagcaggagctgattgagactagtgagcgggtgcagctgctgcattcccagtacaccagcctcatcaaccagagatcaggcggagccagacggcactgaagatgctgacaagtctgcctacctcatggggctgaactcagctgacctgctcaaggggctgtgccaccctcgggtgaaagtgggcaacgagtatgtcaccaaggggcagaatgtccagcaggtgatatatgccactggggcactggccaaggcagtgtatgagaggatgttcaactggatggtgacgcgcatcaatgccaccctggagaccaagcagccacgccagtacttcataggagtcctggacatcgctggcttcgagatcttcgatttcaacagctttgagcagctctgcatcaacttcaccaacgagaagctgcagcagttcttcaaccaccacatgtttgtgctggagcaggaggagtacaagaaggagggcatcgagtggacattcattgactttggcatggacctgcaggcctgcattgacctcatcgagaagcccatgggcatcatgtccatcctggaggaggagtgcatgttccccaaggccactgacatgaccttcaaggccaagctgtacgacaaccacctgggcaacaagagtgaaactccatctcaaaataaa

SEQ ID NO: 403210 - DNA, 450 bp, Homo sapiens
ttgaaagggaattttaaggatactacaaagtggtagtattttgtcatggtctgctgatttatttcatgtgctccagtggtttggtcaattttacaaaagacagcaacagtttaaagtgctagacttaaaaagtctgcattttctccatatgaaatcttaggtccgtatgacagccaacacctcaaacgcttcttctgaaagtaccttcttattttgtgcgtttctgtgttatacacataggtgtctgtgcttcactaattaggtagctgagggactggagggaggaaacttgtccaagaatattgagtgatgaacagcacacaccattaaagtaggtagagggagtattgcacacattctcatgaccttttttggttgaattaggggcccagaaacacttagctgagcagctctgactgtacttgccttttttcaattcaaacagtaaaa

SEQ ID NO: 403211 - DNA, 341 bp, Homo sapiens
taccagtttgtagtatagtcttctagatatttatgttggtgcaaaagtaattgcagttttgccattaaattaaaagtatattttaaatattttaaatgagaaatccacactttacactccatgttgtacctgtttttgtctaagaatatactttggatatctgcagtttactttgacatgcatccaaaagttaagatacatggaatgatgggtatatatgtgataaagcaaataaagcggaatgttaaagttttaaactaggtgatgggtgtacaggcaaaattctttaaactttgctgtgtatattacattgtacataataaaatggtggcaaatctatg

SEQ ID NO: 403212 - DNA, 563 bp, Homo sapiens
cctccccaactcccaccacctactcaagaaaggtatctggctctgcacctccttatttggagatgaaaatggactaagctttcaggcatcctgcctgcccttgctgcctacagccttatcactggttgcaaaaatagctttggtaatctccaaagatggatgctccaaccccacaaccttggggcttcccaccacttggactcttaatttctcatgaaccctacagaatacagctaatacctgagctgtttctcttcaaccagccaaggtattcctgtcttaactaggattaaaattcttatccatgctttatttgtcctagacatagctaatggtagaaaataaatgtataatttcagtcttccattaaaaataaatattgggccaggcacagtggttaatgcatgtaatcccagcactttgggaggccgaggtgggtggagaggaatcctctccttccacctcctggctcctgccttctgtcaccatctggccattgaaggggtcccctggtctcctgtggggggcacctgggggctgatggcgttggtccccatgatcac

SEQ ID NO: 403213 - DNA, 464 bp, Homo sapiens
ctttgcccattgggtgagacgccactcacagaagggaaatggcttcctaaatctaatcattgccccttcaagcactaacaacccgtgcccaggagctgatggctaatgaattattgagctggaaagggagaagaggtagaaccaaggaggaaagaaacagaaaaatgagagagcaggccgggtggggtggctctcgcctgtaatctcagcactttgggaggccaaggcgggtggatcacctgaggtcaggagttcaagcccagccagcccaacatggcgaaaccccgtctctattaaaaaatacaaaaaaatttagctgggcctagtggtgggcgcctgtaatcccagctactccggaggctgaggcaggagaatcgcttgaatctgggaggcagaggttgcagtgagcagagatcgcaccactgcactccagcctgggcaacagagcgagactccgtctcaaa

SEQ ID NO: 403214 - DNA, 443 bp, Homo sapiens
agaccctgtctcaaaaacaaaaacaaaaacaaaaacaaaaacaccacacagctatgaatagtttatcttaaatatttttcagaagtgtaaaattttcataaaacttagcccatttatacctttcttctattgtctttagggtcttcatgtttttaagagaccattttaaggatcttgaacctgatactgctgtctattaatgaaataaactcagggtctcactttgtccccagactggagtgcattgccagtgcatattttgttctgagcattcactgtaaatttttggtagtattccccataggaatctcaaacttcaggagagcagctttcagaataacaggagagctcaaaatatcagtcaagtcttttatttttcttttcttttcgtatcctttattttatctattcttggagtagatcaagtgcccaccccacagctc

SEQ ID NO: 403215 - DNA, 471 bp, Homo sapiens
cacaaagagttgccaacatacccagtgaaatagaaaatagttcctattttgttcttcagcaataattgttaatacagatttgtacaatcaggatattaagcatttggggacactagttgcaactttcaccagagcccacatttgctcacagaggagccattcggctgcctgtatcaaaaggatcagtggagtagggcagccagctgaccccattactcacaactttcactatctcaggtttgaggcaggagcgtgccaaccccatttacaatgctatctaatagggaaaatttaaatctaaagttgtcatcataccaagttaattaaattcatattaaatgtcaatcaaagccaggcaccattgctcatgcctataatcccagcattttcagaggccaaggaaggagaattacttaaggccaggagttcaagattagcctaggcaacatagtgagaccctgtctctataaa

SEQ ID NO: 403216 - DNA, 101 bp, Homo sapiens
gcatttttttccattctgtgatggcaaaagaaaatctaaccaaccccaggattttcttagtcacttcaagtttgaatgcagccccttcagaattgctcctc

SEQ ID NO: 403217 - DNA, 374 bp, Homo sapiens
aagcccacagtcacaaacttgtgcaggaatgggggtaccgggaagcagcccggtgttccaagccttttgagattctccggacctgcgcgccgcccgctcggcagggggctcggcaggcgcgggcggcgggtgggggcgggaggctctgcccgctcggtggctgccgcggcctcctccgcgctgctctccacgcctggcttattatgcacgaggcaggcaatttgccttcctccccggggacccatctcggagacaagaaggtagtttgttctctgtaatggcttctgctggagtgcggcggggcccaggcgcgagcgggggcacgggcggggagttgtcagcgaaggatgcgcccggcgccccccggcggccgc

SEQ ID NO: 403218 - DNA, 429 bp, Homo sapiens
ggactacaggcgcctgccaccacgcctggctaattttttgtattcttagtagagacggggtttcactgtgttagccaggatggtctcgatctcctgacctcgtgatccacccgcctctgcctcccaaagtgctgggattacaggcgtgccaccagcgcccggccaactccattcttttgagcaagatacttaacgtgggcgacaatgttctaatgtcctagatggagtctctggctaaatttctgtgtcttctccaaacccagtgcatgaagctcttcttgaaaccccagggcagaggctgtgtgtgcccccattagcgctgcaactccttaagggaagatatactgagtctccactggaagtgagatctgagacttaatcaggtgatgtgatgcctgaaatttggagttagaagaggcaggtgaccac

SEQ ID NO: 403219 - DNA, 324 bp, Homo sapiens
acctactaaaaatcagtaattgagaaaaattttaattggtatccaattttctgatgtaccaaaagaaaatagtgtgaaatcatatacgagtttctggtattgctgagccaaaaacagaaagaggaacagaaagttaagcccacaggaattattgctaaccctatgtttttctgtgtttgaggttataattcttttctttcacagcttttgaaaagtaatagaaacactgttctttccccctcaaaaaaattaggcaaaaacgacattcctgttgagttaaattttccaattacaaataaaatgtgctttgatatatttcttcta

SEQ ID NO: 403220 - DNA, 492 bp, Homo sapiens
ggatttcatgggtcattatctaccatatatatgcacatatgtgtgtctctgtatatgtacacacacagaaacacacgcacattctctctgttgacttacagattgcttactaaagctgcgtaagttgttgacgttaactactttacaaaaatctttagaaatgtgtttctaaaaaattaaaagctgggtgtggtgtgtctgacagcctgtattcccagcactttgcgaggttgagacaggtggatcgcttgagcccaggagttcaagaccaacctgggcaacatggcaaaatcttgtctctacaaaaagtacaaaaattagtccggtgtgtttgcgtgtgctctcggtcccaactactttgaaggctggggtgggaggtttgattgagcctaagaggtcaaggctgcagtgagctgagatcatgccaccacattccaatctgggtgacagagcaagactctgtctcaaaaataaaaaaaaaataataaatta

SEQ ID NO: 403221 - DNA, 342 bp, Homo sapiens
gagcattagattaggacaaacagctaatgcatgcggggcttaaaacctagatgacgggttgatatgtacagcaaaccaccatggcacatgtatacctatgtaacaaacctgcactttctgcacatgtatcctagaacttaaaatttaaaaaataaataatttttgctttctcattaaagcagatttcacaattgctatactttacagttatttggtaaaattggagtttatgcttcaaaaatatggcccaacaagtaccaagggcattcttctgctcatcttatcaagatttactgaacacttactgtgccatgcatgccatgtgcactagatgcagcaaaa

SEQ ID NO: 403222 - DNA, 470 bp, Homo sapiens
cttgattgctgttggtggacactgtctctctgtagtaacactatgatatccacaaaagcttttattatctgccagcaacttccctttgttagaaggagagggaaaaaatgattcccaactaggattctgcccttttcactactgctgtcactttctagcccattaatcctccaaaagcatatgaagcctccattatcaaacagttatccaataatcttaaatggttgtgtccacagacattagcagaatttctgcagtgttgcacatgtatgtgtacgtgtgtgccgtgttgtgtgtgccatgagggcaacagatccatcagtcctctgtgtccccagtggctcccagcacagcactggagagtattttgaatacttttttttcttctgttttacttcctgagctttctattaaactacccacattaatatagttattacatacaatgaatagcatataaatatttttct

SEQ ID NO: 403223 - DNA, 413 bp, Homo sapiens
tttcagttatctggctttagtaaaatcaccttcaaaaagaatggaggtgaatagagataaaacatttttttgtagagtatatgggctgacatttaagtgagttctttagtaagagtcttaacatgtcatacatgagaagacaagaattttgaaagaccgattggtagattatgttaagacccacaaagcaaagtatgtttctttggtcccatgtttgtgtaggtctttgtgtctcacagccaggctctctgtgtagtgaagttagatgccctgctcaggatgtgttgaattgggcaaaaatccgaacccacatgaaagaacagagagctattcttacaaaacagcaggtggattgtattcaggaggagttccaggagttgctgcaggaagagagaaattccaggaggaaagga

SEQ ID NO: 403224 - DNA, 536 bp, Homo sapiens
ggttttgccttttctttccacctctaaatatcatagggcctcaaaactcaatcctggtacctctcctgtccttcactgcgttctcttcctaggtgaccccatgcagtcttggggctctaaatttgacctctagaatataaattgctcctcaatttcagactcagacttacttgtggacatgcatctccacttaggtgtctaatagacaaataaaactcagtaggtttcatgagtttcaactgaactctcgaacttgcccctctccaaaacagctctacttgtagccttccacattgcagataatgacaccatccagatatgtgccagtaaagctttaacatctgtcagggttgaggagggtagagaagctctagattgtagtgtttgcagatttccttcatgtaaataatgctaatatttatcaaagtcaagctgtcaacctgaggtcattgaaccagagtcgggaagaatgctctggagggcagttgtgccctggctcctgccacacttcagcactatttacccagcggttcagc

SEQ ID NO: 403225 - DNA, 267 bp, Homo sapiens
ggtgaggcaataaacacagatttctccttttattggttgtttgcgttagaaggaagtgatgttcatgtgtaacttcaaactctgttccctgatgtcaacctctgccctactcttcattaagcagagctgaaattacagatttatttttcctcccttacctctcctttcctaaggggaaatactctatacagttccctttctgttaccaagcatgattagaaatgcaaggtttgactgatgaagtcatttaacctcttggattcatag

SEQ ID NO: 403226 - DNA, 436 bp, Homo sapiens
agataaaggtcttcaaggcatgccttgaatgatctgcatccgtcttgctaagccttgggctcctactcaagcttcaggctgttttccactcctggctggggccacactcctgtccccacccactcaacctgctgctcagaatccctctctcccctgcaactcctcctcctaggacttctctttccctaacactgggtcactgaatcttgctctcagtgaattcatgttccttgccccatatccaacctccactccatccccatttcccctctactattctacctttccttctattatcaaaggaatatcgctttctaacatactaattcatttactttttatggcggtggtttactgtcatctctctccgcctccgcaggtccccattcactggaagtggagcttgttggagggatctctgtctagggctccagct

SEQ ID NO: 403227 - DNA, 232 bp, Homo sapiens
tgcccgcgttgacagcaccctgagtccccatgaacacgcgaaaaggtttctagctcctatcaatgccgttcggaagcaaagcaagtgttcacgactcgccttgatctggggccctgtccagggtgggaaggccccagaagcaggcgccaggacagaaatgagcctttgcccttcccaatccacgcagcgtcccgcccaggcccgggttcccggcagccaggccccctccccg

SEQ ID NO: 403228 - DNA, 163 bp, Homo sapiens
ctcagcaaattcaaatcttgctttttgaaactttcagaaactatttttctttcaaatgtttttgatatacagttgggtgaatctgcagatgcagaaactgcagataggaagggctggctgtcctttttcataagactgatctgagaatgctcccacagacaag

SEQ ID NO: 403229 - DNA, 105 bp, Homo sapiens
gggctctatttatgggactggggtcccaggacaggctgcacacagatcaactgcccaaggagagacaactggctaatggtaagctgggcctgggctaaaggaggc

SEQ ID NO: 403230 - DNA, 282 bp, Homo sapiens
agtgagaagtgcctagctgaggaaactgaggatcagggaggtggaggagccatggtcacacaggcagtgagtggaagagacggaatgtgaacccagggtccttcatatgctgacaggagaaatgaaggaaggggatgatttctgcacaggctagatttcatctattgccccagaggggtccagctgggactccaacctcaccactccttccagaaactgtccctgctggctgaaaggaggatggaggtggtagccctcattccttatgctgggactcaggcc

SEQ ID NO: 403231 - DNA, 435 bp, Homo sapiens
gtacaagtttttatgtgggtgtgtataggtagatgcctatcttaccgatatatggaatggagttatagtaacttgtagcgtctttctctgctgactccaactgtatgtcagttctgagtctgttttggttgattattttctttacgtgtcatgcttttctgcttcgttgtatgcctggcagtctttgactggatgctgaattttacttcatgggtgttaaatattttcgtattgttataaaccttaaactttcagagacgtagttaagttacttaaacagtctgatactttcaggtcttgcttttatgatttgttaggcagacctggaccaatgcttagttgagggctaatttttctttttctttttgagacggaatctcgctctccctccaggctgaagtgcagtggtgtgatctcagctcactgcaacctctg

SEQ ID NO: 403232 - DNA, 412 bp, Homo sapiens
caagctgacaactgatgccagtagctcacagtaaagccttaatttgtctagactcagaaagtgacaagggtttaagctgtctagtccaatttctgttctgtactggattcatgctacgtggctccatgtccttccaatggcagagaggtcattactccatgaaacaaccacacctaccctggggagctctgagtgatgcaacattctcctctttctttgtactgagctgaagtctgtctgtctcccttgaggtcacaaaaggcaacttagcctcctatccctggagtcagtcctgcctccatggaaagacactgagcagtctttccccagtctctgtgcatttggggtaaatgcgcttctgtttatctgtgttccttgaagtgtgatacctgggaataaacccccaaacctt

SEQ ID NO: 403233 - DNA, 342 bp, Homo sapiens
acattggaaaataggattcaatcttttcatttgcatggatagtaactggtgtcactcctgctttctagttaaggcctgcaaacttggtaatcattaatcattaaatactcaaaggcatacaggagcctagacaggtgacataaatgtataaactggggttggatataaggcaataaaaagtagtgaggcctactggaatgcacgacccacctaaaggcattctgtgtgtgtgtgtgtgtgtgtgtgtgtgtgtgtagtacttgaataaatttttcttaaaatacccaataaatcaactgaaaaaaaatttgtgccaggcaaacaaaactcagctgcagcact

SEQ ID NO: 403234 - DNA, 170 bp, Homo sapiens
gtcttgggtgtgtggaacagggctgggtgtgtgtgtcttctgggtgatgatctctgatgtaggtccagtctgggcatctaacagtttattcatctgttgtctcatagagcatctttgatcagagagaaagtgaatttctttgggaaataatccaccttgtattgtaaagg

SEQ ID NO: 403235 - DNA, 645 bp, Homo sapiens
atgatggttttattataggaagcttttatatgaagtctaattcaaacttttatgttagctatttggttgcttgggaagttacattgtaatttgatgcaggattttatactactggaaaggtaatatagtggctggttgctgccttaaagttgcaagttgagtattcacattttgtaacgaatgtacataaaattaaatggctgtttctaaaacatagggaaatgccttgaactatttttaatcttttgtactactactatttttttctaacaaatatctttgtttgctttcctttatttgttcatcccaaaggcaacagtttttatgtaaatgtagtaataattttaacatttaagtaactccttcaaattactatattgaacatttcttgaatactttccctgtttaatgcaaggtattgctaaaggtgctttcatgcacggaaagagtttatactctaaaatacatgaggcttattatactaaattacattacttaggcaattttaaaattatatcacagaaattgttcattttattcccccaaaagcctcatggaaaatgcctacctctgttatgtcaaaagtttgataattttgtgatcatttgaaagatggtttaatactctccccctcaaaaaaaaaaa

SEQ ID NO: 403236 - DNA, 579 bp, Homo sapiens
tctttgtcctttttaacttggctattaggaaatttaatattatgatatatgtggcttaatttttttattttgttttttgagatggagtctcgctctgtcaccctggccggagtgcagtggcacaatcttggctcactgcaagctccacctcccggcttcacgccattcttctgcctcagcctcccgagtagctgagactacaggcgcacgccaccacacccggctcattttttgtatttttagtagagatggtgtttcaccatgttagccaggatggtctcgatctcctgacctcatgatatgcccaccttggcctcccaaagtgctgggattacaggcatgagccaccgcgcccggccgtgtcttaaatttttattggatgataactaaactattaaatgaatgagagaaagtggaagagataccttctattttgtttgcacattagttttgtttggaatatctttgtaagtgctgcttagtctatatcctgattacctcttatgcaaaatgtataatttccaactgctgtaaatgtactgtgctactctttcttttccacttgtcctagtctttttt

SEQ ID NO: 403237 - DNA, 488 bp, Homo sapiens
tgcctggctgtgcacagtgtggccagaccccatgctcacacaccccttgctgctgcacatctggttcacccatggcaggcatggaatccaggccagtagcacaagcagagcacagcctgccaggccaagtgggtggaacaaacacagtgagcccgagcaacacttgggcaaaggcaccactggccacagaggtttccagctggaaaagtgacatcccaagaatcccatgacactactataaactggcacagctttgtactatgctgctcagatagaactggtcagacaaggccaatgggtcagaggtagttctctctgctagaggtgagtctcgctgaagagccatagcttagaacctagggctgggagttttgtgctataagaaaattggataggaatagaagggatgaattctaattttttggcaagctgtatatgtggtgttcagaatccaaaataaacatcacctgatatccacaggatacaca

SEQ ID NO: 403238 - DNA, 580 bp, Homo sapiens
ttttacagtggtgctggacatgcagtcccactcactagacattttggagcattacgtggaaatgcccatccagcggttggagaggtagggtaggatctgaagatctcaagcctcggaagcacagatttaggagtcactgacttagaggtggtagtttcaagtgacgtgatggttaagttcaccaagagaaaaagtttagaaagaaaaagagctgagccttctgccctattttttagaagagggtttctgagagcctgggtattcaaatgataagatgggtgtgtggtgcagggacaagacttcagtcagaggacccagggtctctgctttagcaccatcttgctgtgtgacgttgggcagctgaccttactatcagtgcctcagtttcctcccctgtaaccagggacaataatgccagccctctctccctcccaaaattattgcatggatcaaaagggagaatgcacaagaaagtgctttgtaaaccactcaaaagactcatcaaatgtaagggattattataattgcagtgggagatgcaggaggccaataaaatggatttggttgcagtaagaaaaag

SEQ ID NO: 403239 - DNA, 536 bp, Homo sapiens
tgagtgtgagaggtctaggagacatctggagcgtgttgacccccgcaagtctggtgagtcctccagcttagcctgtcccggcccctcacagctgtcccttctagaatcacagccctgtgattcatccccacctgggccttgtttcctgaaccccacatctgaccgctggcccgagggagaatgccgtcggcccctgctctgaaagccctgaaagcccatgcctgcgtgcacacacgcgtgcacacacacacacaccctcttgatttgatttcctgtggcctgggtatgtgcccactcccattggcacacctagacccacctgctggcccagatccccatgcttggtctgcactgagacacttgcatttccacgctgggaacctcacccaggaaggctagaggatctggaaccctcacccctcaccactctctggccactgtgctaggtgtccctgacatgaaggaggcagtgacagttacgggcccagctctgggccaccaccaggtctggcgagtgtcattgtcaggatgatgct

SEQ ID NO: 403240 - DNA, 363 bp, Homo sapiens
cccatcttgcagagcccaacctagggagcagggaacagagagctgccccgcggcaccatctgtttctgccagcatctatgttgggccccgccggttacatctgttgagaagaacagtgtacttgatgagttgttggaaagaaatgtttagtctcccccatcatctctgttagccattacgaggctgctgggctcacgtgggtgtatctatgtgtgcttcctctcaggcctcatctgtatcaattggaaatcagtcactgggagttagttgcagtcagcagggacccaaggcatttcccagtgacatcaattcgtcttctcttgcagaaattcaggaaacaattaaaattctgatgcgttccag

SEQ ID NO: 403241 - DNA, 259 bp, Homo sapiens
aagacacaccacctgtcctcagagaacagtaatgggtacatttggtcaacaaataactcaaagtctgaagtactaatgtggttatttatttatttatttatttatttatgtagagatggagccttcgctgccttcgccaggctggagtgaagtggagctatgattcctcctctgcacttcagccccatcctggatgatagagcaagaccctgtccatctgtccatccgtccatccatccatccatccatccatccatcc

SEQ ID NO: 403242 - DNA, 1159 bp, Homo sapiens
ggctggggcaggggagtcagcagaggcctcgctcgggcgcccagtggtcctgccgcctggtctcacctcgccatggttcgtctgcctctgcagtgcgtcctctggggctgcttgctgaccgctgtccatccagaaccacccactgcatgcagagaaaaacagtacctaataaacagtcagtgctgttctttgtgccagccaggacagaaactggtgagtgactgcacagagttcactgaaacggaatgccttccttgcggtgaaagcgaattcctagacacctggaacagagagacacactgccaccagcacaaatactgcgaccccaacctagggcttcgggtccagcagaagggcacctcagaaacagacaccatctgcacctgtgaagaaggctggcactgtacgagtgaggcctgtgagagctgtgtcctgcaccgctcatgctcgcccggctttggggtcaagcagattgctacaggggtttctgataccatctgcgagccctgcccagtcggcttcttctccaatgtgtcatctgctttcgaaaaatgtcacccttggacaagctgtgagaccaaagacctggttgtgcaacaggcaggcacaaacaagactgatgttgtctgtggtccccaggatcggctgagagccctggtggtgatccccatcatcttcgggatcctgtttgccatcctcttggtgctggtctttatcaaaaaggtggccaagaagccaaccaataaggccccccaccccaagcaggaaccccaggagatcaattttcccgacgatcttcctggctccaacactgctgctccagtgcaggagactttacatggatgccaaccggtcacccaggaggatggcaaagagagtcgcatctcagtgcaggagagacagtgaggctgcacccacccaggagtgtggccacgtgggcaaacaggcagttggccagagagcctggtgctgctgctgctgtggcgtgagggtgaggggctggcactgactgggcatagctccccgcttctgcctgcacccctgcagtttgagacaggagacctggcactggatgcagaaacagttcaccttgaagaacctctcacttcaccctggagcccatccagtctcccaacttgtattaaagacagaggcagaa

SEQ ID NO: 403243 - DNA, 569 bp, Homo sapiens
atctctttctttctctgtgtgtgtgcatttgtgcacgtgtctgtgcatagctgtgagaccaaagacctggttgtgcaacaggcaggcacaaacaagactgatgttgtctgtggtgagtcctggacaatgggccctggagaaagcctaggaaggtgggaactgaagggggagatgaggcacacaggaacactggatgggaaaaaggggaggggaggcagtttgggggtgtggtatcacagctctgccacttatcttgggagtctgggcaaatcacttcccctctcttagcctcagtttcttcatctgtaaaatgggatgataacagcacttccttagtaggttttgattttagagtgagaaggttggcctacagtaaagatcagataatgtaaatcagtgaaaaaggtcaggggtaagaaaattacattctctttacctaacgctaaatgaccagttaatgggtgcagcacaccaacatggtacatgtatacatatgtaacaaacctgcacattatgcacatgtaccctaaagcttaaagtataataataataaaatttaaaaaaacgaa

SEQ ID NO: 403244 - DNA, 1311 bp, Homo sapiens
gaggtggaggttgcagtgagctgagatcgcgccactgcattccagccagtctggcgaaagagcaagactctgtctcaaaaaaaaaaaaaaaaaaaaaaaaagactaaagtacatggtttcttcaaagcttctctctctttctcccaccttagatgatttttcctttgcaatgtcctgtgtccattccgccccactcctcctggggccacctggaccaggtcttcatcatctcatatctatatgtttgctgtgtctcctggctggccactcttctgtaatttctcctcctctgagctctctgggcagctgaatcttctcactagtgaagtcgcctggttggatgctgatgagactgaccagctgaatccagttgaaaacttcacacttggcagtgatctggttctaaagacacaattttccatagtttcctaacaccatcctgcatgccacctgccttatttccccacatcacatcgtcccacttagcgggactgcactgctgatccaaattttacatcctttagggcccactcaggtcatatgtcctcagggaagtctttctggaagaaccttaaaccagaggttctcaacagggggcagttttgctccctgtggaacgtttgccaatgtctggacacatttcattcgtcacaaacggatgagggggatgctacagggatctggcggatagaggccagggatgctgctgaacatctgcaatgcataggacagcccacccccacccccaggggcggggtaaataatgatccagcccaagtgtcactggtgctgacgttgagtaaccctatcttaagctgtactcatcatctctccattccagccttggtggattctgtctcctctgaaccattcccatctcactttagcctacctagatcacaaagcttggcactcattatagactcccctatttattactccttcaagatgtgcaagaatcttttctctgcacttttaaagctctgccacttatcttgggagtctgggcaaatcacttcccctctcttagcctcagtttcttcatctgtaaaatgggatgataacagcacttccttagtaggttttgattttagagtgagaaggttggcctacagtaaagatcagataatgtaaatcagtgaaaaaggtcaggggtaagaaaattacattctctttacctaacgctaaatgaccagttaatgggtgcagcacaccaacatggtacatgtatacatatgtaacaaacctgcacattatgcacatgtaccctaaagcttaaagtataataataataaaatttaaaaaaacgaa

SEQ ID NO: 403245 - DNA, 484 bp, Homo sapiens
caaaatgtactttcctctttgtagggctgggactagaatgaggtgagcaaggcacttgccctcgggcgcaatatttaagaaggtgccataaaagtgtagtaatcaaggtaaattcattttgatgcaatatttttaaaaataaaaattaatgcaaagaaatccatgatgagcaagatagcaacattttaaataaagaacaggatccgaccctgtgtttgcatgaccctgcctcactcacctcaccctaatcctggccctggttccagtaaaaggaataggcagccagcctgcaggccgtagtttgctgacttggtgtccgcctgatgattttcaaaatatggcattaaaagaatgtttaccttgatgactgagtgttttggacatccttttcaattttgtcctgaaacaatttcatcccttgcctcacgctagtctccgccctgccttttggtctttcttttattttcccactttgaaaaaaaaa

SEQ ID NO: 403246 - DNA, 1383 bp, Homo sapiens
ggctggggcaggggagtcagcagaggcctcgctcgggcgcccagtggtcctgccgcctggtctcacctcgccatggttcgtctgcctctgcagtgcgtcctctggggctgcttgctgaccgctgtccatccagaaccacccactgcatgcagagaaaaacagtacctaataaacagtcagtgctgttctttgtgccagccaggacagaaactggtgagtgactgcacagagttcactgaaacggaatgccttccttgcggtgaaagcgaattcctagacacctggaacagagagacacactgccaccagcacaaatactgcgaccccaacctagggcttcgggtccagcagaagggcacctcagaaacagacaccatctgcacctgtgaagaaggctggcactgtacgagtgaggcctgtgagagctgtgtcctgcaccgctcatgctcgcccggctttggggtcaagcagattgctacaggggtttctgataccatctgcgagccctgcccagtcggcttcttctccaatgtgtcatctgctttcgaaaaatgtcacccttggacaagctgtgagaccaaagacctggttgtgcaacaggcaggcacaaacaagactgatgttgtctgtggtccccaggatcggctgagagccctggtggtgatccccatcatcttcgggatcctgtttgccatcctcttggtgctggtctttatcaaaaaggtggccaagaagccaaccaataaggccccccaccccaagcaggaaccccaggagatcaattttcccgacgatcttcctggctccaacactgctgctccagtgcaggagactttacatggatgccaaccggtcacccaggaggatggcaaagagagtcgcatctcagtgcaggagagacagtgaggctgcacccacccaggagtgtggccacgtgggcaaacaggcagttggccagagagcctggtgctgctgctgctgtggcgtgagggtgaggggctggcactgactgggcatagctccccgcttctgcctgcacccctgcagtttgagacaggagacctggcactggatgcagaaacagttcaccttgaagaacctctcacttcaccctggagcccatccagtctcccaacttgtattaaagacagaggcagaagtttggtggtggtggtgttggggtatggtttagtaatatccaccagaccttccgatccagcagtttggtgcccagagaggcatcatggtggcttccctgcgcccaggaagccatatacacagatgcccattgcagcattgtttgtgatagtgaacaactggaagctgcttaactgtccatcagcaggagactggctaaataaaattagaatatatttatacaaa

SEQ ID NO: 403247 - DNA, 1884 bp, Homo sapiens
  misc_feature (1414)..(1414): n is a, c, g, or t
  misc_feature (1419)..(1419): n is a, c, g, or t
  misc_feature (1444)..(1444): n is a, c, g, or t
  misc_feature (1484)..(1484): n is a, c, g, or t
  misc_feature (1486)..(1486): n is a, c, g, or t
  misc_feature (1510)..(1510): n is a, c, g, or t
  misc_feature (1513)..(1513): n is a, c, g, or t
  misc_feature (1528)..(1529): n is a, c, g, or t
  misc_feature (1553)..(1553): n is a, c, g, or t
  misc_feature (1562)..(1562): n is a, c, g, or t
  misc_feature (1565)..(1565): n is a, c, g, or t
  misc_feature (1570)..(1570): n is a, c, g, or t
  misc_feature (1573)..(1574): n is a, c, g, or t
  misc_feature (1618)..(1618): n is a, c, g, or t
ggctggggcaggggagtcagcagaggcctcgctcgggcgcccagtggtcctgccgcctggtctcacctcgccatggttcgtctgcctctgcagtgcgtcctctggggctgcttgctgaccgctgtccatccagaaccacccactgcatgcagagaaaaacagtacctaataaacagtcagtgctgttctttgtgccagccaggacagaaactggtgagtgactgcacagagttcactgaaacggaatgccttccttgcggtgaaagcgaattcctagacacctggaacagagagacacactgccaccagcacaaatactgcgaccccaacctagggcttcgggtccagcagaagggcacctcagaaacagacaccatctgcacctgtgaagaaggctggcactgtacgagtgaggcctgtgagagctgtgtcctgcaccgctcatgctcgcccggctttggggtcaagcagattgctacaggggtttctgataccatctgcgagccctgcccagtcggcttcttctccaatgtgtcatctgctttcgaaaaatgtcacccttggacaagctgtgagaccaaagacctggttgtgcaacaggcaggcacaaacaagactgatgttgtctgtggtccccaggatcggctgagagccctggtggtgatccccatcatcttcgggatcctgtttgccatcctcttggtgctggtctttatcaaaaaggtggccaagaagccaaccaataaggccccccaccccaagcaggaaccccaggagatcaattttcccgacgatcttcctggctccaacactgctgctccagtgcaggagactttacatggatgccaaccggtcacccaggaggatggcaaagagagtcgcatctcagtgcaggagagacagtgaggctgcacccacccaggagtgtggccacgtgggcaaacaggcagttggccagagagcctggtgctgctgctgctgtggcgtgagggtgaggggctggcactgactgggcatagctccccgcttctgcctgcacccctgcagtttgagacaggagacctggcactggatgcagaaacagttcaccttgaagaacctctcacttcaccctggagcccatccagtctcccaacttgtattaaagacagaggcagaagtttggtggtggtggtgttggggtatggtttagtaatatccaccagaccttccgatccagcagtttggtgcccagagaggcatcatggtggcttccctgcgcccaggaagccatatacacagatgcccattgcagcattgtttgtgatagtgaacaactggaagctgcttaactgtccatcagcaggagactggctaaataaaattagaatatatttatacaaaaaaaaaaaaaaaaaaaaaaaacccgggggcnccatnggcggggggggggaaaagggggagnggaaggggcccgtggggcacagggtggttcccggaccacngngtttcttgtggcacacaggggggnganaactcggggcggggnncccccataataggaggggggcggntaataaaanttngcagnaannggccggggtaaaggcgggggattaaacgggactccgcgcaaacncgagcaacaagacagacaggaacagggcaaaggagaaaccaaggacaacgaggcaacacaaaccgccgagaaaaacaagagcagcaggaacgagacacgacaacactcaacgaaaacaagaacacgacacccagaccgcccacagagaaaccgaaacgccgcgacgagcagcaccatcagcacccacccccgcacagacccaccgggcacgccccacaaacccccgatcggaagccagcacaccccaccctccagcccccccacac

SEQ ID NO: 403248 - DNA, 1321 bp, Homo sapiens
ggctggggcaggggagtcagcagaggcctcgctcgggcgcccagtggtcctgccgcctggtctcacctcgccatggttcgtctgcctctgcagtgcgtcctctggggctgcttgctgaccgctgtccatccagaaccacccactgcatgcagagaaaaacagtacctaataaacagtcagtgctgttctttgtgccagccaggacagaaactggtgagtgactgcacagagttcactgaaacggaatgccttccttgcggtgaaagcgaattcctagacacctggaacagagagacacactgccaccagcacaaatactgcgaccccaacctagggcttcgggtccagcagaagggcacctcagaaacagacaccatctgcacctgtgaagaaggctggcactgtacgagtgaggcctgtgagagctgtgtcctgcaccgctcatgctcgcccggctttggggtcaagcagattgctacaggggtttctgataccatctgcgagccctgcccagtcggcttcttctccaatgtgtcatctgctttcgaaaaatgtcacccttggacaaggtccccaggatcggctgagagccctggtggtgatccccatcatcttcgggatcctgtttgccatcctcttggtgctggtctttatcaaaaaggtggccaagaagccaaccaataaggccccccaccccaagcaggaaccccaggagatcaattttcccgacgatcttcctggctccaacactgctgctccagtgcaggagactttacatggatgccaaccggtcacccaggaggatggcaaagagagtcgcatctcagtgcaggagagacagtgaggctgcacccacccaggagtgtggccacgtgggcaaacaggcagttggccagagagcctggtgctgctgctgctgtggcgtgagggtgaggggctggcactgactgggcatagctccccgcttctgcctgcacccctgcagtttgagacaggagacctggcactggatgcagaaacagttcaccttgaagaacctctcacttcaccctggagcccatccagtctcccaacttgtattaaagacagaggcagaagtttggtggtggtggtgttggggtatggtttagtaatatccaccagaccttccgatccagcagtttggtgcccagagaggcatcatggtggcttccctgcgcccaggaagccatatacacagatgcccattgcagcattgtttgtgatagtgaacaactggaagctgcttaactgtccatcagcaggagactggctaaataaaattagaatatatttatacaaa

SEQ ID NO: 403249 - DNA, 1466 bp, Homo sapiens
ggctggggcaggggagtcagcagaggcctcgctcgggcgcccagtggtcctgccgcctggtctcacctcgccatggttcgtctgcctctgcagtgcgtcctctggggctgcttgctgaccgctgtccatccagaaccacccactgcatgcagagaaaaacagtacctaataaacagtcagtgctgttctttgtgccagccaggacagaaactggtgagtgactgcacagagttcactgaaacggaatgccttccttgcggtgaaagcgaattcctagacacctggaacagagagacacactgccaccagcacaaatactgcgaccccaacctagggcttcgggtccagcagaagggcacctcagaaacagacaccatctgcacctgtgaagaaggctggcactgtacgagtgaggcctgtgagagctgtgtcctgcaccgctcatgctcgcccggctttggggtcaagcagattgctacaggggtttctgataccatctgcgagccctgcccagtcggcttcttctccaatgtgtcatctgctttcgaaaaatgtcacccttggacaagctgtgagaccaaagacctggttgtgcaacaggcaggcacaaacaagactgatgttgtctgtgggctgggactagaatgaggtgagcaaggcacttgccctcgggcgcaatatttaagaaggtgccataaaagtgtagtaatcaaggtccccaggatcggctgagagccctggtggtgatccccatcatcttcgggatcctgtttgccatcctcttggtgctggtctttatcaaaaaggtggccaagaagccaaccaataaggccccccaccccaagcaggaaccccaggagatcaattttcccgacgatcttcctggctccaacactgctgctccagtgcaggagactttacatggatgccaaccggtcacccaggaggatggcaaagagagtcgcatctcagtgcaggagagacagtgaggctgcacccacccaggagtgtggccacgtgggcaaacaggcagttggccagagagcctggtgctgctgctgctgtggcgtgagggtgaggggctggcactgactgggcatagctccccgcttctgcctgcacccctgcagtttgagacaggagacctggcactggatgcagaaacagttcaccttgaagaacctctcacttcaccctggagcccatccagtctcccaacttgtattaaagacagaggcagaagtttggtggtggtggtgttggggtatggtttagtaatatccaccagaccttccgatccagcagtttggtgcccagagaggcatcatggtggcttccctgcgcccaggaagccatatacacagatgcccattgcagcattgtttgtgatagtgaacaactggaagctgcttaactgtccatcagcaggagactggctaaataaaattagaatatatttatacaaa

SEQ ID NO: 403250 - DNA, 1423 bp, Homo sapiens
ggctggggcaggggagtcagcagaggcctcgctcgggcgcccagtggtcctgccgcctggtctcacctcgccatggttcgtctgcctctgcagtgcgtcctctggggctgcttgctgaccgctgtccatccagaaccacccactgcatgcagagaaaaacagtacctaataaacagtcagtgctgttctttgtgccagccaggacagaaactggtgagtgactgcacagagttcactgaaacggaatgccttccttgcggtgaaagcgaattcctagacacctggaacagagagacacactgccaccagcacaaatactgcgaccccaacctagggcttcgggtccagcagaagggcacctcagaaacagacaccatctgcacctgtgaagaaggctggcactgtacgagtgaggcctgtgagagctgtgtcctgcaccgctcatgctcgcccggctttggggtcaagcagattgctacaggggtttctgataccatctgcgagccctgcccagtcggcttcttctccaatgtgtcatctgctttcgaaaaatgtcacccttggacaagctgtgagaccaaagacctggttgtgcaacaggcaggcacaaacaagactgatgttgtctgtggtgagtcctggacaatgggccctggagaaagcctaggaaggtccccaggatcggctgagagccctggtggtgatccccatcatcttcgggatcctgtttgccatcctcttggtgctggtctttatcaaaaaggtggccaagaagccaaccaataaggccccccaccccaagcaggaaccccaggagatcaattttcccgacgatcttcctggctccaacactgctgctccagtgcaggagactttacatggatgccaaccggtcacccaggaggatggcaaagagagtcgcatctcagtgcaggagagacagtgaggctgcacccacccaggagtgtggccacgtgggcaaacaggcagttggccagagagcctggtgctgctgctgctgtggcgtgagggtgaggggctggcactgactgggcatagctccccgcttctgcctgcacccctgcagtttgagacaggagacctggcactggatgcagaaacagttcaccttgaagaacctctcacttcaccctggagcccatccagtctcccaacttgtattaaagacagaggcagaagtttggtggtggtggtgttggggtatggtttagtaatatccaccagaccttccgatccagcagtttggtgcccagagaggcatcatggtggcttccctgcgcccaggaagccatatacacagatgcccattgcagcattgtttgtgatagtgaacaactggaagctgcttaactgtccatcagcaggagactggctaaataaaattagaatatatttatacaaa

SEQ ID NO: 403251 - DNA, 1385 bp, Homo sapiens
ggctggggcaggggagtcagcagaggcctcgctcgggcgcccagtggtcctgccgcctggtctcacctcgccatggttcgtctgcctctgcagtgcgtcctctggggctgcttgctgaccgcttttgcagcctctgtcctggatgacttttacctttctgctgaagaagttgcaacggagatttcaagatcccttcaaattgcacaattctgtttttaggtccatccagaaccacccactgcatgcagagaaaaacagtacctaataaacagtcagtgctgttctttgtgccagccaggacagaaactggtgagtgactgcacagagttcactgaaacggaatgccttccttgcggtgaaagcgaattcctagacacctggaacagagagacacactgccaccagcacaaatactgcgaccccaacctagggcttcgggtccagcagaagggcacctcagaaacagacaccatctgcacctgtgaagaaggctggcactgtacgagtgaggcctgtgagagctgtgtcctgcaccgctcatgctcgcccggctttggggtcaagcagattgctgtgagaccaaagacctggttgtgcaacaggcaggcacaaacaagactgatgttgtctgtggtccccaggatcggctgagagccctggtggtgatccccatcatcttcgggatcctgtttgccatcctcttggtgctggtctttatcaaaaaggtggccaagaagccaaccaataaggccccccaccccaagcaggaaccccaggagatcaattttcccgacgatcttcctggctccaacactgctgctccagtgcaggagactttacatggatgccaaccggtcacccaggaggatggcaaagagagtcgcatctcagtgcaggagagacagtgaggctgcacccacccaggagtgtggccacgtgggcaaacaggcagttggccagagagcctggtgctgctgctgctgtggcgtgagggtgaggggctggcactgactgggcatagctccccgcttctgcctgcacccctgcagtttgagacaggagacctggcactggatgcagaaacagttcaccttgaagaacctctcacttcaccctggagcccatccagtctcccaacttgtattaaagacagaggcagaagtttggtggtggtggtgttggggtatggtttagtaatatccaccagaccttccgatccagcagtttggtgcccagagaggcatcatggtggcttccctgcgcccaggaagccatatacacagatgcccattgcagcattgtttgtgatagtgaacaactggaagctgcttaactgtccatcagcaggagactggctaaataaaattagaatatatttatacaaa

SEQ ID NO: 403252 - DNA, 1088 bp, Homo sapiens
ggctggggcaggggagtcagcagaggcctcgctcgggcgcccagtggtcctgccgcctggtctcacctcgccatggttcgtctgcctctgcagtgcgtcctctggggctgcttgctgaccgctgtccatccagaaccacccactgcatgcagagaaaaacagtacctaataaacagtcagtgctgttctttgtgccagccaggacagaaactggtgagtgactgcacagagttcactgaaacggaatgccttccttgcggtgaaagcgaattcctagacacctggaacagagagacacactgccaccagcacaaatactgcgaccccaacctagggcttcgggtccagcagaagggcacctcagaaacagacaccatctgcacctgtgaagaaggctggcactgtacgagtgaggcctgtgagagctgtgtcctgcaccgctcatgctcgcccggctttggggtcaagcagattgctacaggggtttctgataccatctgcgagccctgcccagtcggcttcttctccaatgtgtcatctgctttcgaaaaatgtcacccttggacaagctgtgagaccaaagacctggttgtgcaacaggcaggcacaaacaagactgatgttgtctgtggtgagtcctggacaatgggccctggagaaagcctaggaaggtgggaactgaagggggagatgaggcacacaggaacactggatgggaaaaaggggaggggaggcagtttgggggtgtggtatcacagctctgccacttatcttgggagtctgggcaaatcacttcccctctcttagcctcagtttcttcatctgtaaaatgggatgataacagcacttccttagtaggttttgattttagagtgagaaggttggcctacagtaaagatcagataatgtaaatcagtgaaaaaggtcaggggtaagaaaattacattctctttacctaacgctaaatgaccagttaatgggtgcagcacaccaacatggtacatgtatacatatgtaacaaacctgcacattatgcacatgtaccctaaagcttaaagtataataataataaaatttaaaaaaacgaa

SEQ ID NO: 403253 - DNA, 1148 bp, Homo sapiens
ggctggggcaggggagtcagcagaggcctcgctcgggcgcccagtggtcctgccgcctggtctcacctcgccatggttcgtctgcctctgcagtgcgtcctctggggctgcttgctgaccgcttttgcagcctctgtcctggatgacttttacctttctgctgaagaagttgcaacggagatttcaagatcccttcaaattgcacaattctgtttttaggtccatccagaaccacccactgcatgcagagaaaaacagtacctaataaacagtcagtgctgttctttgtgccagccaggacagaaactggtgagtgactgcacagagttcactgaaacggaatgccttccttgcggtgaaagcgaattcctagacacctggaacagagagacacactgccaccagcacaaatactgcgaccccaacctagggcttcgggtccagcagaagggcacctcagaaacagacaccatctgcacctgtgaagaaggctggcactgtacgagtgaggcctgtgagagctgtgtcctgcaccgctcatgctcgcccggctttggggtcaagcagattgacatctgccagccacatttccccaaggaccgcggtttgaaccttctgatgtagatgagctctgacattggaagattctggagtctgacaagtcacagcaggttgagggtagggagaaactgcaggtgaggggtgcatgctgaagtcctgatttctccaggtccccaggatcggctgagagccctggtggtgatccccatcatcttcgggatcctgtttgccatcctcttggtgctggtctttatcaaaaaggtggccaagaagccaaccaataaggtaggtcacccctgagaacccgggacagagttttgacaaactgggaagatggcctcacggttgcctatggggcagtaaaactgattcagagtctgtctctgcagccagtggggtggcagcagaattggggactgtcatccccacccaccatgctccttccatccagagctcaatcccccacagaactgcccctggcaccactggcagagcctaacactggctgttcttcactcctttcctggcattcaacgcgtggggagctgcatctttgggccttggggctgggtcaaatgggtgggagc

SEQ ID NO: 403254 - DNA, 1029 bp, Homo sapiens
ggctggggcaggggagtcagcagaggcctcgctcgggcgcccagtggtcctgccgcctggtctcacctcgccatggttcgtctgcctctgcagtgcgtcctctggggctgcttgctgaccgctgtccatccagaaccacccactgcatgcagagaaaaacagtacctaataaacagtcagtgctgttctttgtgccagccaggacagaaactggtgagtgactgcacagagttcactgaaacggaatgccttccttgcggtgaaagcgaattcctagacacctggaacagagagacacactgccaccagcacaaatactgcgaccccaacctagggcttcgggtccagcagaagggcacctcagaaacagacaccatctgcacctgtgaagaaggctggcactgtacgagtgaggcctgtgagagctgtgtcctgcaccgctcatgctcgcccggctttggggtcaagcagattgctacaggggtttctgataccatctgcgagccctgcccagtcggcttcttctccaatgtgtcatctgctttcgaaaaatgtcacccttggacaagctgtgagaccaaagacctggttgtgcaacaggcaggcacaaacaagactgatgttgtctgtggtccccaggatcggctgagagccctggtggtgatccccatcatcttcgggatcctgtttgccatcctcttggtgctggtctttatcaaaaaggtggccaagaagccaaccaataaggccccccaccccaagcaggaaccccaggagatcaattttcccgacgatcttcctggctccaacactgctgctccagtgcaggagactttacatggatgccaaccggtcacccaggaggatggcaaagagagtcgcatctcagtgcaggagagacagtgaggctgcacccacccaggagtgtggccacgtgggcaaacaggcagttggccagagagcctggtgctgctgctgcaggggtgcaggcagaagcggggagctatgcccagtcagtgccagcccctc

SEQ ID NO: 403255 - DNA, 1730 bp, Homo sapiens
ggctggggcaggggagtcagcagaggcctcgctcgggcgcccagtggtcctgccgcctggtctcacctcgccatggttcgtctgcctctgcagtgcgtcctctggggctgcttgctgaccgctgtccatccagaaccacccactgcatgcagagaaaaacagtacctaataaacagtcagtgctgttctttgtgccagccaggacagaaactggtgagtgactgcacagagttcactgaaacggaatgccttccttgcggtgaaagcgaattcctagacacctggaacagagagacacactgccaccagcacaaatactgcgaccccaacctagggcttcgggtccagcagaagggcacctcagaaacagacaccatctgcacctgtgaagaaggctggcactgtacgagtgaggcctgtgagagctgtgtcctgcaccgctcatgctcgcccggctttggggtcaagcagattgctacaggggtttctgataccatctgcgagccctgcccagtcggcttcttctccaatgtgtcatctgctttcgaaaaatgtcacccttggacaagctgtgagaccaaagacctggttgtgcaacaggcaggcacaaacaagactgatgttgtctgtggtccccaggatcggctgagagccctggtggtgatccccatcatcttcgggatcctgtttgccatcctcttggtgctggtctttatcaaaaaggtggccaagaagccaaccaataaggccccccaccccaagcaggaaccccaggagatcaattttcccgacgatcttcctggctccaacactgctgctccagtgcaggagactttacatggatgccaaccggtcacccaggaggatggcaaagagagtcgcatctcagtgcaggagagacagtgaggctgcacccacccaggagtgtggccacgtgggcaaacaggcagttggccagagagcctggtgctgctgctgctgtggcgtgagggtgaggggctggcactgactgggcatagctccccgcttctgcctgcacccctgcagtttgagacaggagacctggcactggatgcagaaacagttcaccttgaagaacctctcacttcaccctggagcccatccagtctcccaacttgtattaaagacagaggcagaagtttggtggtggtggtgttggggtatggtttagtaatatccaccagaccttccgatccagcagtttggtgcccagagaggcatcatggtggcttccctgcgcccaggaagccatatacacagatgcccattgcagcattgtttgtgatagtgaacaactggaagctgcttaactgtccatcagcaggagactggctaaataaaattagaatatatttatacaaacagaatctcaaaaacactgttgagtaaggaaaaaaaggcatgctgctgaatgatgggtatggaactttttaaaaaagtacatgcttttatgtatgtatattgcctatggatatatgtataaatacaatatgcatcatatattgatataacaagggttctggaagggtacacagaaaacccacagctcgaagagtggtgacgtctggggtggggaagaagggtctgggggagggttggttaaagggagatttggctttcccataatgcttcatcatttttcccaaaaggagagtgaattcacataatgcttatgtaattaaaaaatcatcaaacatgtaaaaagaaaa

SEQ ID NO: 403256 - DNA, 1479 bp, Homo sapiens
ggctggggcaggggagtcagcagaggcctcgctcgggcgcccagtggtcctgccgcctggtctcacctcgccatggttcgtctgcctctgcagtgcgtcctctggggctgcttgctgaccgcttttgcagcctctgtcctggatgacttttacctttctgctgaagaagttgcaacggagatttcaagatcccttcaaattgcacaattctgtttttaggtccatccagaaccacccactgcatgcagagaaaaacagtacctaataaacagtcagtgctgttctttgtgccagccaggacagaaactggtgagtgactgcacagagttcactgaaacggaatgccttccttgcggtgaaagcgaattcctagacacctggaacagagagacacactgccaccagcacaaatactgcgaccccaacctagggcttcgggtccagcagaagggcacctcagaaacagacaccatctgcacctgtgaagaaggctggcactgtacgagtgaggcctgtgagagctgtgtcctgcaccgctcatgctcgcccggctttggggtcaagcagattgctacaggggtttctgataccatctgcgagccctgcccagtcggcttcttctccaatgtgtcatctgctttcgaaaaatgtcacccttggacaagctgtgagaccaaagacctggttgtgcaacaggcaggcacaaacaagactgatgttgtctgtggtccccaggatcggctgagagccctggtggtgatccccatcatcttcgggatcctgtttgccatcctcttggtgctggtctttatcaaaaaggtggccaagaagccaaccaataaggccccccaccccaagcaggaaccccaggagatcaattttcccgacgatcttcctggctccaacactgctgctccagtgcaggagactttacatggatgccaaccggtcacccaggaggatggcaaagagagtcgcatctcagtgcaggagagacagtgaggctgcacccacccaggagtgtggccacgtgggcaaacaggcagttggccagagagcctggtgctgctgctgctgtggcgtgagggtgaggggctggcactgactgggcatagctccccgcttctgcctgcacccctgcagtttgagacaggagacctggcactggatgcagaaacagttcaccttgaagaacctctcacttcaccctggagcccatccagtctcccaacttgtattaaagacagaggcagaagtttggtggtggtggtgttggggtatggtttagtaatatccaccagaccttccgatccagcagtttggtgcccagagaggcatcatggtggcttccctgcgcccaggaagccatatacacagatgcccattgcagcattgtttgtgatagtgaacaactggaagctgcttaactgtccatcagcaggagactggctaaataaaattagaatatatttatacaaa

SEQ ID NO: 403257 - DNA, 1660 bp, Homo sapiens
  misc_feature (1190)..(1190): n is a, c, g, or t
  misc_feature (1195)..(1195): n is a, c, g, or t
  misc_feature (1220)..(1220): n is a, c, g, or t
  misc_feature (1260)..(1260): n is a, c, g, or t
  misc_feature (1262)..(1262): n is a, c, g, or t
  misc_feature (1286)..(1286): n is a, c, g, or t
  misc_feature (1289)..(1289): n is a, c, g, or t
  misc_feature (1304)..(1305): n is a, c, g, or t
  misc_feature (1329)..(1329): n is a, c, g, or t
  misc_feature (1338)..(1338): n is a, c, g, or t
  misc_feature (1341)..(1341): n is a, c, g, or t
  misc_feature (1346)..(1346): n is a, c, g, or t
  misc_feature (1349)..(1350): n is a, c, g, or t
  misc_feature (1394)..(1394): n is a, c, g, or t
ggctggggcaggggagtcagcagaggcctcgctcgggcgcccagtggtcctgccgcctggtctcacctcgccatggttcgtctgcctctgcagtgcgtcctctggggctgcttgctgaccgctgtccatccagaaccacccactgcatgcagagaaaaacagtacctaataaacagtcagtgctgttctttgtgccagccaggacagaaactggtgagtgactgcacagagttcactgaaacggaatgccttccttgcggtgaaagcgaattcctagacacctggaacagagagacacactgccaccagcacaaatactgcgaccccaacctagggcttcgggtccagcagaagggcacctcagaaacagacaccatctgcacctgtgaagaaggctggcactgtacgagtgaggcctgtgagagctgtgtcctgcaccgctcatgctcgcccggctttggggtcaagcagattgctacaggggtttctgataccatctgcgagccctgcccagtcggcttcttctccaatgtgtcatctgctttcgaaaaatgtcacccttggacaagctgtgagaccaaagacctggttgtgcaacaggcaggcacaaacaagactgatgttgtctgtggtccccaggatcggctgagagccctggtggtgatccccatcatcttcgggatcctgtttgccatcctcttggtgctggtctttatcaaaaaggtggccaagaagccaaccaataaggccccccaccccaagcaggaaccccaggagatcaattttcccgacgatcttcctggctccaacactgctgctccagtgcaggagactttacatggatgccaaccggtcacccaggaggatggcaaagagagtcgcatctcagtgcaggagagacagtgaggctgcacccacccaggagtgtggccacgtgggcaaacaggcagttggccagagagcctggtgctgctgctgctgtggcgtgagggtgaggggctggcactgactgggcatagctccccgcttctgcctgcacccctgcagtttgagacaggagacctggcactggatgcagaaacagttcaccttgaagaacctctcacttcaccctggagcccatccagtctcccaacttgtattaaagacagaggcagaaaaaaaaaaaaaaaaaaaaaaacccgggggcnccatnggcggggggggggaaaagggggagnggaaggggcccgtggggcacagggtggttcccggaccacngngtttcttgtggcacacaggggggnganaactcggggcggggnncccccataataggaggggggcggntaataaaanttngcagnaannggccggggtaaaggcgggggattaaacgggactccgcgcaaacncgagcaacaagacagacaggaacagggcaaaggagaaaccaaggacaacgaggcaacacaaaccgccgagaaaaacaagagcagcaggaacgagacacgacaacactcaacgaaaacaagaacacgacacccagaccgcccacagagaaaccgaaacgccgcgacgagcagcaccatcagcacccacccccgcacagacccaccgggcacgccccacaaacccccgatcggaagccagcacaccccaccctccagcccccccacac

SEQ ID NO: 403258 - DNA, 1289 bp, Homo sapiens
ggctggggcaggggagtcagcagaggcctcgctcgggcgcccagtggtcctgccgcctggtctcacctcgccatggttcgtctgcctctgcagtgcgtcctctggggctgcttgctgaccgctgtccatccagaaccacccactgcatgcagagaaaaacagtacctaataaacagtcagtgctgttctttgtgccagccaggacagaaactggtgagtgactgcacagagttcactgaaacggaatgccttccttgcggtgaaagcgaattcctagacacctggaacagagagacacactgccaccagcacaaatactgcgaccccaacctagggcttcgggtccagcagaagggcacctcagaaacagacaccatctgcacctgtgaagaaggctggcactgtacgagtgaggcctgtgagagctgtgtcctgcaccgctcatgctcgcccggctttggggtcaagcagattgctgtgagaccaaagacctggttgtgcaacaggcaggcacaaacaagactgatgttgtctgtggtccccaggatcggctgagagccctggtggtgatccccatcatcttcgggatcctgtttgccatcctcttggtgctggtctttatcaaaaaggtggccaagaagccaaccaataaggccccccaccccaagcaggaaccccaggagatcaattttcccgacgatcttcctggctccaacactgctgctccagtgcaggagactttacatggatgccaaccggtcacccaggaggatggcaaagagagtcgcatctcagtgcaggagagacagtgaggctgcacccacccaggagtgtggccacgtgggcaaacaggcagttggccagagagcctggtgctgctgctgctgtggcgtgagggtgaggggctggcactgactgggcatagctccccgcttctgcctgcacccctgcagtttgagacaggagacctggcactggatgcagaaacagttcaccttgaagaacctctcacttcaccctggagcccatccagtctcccaacttgtattaaagacagaggcagaagtttggtggtggtggtgttggggtatggtttagtaatatccaccagaccttccgatccagcagtttggtgcccagagaggcatcatggtggcttccctgcgcccaggaagccatatacacagatgcccattgcagcattgtttgtgatagtgaacaactggaagctgcttaactgtccatcagcaggagactggctaaataaaattagaatatatttatacaaa

SEQ ID NO: 403259 - DNA, 1394 bp, Homo sapiens
ggctggggcaggggagtcagcagaggcctcgctcgggcgcccagtggtcctgccgcctggtctcacctcgccatggttcgtctgcctctgcagtgcgtcctctggggctgcttgctgaccgctgtccatccagaaccacccactgcatgcagagaaaaacagtacctaataaacagtcagtgctgttctttgtgccagccaggacagaaactggtgagtgactgcacagagttcactgaaacggaatgccttccttgcggtgaaagcgaattcctagacacctggaacagagagacacactgccaccagcacaaatactgcgaccccaacctagggcttcgggtccagcagaagggcacctcagaaacagacaccatctgcacctgtgaagaaggctggcactgtacgagtgaggcctgtgagagctgtgtcctgcaccgctcatgctcgcccggctttggggtcaagcagattgctacaggggtttctgataccatctgcgagccctgcccagtcggcttcttctccaatgtgtcatctgctttcgaaaaatgtcacccttggacaagctgtgagaccaaagacctggttgtgcaacaggcaggcacaaacaagactgatgttgtctgtggtgagtcctggacaatgggccctggagaaagcctaggaaggtccccaggatcggctgagagccctggtggtgatccccatcatcttcgggatcctgtttgccatcctcttggtgctggtctttatcagccccccaccccaagcaggaaccccaggagatcaattttcccgacgatcttcctggctccaacactgctgctccagtgcaggagactttacatggatgccaaccggtcacccaggaggatggcaaagagagtcgcatctcagtgcaggagagacagtgaggctgcacccacccaggagtgtggccacgtgggcaaacaggcagttggccagagagcctggtgctgctgctgctgtggcgtgagggtgaggggctggcactgactgggcatagctccccgcttctgcctgcacccctgcagtttgagacaggagacctggcactggatgcagaaacagttcaccttgaagaacctctcacttcaccctggagcccatccagtctcccaacttgtattaaagacagaggcagaagtttggtggtggtggtgttggggtatggtttagtaatatccaccagaccttccgatccagcagtttggtgcccagagaggcatcatggtggcttccctgcgcccaggaagccatatacacagatgcccattgcagcattgtttgtgatagtgaacaactggaagctgcttaactgtccatcagcaggagactggctaaataaaattagaatatatttatacaaa

SEQ ID NO: 403260 - DNA, 1357 bp, Homo sapiens
ggctggggcaggggagtcagcagaggcctcgctcgggcgcccagtggtcctgccgcctggtctcacctcgccatggttcgtctgcctctgcagtgcgtcctctggggctgcttgctgaccgctgtccatccagaaccacccactgcatgcagagaaaaacagtacctaataaacagtcagtgctgttctttgtgccagccaggacagaaactggtgagtgactgcacagagttcactgaaacggaatgccttccttgcggtgaaagcgaattcctagacacctggaacagagagacacactgccaccagcacaaatactgcgaccccaacctagggcttcgggtccagcagaagggcacctcagaaacagacaccatctgcacctgtgaagaaggctggcactgtacgagtgaggcctgtgagagctgtgtcctgcaccgctcatgctcgcccggctttggggtcaagcagattgacatctgccagccacatttccccaaggaccgcggtttgaaccttctgatgtagatgagctctgacattggaagattctggagtctgacaagtcacagcaggttgagggtagggagaaactgcaggtgaggggtgcatgctgaagtcctgatttctccaggtccccaggatcggctgagagccctggtggtgatccccatcatcttcgggatcctgtttgccatcctcttggtgctggtctttatcagccccccaccccaagcaggaaccccaggagatcaattttcccgacgatcttcctggctccaacactgctgctccagtgcaggagactttacatggatgccaaccggtcacccaggaggatggcaaagagagtcgcatctcagtgcaggagagacagtgaggctgcacccacccaggagtgtggccacgtgggcaaacaggcagttggccagagagcctggtgctgctgctgctgtggcgtgagggtgaggggctggcactgactgggcatagctccccgcttctgcctgcacccctgcagtttgagacaggagacctggcactggatgcagaaacagttcaccttgaagaacctctcacttcaccctggagcccatccagtctcccaacttgtattaaagacagaggcagaagtttggtggtggtggtgttggggtatggtttagtaatatccaccagaccttccgatccagcagtttggtgcccagagaggcatcatggtggcttccctgcgcccaggaagccatatacacagatgcccattgcagcattgtttgtgatagtgaacaactggaagctgcttaactgtccatcagcaggagactggctaaataaaattagaatatatttatacaaa

SEQ ID NO: 403261 - DNA, 1091 bp, Homo sapiens
ggctggggcaggggagtcagcagaggcctcgctcgggcgcccagtggtcctgccgcctggtctcacctcgccatggttcgtctgcctctgcagtgcgtcctctggggctgcttgctgaccgctgtccatccagaaccacccactgcatgcagagaaaaacagtacctaataaacagtcagtgctgttctttgtgccagccaggacagaaactggtgagtgactgcacagagttcactgaaacggaatgccttccttgcggtgaaagcgaattcctagacacctggaacagagagacacactgccaccagcacaaatactgcgaccccaacctagggcttcgggtccagcagaagggcacctcagaaacagacaccatctgcacctgtgaagaaggctggcactgtacgagtgaggcctgtgagagctgtgtcctgcaccgctcatgctcgcccggctttggggtcaagcagattgctacaggggtttctgataccatctgcgagccctgcccagtcggcttcttctccaatgtgtcatctgctttcgaaaaatgtcacccttggacaagctgtgagaccaaagacctggttgtgcaacaggcaggcacaaacaagactgatgttgtctgtgggctgggactagaatgaggtgagcaaggcacttgccctcgggcgcaatatttaagaaggtgccataaaagtgtagtaatcaaggtaaattcattttgatgcaatatttttaaaaataaaaattaatgcaaagaaatccatgatgagcaagatagcaacattttaaataaagaacaggatccgaccctgtgtttgcatgaccctgcctcactcacctcaccctaatcctggccctggttccagtaaaaggaataggcagccagcctgcaggccgtagtttgctgacttggtgtccgcctgatgattttcaaaatatggcattaaaagaatgtttaccttgatgactgagtgttttggacatccttttcaattttgtcctgaaacaatttcatcccttgcctcacgctagtctccgccctgccttttggtctttcttttattttcccactttgaaaaaaaaa

SEQ ID NO: 403262 - DNA, 647 bp, Homo sapiens
atcagcccaccaccatcggccagcattccaggcacctacctggaaactgagaaaagtttggtagcagataaaatcctcctaaaaaacaagcctgaaaatccgaagtgcgtcctggacttaggtgactgagtgttctctgtccttgtctggtgtgcctgagagcccagaggtgagaaaggtgagaaagaagagaagtccagggaaagaatgggagagaacagagccgcttggaggagcaggggcagctccaccactctgcttacggtgtgtaggggaccgtccccctgcagaccctggccttaggacctctgactctcattcggcccagcctgctctttaaaaatgtaggagagattgccatcaaaactcatcagcaaaaaaggttagcagttcttaacagttttaccttgaactctcctgcagtctccattccttctctgatgatgctagggacgggagaggtgctaggagtctgaggacggtgtggggcgtctcatttgctaacctgacttgtttgagctacagggctgcacggagttgagactctcatgctcacatgttgcttcggtcttactttagcatttctctgcaaatttaaataaggctgtatttgtgtgtgtgtgtgtgtgtgtgtgtgtgtcttgctt

SEQ ID NO: 403263 - DNA, 370 bp, Homo sapiens
gtggggacccggtgaagtagattcctctctgagactcttccttgctttttattatgtggggactgagatgatccccagtgcccgttagatctgacatatctgaccctgactgagacctcagtgatcggggactgtagttcacatgcagagcccccatgtgcctgaatgccttgctcctgaaggtccattctaggccctgctacaggagtcggccactgccgtggcatgtggatggcatcaggagctctgctggaaccagggccggagcccttgtttcttgctgtccttgcaattggaggtcagagcaggagaggtgatttgccctggaccacaaagaatggctggggttggtttaattggagaggatctt

SEQ ID NO: 403264 - DNA, 368 bp, Homo sapiens
attgctgttatggaagccccccatttgctggggcttaaggctagagacagaccccaggctgagcgtgggagtcctgcggtttctagctgaggttgagggggctgcagggtgcttggcacggagcagcattacaatgcctgccccatcccggaagccttagtcaattaagcagctctgacctgaagccctgtgggaagcagcttgttctaaatcaccgctttttttttttttttgagaaggagtccagcctgggtgacagagggagactccgtctcaaaaaaaaaaagaaagaaagaaatacataaagtacctagcaccgtgtctggatattgttaacattccttatggagtcaggacaagcagttgaa

SEQ ID NO: 403265 - DNA, 250 bp, Homo sapiens
tatcagccggcccagtacaacagctcttgcaaagctgtatgtagttagatgatgtgacaacctctaatatttatctaataaatatgtattcagatgaaacctgtatattaggtgttcatgtggttattttgtatttaaagatcaaattatttgactattgctagacatttctatactctgttgtaacactgaggtatctcatttgcccatgttaatttttttctaaataaattgacaaaaacaaaaaaat

SEQ ID NO: 403266 - DNA, 7579 bp, Homo sapiens
  misc_feature (14)..(14): n is a, c, g, or t
cgggcgccgggaancgggcggccgggcggcaggcgggcgagcagcgatcgggcggccgagcgagcgagcaacgccggcgcagcgcggtgaccccagccccagccggcgcggagcaggagccggagccgagcggatctcgcgcgcgcctctgctgctgctacctccctgtgccctgatgcctcgcccttaccctgtgctgggtgtgctgtgctgtgctgctgttcctccatgctgtgctgtgcatgctgtgctgctctgcatgctgccctggactcacggcagctgtgttctgatttcgtactactgctggggctgccacctcctcctccagacgctctcagcagacttgagtcctggtccttctgcagaggcctgagcaggaggaagaggaggaggcccgttggcgtcggaccaatgctgcaaggggtgtgaggagaggagccgctgtttttcactgagctgccataccccgaaagcaggatggagctggagtgaggtggaggggccgcaagctgctgaccggcgtgtgggacactggtggtttgcagatcactgaggctggacaacgttcatggctctcgggtagaacctagtgaaacggccagaatgaattctatggacaggcacatccagcagaccaatgaccgactgcagtgcatcaagcagcacttacagaatcctgccaacttccacaatgccgccacggagctgctggactggtgcggagacccacgggccttccagcggcccttcgagcagagcctgatgggctgtttgacggtggtcagtcgggtggcagcccagcaaggctttgacctggacctcggctacagactgctggctgtgtgtgctgcaaaccgagacaagttcaccccgaagtctgccgccttgttgtcctcctggtgcgaagagctcggccgcctgctgctgctccgacatcagaagagccgccagagcgatccccctgggaaactccccatgcagccccctctcagctccatgagctccatgaaacccactctgtcgcacagtgatgggtcgttcccctatgactctgtcccttggcagcagaacaccaaccagcctcccggctccctttccgtggtcaccacggtttggggagtaaccaacacatcccagagccaggtccttgggaaccctatggccaatgccaacaaccccatgaatccaggcggcaaccccatggcgtcgggcatgaccaccagcaacccaggcctcaactccccacagtttgcggggcagcagcagcagttctcagccaaggctggccccgctcagccctacatccagcagagcatgtatggccggcccaactaccccggcagcgggggctttggggccagttaccctgggggtcctaacgcccccgcaggcatgggcatccctccgcacaccaggccgcctgctgacttcactcagcccgcggcagccgctgcagcagcggcagtggcagcagcagcagccacagctacagccacagccacggccactgtggcagccctgcaggagacacagaacaaggatataaaccagtatggaccgatgggtcccacccaggcgtataacagccaattcatgaaccagcccgggccgcgggggcctgcctccatggggggcagcatgaaccccgcgagcatggcggctggcatgacgccctcggggatgagcggccctcccatgggcatgaaccagccccggccgcccggcatcagcccctttggcacacacgggcagcggatgccccagcagacctacccgggcccccggccccagtcccttcctattcagaacataaagaggccataccctggagagcccaactatggaaaccagcaatatggaccaaacagccagttccccacccagccaggccagtacccagcccccaaccccccgaggccactcacctcccccaactacccaggacagaggatgcccagccagccgagctccgggcagtacccgccccccacggtcaacatggggcagtattacaagccagaacagtttaatggacaaaataacacgttctcgggaagcagctacagtaactacagccaagggaatgtcaacaggcctcccaggccggttcctgtggcaaattacccccactcacctgttccagggaaccccacaccccccatgacccctgggagcagcatccctccatacctgtcccccagccaagacgtcaaaccacccttcccgcctgacatcaagccaaatatgagcgctctgccaccaacccccagccaaccacaatgacgagctgcggctcacattccctgtgcgggatggcgtggtgctggagcccttccgcctggagcacaacctggcggtcagcaaccatgtgttccacctgcggcccacggtccaccagacgctgatgtggaggtctgacctggagctgcagttcaagtgctaccaccacgaggaccggcagatgaacaccaactggcccgcctcggtgcaggtcagcgtgaacgccacgcccctcaccattgagcgcggcgacaacaagacctcccacaagcccctgcacctgaagcacgtgtgccagccgggccgcaacaccatccagatcaccgtcacggcctgctgctgctcccacctcttcgtgctgcagctggtacaccggccctccgtccgctctgtgctgcaaggactcctcaagaagcgcctcctgcccgcagagcactgtatcacgaaaatcaagcggaatttcagcagcgtggctgcctcctcgggcaacacgaccctcaacggggaggatggggtggagcagacggccatcaaggtgtctctgaagtgccccatcacattccggcgcatccagctgcctgctcgaggacacgattgcaagcatgtgcagtgctttgatctggagtcatacctgcagctgaattgcgagagagggacctggaggtgtcctgtgtgcaataaaaccgctctgctggagggcctggaggtggatcagtacatgtggggaatcctgaatgccatccaacactccgagtttgaagaggtcaccatcgatcccacgtgcagctggcggccggtgcccatcaagtcggacttacacatcaaggacgaccctgatggcatcccctccaagcggttcaagaccatgagtcccagccagatgatcatgcccaatgtcatggagatgatcgcagccctgggccccggcccgtccccctatcccctcccgcctcccccagggggcaccaactccaacgactacagcagccaaggcaacaactaccaaggccatggcaactttgacttcccccacgggaaccctggagggacatccatgaatgacttcatgcacgggcccccccagctctcccaccccccggacatgcccaacaacatggccgccctcgagaaacccctcagccaccccatgcaggaaactatgccacacgctggcagctctgaccagccccacccctccatacaacaaggtttgcacgtaccacaccccagcagccagtcaggcctccattacatcacagtggggctcctcctcctcctccttcccagcctccccggcagccgccacaggccgctcccagcagccatccacacagcgacctgacctttaacccctcctcagccttagagggtcaggccggagcgcagggagcgtccgacatgccggagccttcgctggatctccttcccgaactcacaaatcctgacgagctcctgtcttatctggacccccccgacctgccgagcaatagtaacgatgacctcctgtctctatttgagaacaactgagggccacccggtcggggccatccctccacactctgcatcctaccccacctacccaacacacttttccacctgggagcctgtgccctcagaccgccccgcaccagagccacgggctgtggggcggggagccctcccccgctgcagccctctcagaacagaggggtagggagggtgcaccagtgcaccaggaaggctgtgtgggtctggagcccacgtcccacctccacacccttggcttgggcccatgcccagcgcaggcctgaagaccaccctcccgagaggaaccagcccggtaagagggcacacgctgatgcggcttcccggtccctccgcgtgtgccgattccagatgaccttccagtgtccccaaggttcttccatcttctagactgtaaccctgcctccctgcttcctggtccagagcctccctccagtgactgtggagcctgagaaggcccccgggccccagcatgggccccgagccttggaggagcactggcagttggtggcagtgagaccagccaccaccaccaccacagaaaagcacaaacctctgggaaagacaacgtctctcgggggccaggggtcatcggtttgacccctgacctataagccaagataccccataaacacactcagaaagcagagaaaaaggacaagagtctgtgtttgagagggggtctgccattcctgcttggggactggtggggaagagggccaggacatcttctgagccaggacgtccctgaggctccacctccaagctcagacagggcccaggcttggggaacagagagagcaggtgtacacccaaccaaagtgattgtgcccttggttggggggcgcgggcatataacctgtcagaagcaaacaggagcggcaacttctaactttgctccaagccactctctttttaaacagcaacaatttaaagctatgaagtcacctggagaaaaggaacgttgctcttggacagcaagcaaaccatttctctccgtctgttctgtttttctcctagtccctctcctgccacctctccaagacttccgtgggacacccacttccctctgtcctagttctctttgtccaatcagatggcaagggcagtgcgtggaaaggccggggaggtgcagaaaccagagcccagggcaatggtgtctgtccagcccctccctctgtccctgtgctccaagctgcccccggctgcagcccaggccatggacatgtgcaccagtatgtacctgcaggcatgggggggaggggggcgtgtttctgggcctgccccagacactgcccttggctgccagcctaccctgcctgcactcctccaccatcacaatctcacccaaactcctgctcactcaagcaaaagcagcctctggccttccctccaccgctttgctccatctggcttaccactctccagggcctcctggggagcctgtcctgtgttcactttgtttcaggctggtctgtgccccgtgagccacatggcctagggtgatgccaggttgtcccgtcactggggtcccatctgtaaattctttgcgcccttcccggctgctgcctggggccctttcctgctctcccgtccgctgtgggtggtccccagcactcctctgtgggttttaccggaaaggtggccccagctgttgacttccagtcactgtcccagacggcacaaggttttctgtaggaaagctgccattgccccggccccttttcttcctttgtcccgttgtcgaggttttttcaaatagcgtgttgttcagtatgcaaatcaattattttaagaatcgcttttgtaaatatctttgtgaatattttagtatcgtctttgataatattcaacattttcatgacctggttatagcctttgctggtgtttttaaaatacctggactcaatgacaaagaccgagtcttctttttttttaaacaaaaacaaaaaaagcaaccagggctatttgtacagttgaaggggtgaacagaatgggcggctgtgctgggagttggaagaccgggcagcccgctatttagagccatccctcagtcagctggcagggacaagccaacgccaggtagcatgtggccacccttgcccagtgtctgtggcctggcaagtggccacgccctgtgtcagaccatctgggaattaagctccagacagacttacagatgccttccttaggagttcttgcttcttgcgttgatactttgccccagaaaggcctgggattcattctggttcttatcagggtgtgtccacactctgctcacaggtggatccacggctttccagtgcggagagtcgagatgctccctgcagcccaggccccgggcacctcctgcaaccatctctgggctcagcacctgaggcgggtttcctgggtcccctctccagcaagcctccaccagcaagctcggcccagagcttcccttccggctggctctgaaccgtgcgtggtgcctacagcctgcagtctggagacaagctcttccggagtgctctgggagccaggccagggtgtgagggaggtgcagaggcatccggggcgggagcaagccccaggttgtgacaggtgcaggtagacaacgcccataaacagagatggtcctgaactctggagagatccttccctgatcctttcggacgactacttggagccataagtaacctcagcaaaaacgaggcctctgcaagccacttttccatgccaagcatccacccggcccacaggcatgtttctgccgccactccgcaagatggacagggagccagcaggcaggcgggaagggccaagtacaggcaatcacccccatcttcttggtttgaagctttatccatgtatcatgttccgtgtagccattttattttttaagaaactgctaatactttctccctaatggaagccctgatcccccagagagctacaggtctgctcccgacgggcctcgggcctgacccgtccacacagggccgtgtcaacagcagcgactcaagggacgtgtgtacatatgtaaatgagaaatagagacgtgtcaacagatgcattcatttctcttggaatgtgtattgtttttattttgcgaaacaaaacaaaacaaaaaaaaaagcttggaactccatcacgtggaaaaactagatcctgttggttatagcatttgtgagttctccacgtctgtctctctcgctcatgtaatatactctgaccctgagtggaaaggggtttttgttctgtttttattttacctacatgtactatttagcttcagtgtactagtcctgccacctgtgtatttttagggtgctatggaaataatgaaaagaaacggggatttcagaagaaaattgtaaccaaattcatactttgtataatttttgatatcatgatcacaggtgattcacacgtacacacataaacacacccaccagtgcagcctgaagtaactcccacagaaaccatcatcgtctttgtacatcgtatgtacaatgcaatcatttcatactttaaactggtcaaaaaactaattgtgatttctagtcttgcaaagctgtatgtagttagatgatgtgacaacctctaatatttatctaataaatatgtattcagatgaaacctgtatattaggtgttcatgtggttattttgtatttaaagatcaaattatttgactattgctagacatttctatactctgttgtaacactgaggtatctcatttgcccatgttaatttttttctaaataaattgacaaaaacaaaaaaat

SEQ ID NO: 403267 - DNA, 6763 bp, Homo sapiens
cggccgccgccggccgggccccaagcccccgagggcgccagggcgggatcgcgaccggtgcaacttctagccttgttgtcctcctggtgcgaagagctcggccgcctgctgctgctccgacatcagaagagccgccagagcgatccccctgggaaactccccatgcagccccctctcagctccatgagctccatgaaacccactctgtcgcacagtgatgggtcgttcccctatgactctgtcccttggcagcagaacaccaaccagcctcccggctccctttccgtggtcaccacggtttggggagtaaccaacacatcccagagccaggtccttgggaaccctatggccaatgccaacaaccccatgaatccaggcggcaaccccatggcgtcgggcatgaccaccagcaacccaggcctcaactccccacagtttgcggggcagcagcagcagttctcagccaaggctggccccgctcagccctacatccagcagagcatgtatggccggcccaactaccccggcagcgggggctttggggccagttaccctgggggtcctaacgcccccgcaggcatgggcatccctccgcacaccaggccgcctgctgacttcactcagcccgcggcagccgctgcagcagcggcagtggcagcagcagcagccacagctacagccacagccacggccactgtggcagccctgcaggagacacagaacaaggatataaaccagtatggaccgatgggtcccacccaggcgtataacagccaattcatgaaccagcccgggccgcgggggcctgcctccatggggggcagcatgaaccccgcgagcatggcggctggcatgacgccctcggggatgagcggccctcccatgggcatgaaccagccccggccgcccggcatcagcccctttggcacacacgggcagcggatgccccagcagacctacccgggcccccggccccagtcccttcctattcagaacataaagaggccataccctggagagcccaactatggaaaccagcaatatggaccaaacagccagttccccacccagccaggccagtacccagcccccaaccccccgaggccactcacctcccccaactacccaggacagaggatgcccagccagccgagctccgggcagtacccgccccccacggtcaacatggggcagtattacaagccagaacagtttaatggacaaaataacacgttctcgggaagcagctacagtaactacagccaagggaatgtcaacaggcctcccaggccggttcctgtggcaaattacccccactcacctgttccagggaaccccacaccccccatgacccctgggagcagcatccctccatacctgtcccccagccaagacgtcaaaccacccttcccgcctgacatcaagccaaatatgagcgctctgccaccaacccccagccaaccacaatgacgagctgcggctcacattccctgtgcgggatggcgtggtgctggagcccttccgcctggagcacaacctggcggtcagcaaccatgtgttccacctgcggcccacggtccaccagacgctgatgtggaggtctgacctggagctgcagttcaagtgctaccaccacgaggaccggcagatgaacaccaactggcccgcctcggtgcaggtcagcgtgaacgccacgcccctcaccattgagcgcggcgacaacaagacctcccacaagcccctgcacctgaagcacgtgtgccagccgggccgcaacaccatccagatcaccgtcacggcctgctgctgctcccacctcttcgtgctgcagctggtacaccggccctccgtccgctctgtgctgcaaggactcctcaagaagcgcctcctgcccgcagagcactgtatcacgaaaatcaagcggaatttcagcagcgtggctgcctcctcgggcaacacgaccctcaacggggaggatggggtggagcagacggccatcaaggtgtctctgaagtgccccatcacattccggcgcatccagctgcctgctcgaggacacgattgcaagcatgtgcagtgctttgatctggagtcatacctgcagctgaattgcgagagagggacctggaggtgtcctgtgtgcaataaaaccgctctgctggagggcctggaggtggatcagtacatgtggggaatcctgaatgccatccaacactccgagtttgaagaggtcaccatcgatcccacgtgcagctggcggccggtgcccatcaagtcggacttacacatcaaggacgaccctgatggcatcccctccaagcggttcaagaccatgagtcccagccagatgatcatgcccaatgtcatggagatgatcgcagccctgggccccggcccgtccccctatcccctcccgcctcccccagggggcaccaactccaacgactacagcagccaaggcaacaactaccaaggccatggcaactttgacttcccccacgggaaccctggagggacatccatgaatgacttcatgcacgggcccccccagctctcccaccccccggacatgcccaacaacatggccgccctcgagaaacccctcagccaccccatgcaggaaactatgccacacgctggcagctctgaccagccccacccctccatacaacaaggtttgcacgtaccacaccccagcagccagtcaggcctccattacatcacagtggggctcctcctcctcctccttcccagcctccccggcagccgccacaggccgctcccagcagccatccacacagcgacctgacctttaacccctcctcagccttagagggtcaggccggagcgcagggagcgtccgacatgccggagccttcgctggatctccttcccgaactcacaaatcctgacgagctcctgtcttatctggacccccccgacctgccgagcaatagtaacgatgacctcctgtctctatttgagaacaactgagggccacccggtcggggccatccctccacactctgcatcctaccccacctacccaacacacttttccacctgggagcctgtgccctcagaccgccccgcaccagagccacgggctgtggggcggggagccctcccccgctgcagccctctcagaacagaggggtagggagggtgcaccagtgcaccaggaaggctgtgtgggtctggagcccacgtcccacctccacacccttggcttgggcccatgcccagcgcaggcctgaagaccaccctcccgagaggaaccagcccggtaagagggcacacgctgatgcggcttcccggtccctccgcgtgtgccgattccagatgaccttccagtgtccccaaggttcttccatcttctagactgtaaccctgcctccctgcttcctggtccagagcctccctccagtgactgtggagcctgagaaggcccccgggccccagcatgggccccgagccttggaggagcactggcagttggtggcagtgagaccagccaccaccaccaccacagaaaagcacaaacctctgggaaagacaacgtctctcgggggccaggggtcatcggtttgacccctgacctataagccaagataccccataaacacactcagaaagcagagaaaaaggacaagagtctgtgtttgagagggggtctgccattcctgcttggggactggtggggaagagggccaggacatcttctgagccaggacgtccctgaggctccacctccaagctcagacagggcccaggcttggggaacagagagagcaggtgtacacccaaccaaagtgattgtgcccttggttggggggcgcgggcatataacctgtcagaagcaaacaggagcggcaacttctaactttgctccaagccactctctttttaaacagcaacaatttaaagctatgaagtcacctggagaaaaggaacgttgctcttggacagcaagcaaaccatttctctccgtctgttctgtttttctcctagtccctctcctgccacctctccaagacttccgtgggacacccacttccctctgtcctagttctctttgtccaatcagatggcaagggcagtgcgtggaaaggccggggaggtgcagaaaccagagcccagggcaatggtgtctgtccagcccctccctctgtccctgtgctccaagctgcccccggctgcagcccaggccatggacatgtgcaccagtatgtacctgcaggcatgggggggaggggggcgtgtttctgggcctgccccagacactgcccttggctgccagcctaccctgcctgcactcctccaccatcacaatctcacccaaactcctgctcactcaagcaaaagcagcctctggccttccctccaccgctttgctccatctggcttaccactctccagggcctcctggggagcctgtcctgtgttcactttgtttcaggctggtctgtgccccgtgagccacatggcctagggtgatgccaggttgtcccgtcactggggtcccatctgtaaattctttgcgcccttcccggctgctgcctggggccctttcctgctctcccgtccgctgtgggtggtccccagcactcctctgtgggttttaccggaaaggtggccccagctgttgacttccagtcactgtcccagacggcacaaggttttctgtaggaaagctgccattgccccggccccttttcttcctttgtcccgttgtcgaggttttttcaaatagcgtgttgttcagtatgcaaatcaattattttaagaatcgcttttgtaaatatctttgtgaatattttagtatcgtctttgataatattcaacattttcatgacctggttatagcctttgctggtgtttttaaaatacctggactcaatgacaaagaccgagtcttctttttttttaaacaaaaacaaaaaaagcaaccagggctatttgtacagttgaaggggtgaacagaatgggcggctgtgctgggagttggaagaccgggcagcccgctatttagagccatccctcagtcagctggcagggacaagccaacgccaggtagcatgtggccacccttgcccagtgtctgtggcctggcaagtggccacgccctgtgtcagaccatctgggaattaagctccagacagacttacagatgccttccttaggagttcttgcttcttgcgttgatactttgccccagaaaggcctgggattcattctggttcttatcagggtgtgtccacactctgctcacaggtggatccacggctttccagtgcggagagtcgagatgctccctgcagcccaggccccgggcacctcctgcaaccatctctgggctcagcacctgaggcgggtttcctgggtcccctctccagcaagcctccaccagcaagctcggcccagagcttcccttccggctggctctgaaccgtgcgtggtgcctacagcctgcagtctggagacaagctcttccggagtgctctgggagccaggccagggtgtgagggaggtgcagaggcatccggggcgggagcaagccccaggttgtgacaggtgcaggtagacaacgcccataaacagagatggtcctgaactctggagagatccttccctgatcctttcggacgactacttggagccataagtaacctcagcaaaaacgaggcctctgcaagccacttttccatgccaagcatccacccggcccacaggcatgtttctgccgccactccgcaagatggacagggagccagcaggcaggcgggaagggccaagtacaggcaatcacccccatcttcttggtttgaagctttatccatgtatcatgttccgtgtagccattttattttttaagaaactgctaatactttctccctaatggaagccctgatcccccagagagctacaggtctgctcccgacgggcctcgggcctgacccgtccacacagggccgtgtcaacagcagcgactcaagggacgtgtgtacatatgtaaatgagaaatagagacgtgtcaacagatgcattcatttctcttggaatgtgtattgtttttattttgcgaaacaaaacaaaacaaaaaaaaaagcttggaactccatcacgtggaaaaactagatcctgttggttatagcatttgtgagttctccacgtctgtctctctcgctcatgtaatatactctgaccctgagtggaaaggggtttttgttctgtttttattttacctacatgtactatttagcttcagtgtactagtcctgccacctgtgtatttttagggtgctatggaaataatgaaaagaaacggggatttcagaagaaaattgtaaccaaattcatactttgtataatttttgatatcatgatcacaggtgattcacacgtacacacataaacacacccaccagtgcagcctgaagtaactcccacagaaaccatcatcgtctttgtacatcgtatgtacaatgcaatcatttcatactttaaactggtcaaaaaactaattgtgatttctagtcttgcaaagctgtatgtagttagatgatgtgacaacctctaatatttatctaataaatatgtattcagatgaaacctgtatattaggtgttcatgtggttattttgtatttaaagatcaaattatttgactattgctagacatttctatactctgttgtaacactgaggtatctcatttgcccatgttaatttttttctaaataaattgacaaaaacaaaaaaat

SEQ ID NO: 403268 - DNA, 7283 bp, Homo sapiens
  misc_feature (14)..(14): n is a, c, g, or t
  misc_feature (136)..(138): n is a, c, g, or t
  misc_feature (149)..(150): n is a, c, g, or t
  misc_feature (161)..(163): n is a, c, g, or t
  misc_feature (166)..(166): n is a, c, g, or t
cgggcgccgggaancgggcggccgggcggcaggcgggcgagcagcgatcgggcggccgagcgagcgagcaacgccggcgcagcgcggtgaccccagccccagccggcgcggagcaggagccggagccgagcggatnnnggcgccctcgnngcgctcctccnnnccngagcctgccctacccggcggtggcggcggcgcgtcctccagcggcggcagcggcgctcgcagcgcccggactcacggcagctgtgttctgatttcgtactactgctggggctgccacctcctcctccagacgctctcagcagacttgagtcctggtccttctgcagaggcctgagcaggaggaagaggaggaggcccgttggcgtcggaccaatgctgcaaggggtgtgaggagaggagccgctgtttttcactgagctgccataccccgaaagcaggatggagctggagtgaggtggaggggccgcaagctgctgaccggcgtgtgggacactggtggtttgcagatcactgaggctggacaacgttcatggctctcgggtagaacctagtgaaacggccagaatgaattctatggacaggcacatccagcagaccaatgaccgactgcagtgcatcaagcagcacttacagaatcctgccaacttccacaatgccgccacggagctgctggactggtgcggagacccacgggccttccagcggcccttcgagcagagcctgatgggctgtttgacggtggtcagtcgggtggcagcccagcaaggctttgacctggacctcggctacagactgctggctgtgtgtgctgcaaaccgagacaagttcaccccgaagtctgccgccttgttgtcctcctggtgcgaagagctcggccgcctgctgctgctccgacatcagaagagccgccagagcgatccccctgggaaactccccatgcagccccctctcagctccatgagctccatgaaacccactctgtcgcacagtgatgggtcgttcccctatgactctgtcccttggcagcagaacaccaaccagcctcccggctccctttccgtggtcaccacggtttggggagtaaccaacacatcccagagccaggtccttgggaaccctatggccaatgccaacaaccccatgaatccaggcggcaaccccatggcgtcgggcatgaccaccagcaacccaggcctcaactccccacagtttgcggggcagcagcagcagttctcagccaaggctggccccgctcagccctacatccagcagagcatgtatggccggcccaactaccccggcagcgggggctttggggccagttaccctgggggtcctaacgcccccgcaggcatgggcatccctccgcacaccaggccgcctgctgacttcactcagcccgcggcagccgctgcagcagcggcagtggcagcagcagcagccacagctacagccacagccacggccactgtggcagccctgcaggagacacagaacaaggatataaaccagtatggaccgatgggtcccacccaggcgtataacagccaattcatgaaccagcccgggccgcgggggcctgcctccatggggggcagcatgaaccccgcgagcatggcggctggcatgacgccctcggggatgagcggccctcccatgggcatgaaccagccccggccgcccggcatcagcccctttggcacacacgggcagcggatgccccagcagacctacccgggcccccggccccagtcccttcctattcagaacataaagaggccataccctggagagcccaactatggaaaccagcaatatggaccaaacagccagttccccacccagccaggccagtacccagcccccaaccccccgaggccactcacctcccccaactacccaggacagaggatgcccagccagccgagctccgggcagtacccgccccccacggtcaacatggggcagtattacaagccagaacagtttaatggacaaaataacacgttctcgggaagcagctacagtaactacagccaagggaatgtcaacaggcctcccaggccggttcctgtggcaaattacccccactcacctgttccagggaaccccacaccccccatgacccctgggagcagcatccctccatacctgtcccccagccaagacgtcaaaccacccttcccgcctgacatcaagccaaatatgagcgctctgccaccaacccccagccaaccacaatgacgagctgcggctcacattccctgtgcgggatggcgtggtgctggagcccttccgcctggagcacaacctggcggtcagcaaccatgtgttccacctgcggcccacggtccaccagacgctgatgtggaggtctgacctggagctgcagttcaagtgctaccaccacgaggaccggcagatgaacaccaactggcccgcctcggtgcaggtcagcgtgaacgccacgcccctcaccattgagcgcggcgacaacaagacctcccacaagcccctgcacctgaagcacgtgtgccagccgggccgcaacaccatccagatcaccgtcacggcctgctgctgctcccacctcttcgtgctgcagctggtacaccggccctccgtccgctctgtgctgcaaggactcctcaagaagcgcctcctgcccgcagagcactgtatcacgaaaatcaagcggaatttcagcagcgtggctgcctcctcgggcaacacgaccctcaacggggaggatggggtggagcagacggccatcaaggtgtctctgaagtgccccatcacattccggcgcatccagctgcctgctcgaggacacgattgcaagcatgtgcagtgctttgatctggagtcatacctgcagctgaattgcgagagagggacctggaggtgtcctgtgtgcaataaaaccgctctgctggagggcctggaggtggatcagtacatgtggggaatcctgaatgccatccaacactccgagtttgaagaggtcaccatcgatcccacgtgcagctggcggccggtgcccatcaagtcggacttacacatcaaggacgaccctgatggcatcccctccaagcggttcaagaccatgagtcccagccagatgatcatgcccaatgtcatggagatgatcgcagccctgggccccggcccgtccccctatcccctcccgcctcccccagggggcaccaactccaacgactacagcagccaaggcaacaactaccaaggccatggcaactttgacttcccccacgggaaccctggagggacatccatgaatgacttcatgcacgggcccccccagctctcccaccccccggacatgcccaacaacatggccgccctcgagaaacccctcagccaccccatgcaggaaactctccttcccgaactcacaaatcctgacgagctcctgtcttatctggacccccccgacctgccgagcaatagtaacgatgacctcctgtctctatttgagaacaactgagggccacccggtcggggccatccctccacactctgcatcctaccccacctacccaacacacttttccacctgggagcctgtgccctcagaccgccccgcaccagagccacgggctgtggggcggggagccctcccccgctgcagccctctcagaacagaggggtagggagggtgcaccagtgcaccaggaaggctgtgtgggtctggagcccacgtcccacctccacacccttggcttgggcccatgcccagcgcaggcctgaagaccaccctcccgagaggaaccagcccggtaagagggcacacgctgatgcggcttcccggtccctccgcgtgtgccgattccagatgaccttccagtgtccccaaggttcttccatcttctagactgtaaccctgcctccctgcttcctggtccagagcctccctccagtgactgtggagcctgagaaggcccccgggccccagcatgggccccgagccttggaggagcactggcagttggtggcagtgagaccagccaccaccaccaccacagaaaagcacaaacctctgggaaagacaacgtctctcgggggccaggggtcatcggtttgacccctgacctataagccaagataccccataaacacactcagaaagcagagaaaaaggacaagagtctgtgtttgagagggggtctgccattcctgcttggggactggtggggaagagggccaggacatcttctgagccaggacgtccctgaggctccacctccaagctcagacagggcccaggcttggggaacagagagagcaggtgtacacccaaccaaagtgattgtgcccttggttggggggcgcgggcatataacctgtcagaagcaaacaggagcggcaacttctaactttgctccaagccactctctttttaaacagcaacaatttaaagctatgaagtcacctggagaaaaggaacgttgctcttggacagcaagcaaaccatttctctccgtctgttctgtttttctcctagtccctctcctgccacctctccaagacttccgtgggacacccacttccctctgtcctagttctctttgtccaatcagatggcaagggcagtgcgtggaaaggccggggaggtgcagaaaccagagcccagggcaatggtgtctgtccagcccctccctctgtccctgtgctccaagctgcccccggctgcagcccaggccatggacatgtgcaccagtatgtacctgcaggcatgggggggaggggggcgtgtttctgggcctgccccagacactgcccttggctgccagcctaccctgcctgcactcctccaccatcacaatctcacccaaactcctgctcactcaagcaaaagcagcctctggccttccctccaccgctttgctccatctggcttaccactctccagggcctcctggggagcctgtcctgtgttcactttgtttcaggctggtctgtgccccgtgagccacatggcctagggtgatgccaggttgtcccgtcactggggtcccatctgtaaattctttgcgcccttcccggctgctgcctggggccctttcctgctctcccgtccgctgtgggtggtccccagcactcctctgtgggttttaccggaaaggtggccccagctgttgacttccagtcactgtcccagacggcacaaggttttctgtaggaaagctgccattgccccggccccttttcttcctttgtcccgttgtcgaggttttttcaaatagcgtgttgttcagtatgcaaatcaattattttaagaatcgcttttgtaaatatctttgtgaatattttagtatcgtctttgataatattcaacattttcatgacctggttatagcctttgctggtgtttttaaaatacctggactcaatgacaaagaccgagtcttctttttttttaaacaaaaacaaaaaaagcaaccagggctatttgtacagttgaaggggtgaacagaatgggcggctgtgctgggagttggaagaccgggcagcccgctatttagagccatccctcagtcagctggcagggacaagccaacgccaggtagcatgtggccacccttgcccagtgtctgtggcctggcaagtggccacgccctgtgtcagaccatctgggaattaagctccagacagacttacagatgccttccttaggagttcttgcttcttgcgttgatactttgccccagaaaggcctgggattcattctggttcttatcagggtgtgtccacactctgctcacaggtggatccacggctttccagtgcggagagtcgagatgctccctgcagcccaggccccgggcacctcctgcaaccatctctgggctcagcacctgaggcgggtttcctgggtcccctctccagcaagcctccaccagcaagctcggcccagagcttcccttccggctggctctgaaccgtgcgtggtgcctacagcctgcagtctggagacaagctcttccggagtgctctgggagccaggccagggtgtgagggaggtgcagaggcatccggggcgggagcaagccccaggttgtgacaggtgcaggtagacaacgcccataaacagagatggtcctgaactctggagagatccttccctgatcctttcggacgactacttggagccataagtaacctcagcaaaaacgaggcctctgcaagccacttttccatgccaagcatccacccggcccacaggcatgtttctgccgccactccgcaagatggacagggagccagcaggcaggcgggaagggccaagtacaggcaatcacccccatcttcttggtttgaagctttatccatgtatcatgttccgtgtagccattttattttttaagaaactgctaatactttctccctaatggaagccctgatcccccagagagctacaggtctgctcccgacgggcctcgggcctgacccgtccacacagggccgtgtcaacagcagcgactcaagggacgtgtgtacatatgtaaatgagaaatagagacgtgtcaacagatgcattcatttctcttggaatgtgtattgtttttattttgcgaaacaaaacaaaacaaaaaaaaaagcttggaactccatcacgtggaaaaactagatcctgttggttatagcatttgtgagttctccacgtctgtctctctcgctcatgtaatatactctgaccctgagtggaaaggggtttttgttctgtttttattttacctacatgtactatttagcttcagtgtactagtcctgccacctgtgtatttttagggtgctatggaaataatgaaaagaaacggggatttcagaagaaaattgtaaccaaattcatactttgtataatttttgatatcatgatcacaggtgattcacacgtacacacataaacacacccaccagtgcagcctgaagtaactcccacagaaaccatcatcgtctttgtacatcgtatgtacaatgcaatcatttcatactttaaactggtcaaaaaactaattgtgatttctagtcttgcaaagctgtatgtagttagatgatgtgacaacctctaatatttatctaataaatatgtattcagatgaaacctgtatattaggtgttcatgtggttattttgtatttaaagatcaaattatttgactattgctagacatttctatactctgttgtaacactgaggtatctcatttgcccatgttaatttttttctaaataaattgacaaaaacaaaaaaat

SEQ ID NO: 403269 - DNA, 7353 bp, Homo sapiens
  misc_feature (14)..(14): n is a, c, g, or t
  misc_feature (136)..(138): n is a, c, g, or t
  misc_feature (149)..(150): n is a, c, g, or t
  misc_feature (161)..(163): n is a, c, g, or t
  misc_feature (166)..(166): n is a, c, g, or t
cgggcgccgggaancgggcggccgggcggcaggcgggcgagcagcgatcgggcggccgagcgagcgagcaacgccggcgcagcgcggtgaccccagccccagccggcgcggagcaggagccggagccgagcggatnnnggcgccctcgnngcgctcctccnnnccngagcctgccctacccggcggtggcggcggcgcgtcctccagcggcggcagcggcgctcgcagcgcccggactcacggcagctgtgttctgatttcgtactactgctggggctgccacctcctcctccagacgctctcagcagacttgagtcctggtccttctgcagaggcctgagcaggaggaagaggaggaggcccgttggcgtcggaccaatgctgcaaggggtgtgaggagaggagccgctgtttttcactgagctgccataccccgaaagcaggatggagctggagtgaggtggaggggccgcaagctgctgaccggcgtgtgggacactggtggtttgcagatcactgaggctggacaacgttcatggctctcgggtagaacctagtgaaacggccagaatgaattctatggacaggcacatccagcagaccaatgaccgactgcagtgcatcaagcagcacttacagaatcctgccaacttccacaatgccgccacggagctgctggactggtgcggagacccacgggccttccagcggcccttcgagcagagcctgatgggctgtttgacggtggtcagtcgggtggcagcccagcaaggctttgacctggacctcggctacagactgctggctgtgtgtgctgcaaaccgagacaagttcaccccgaagtctgccgccttgttgtcctcctggtgcgaagagctcggccgcctgctgctgctccgacatcagaagagccgccagagcgatccccctgggaaactccccatgcagccccctctcagctccatgagctccatgaaacccactctgtcgcacagtgatgggtcgttcccctatgactctgtcccttggcagcagaacaccaaccagcctcccggctccctttccgtggtcaccacggtttggggagtaaccaacacatcccagagccaggtccttgggaaccctatggccaatgccaacaaccccatgaatccaggcggcaaccccatggcgtcgggcatgaccaccagcaacccaggcctcaactccccacagtttgcggggcagcagcagcagttctcagccaaggctggccccgctcagccctacatccagcagagcatgtatggccggcccaactaccccggcagcgggggctttggggccagttaccctgggggtcctaacgcccccgcaggcatgggcatccctccgcacaccaggccgcctgctgacttcactcagcccgcggcagccgctgcagcagcggcagtggcagcagcagcagccacagctacagccacagccacggccactgtggcagccctgcaggagacacagaacaaggatataaaccagtatggaccgatgggtcccacccaggcgtataacagccaattcatgaaccagcccgggccgcgggggcctgcctccatggggggcagcatgaaccccgcgagcatggcggctggcatgacgccctcggggatgagcggccctcccatgggcatgaaccagccccggccgcccggcatcagcccctttggcacacacgggcagcggatgccccagcagacctacccgggcccccggccccagtcccttcctattcagaacataaagaggccataccctggagagcccaactatggaaaccagcaatatggaccaaacagccagttccccacccagccaggccagtacccagcccccaaccccccgaggccactcacctcccccaactacccaggacagaggatgcccagccagccgagctccgggcagtacccgccccccacggtcaacatggggcagtattacaagccagaacagtttaatggacaaaataacacgttctcgggaagcagctacagtaactacagccaagggaatgtcaacaggcctcccaggccggttcctgtggcaaattacccccactcacctgttccagggaaccccacaccccccatgacccctgggagcagcatccctccatacctgtcccccagccaagacgtcaaaccacccttcccgcctgacatcaagccaaatatgagcgctctgccaccaacccccagccaaccacaatgacgagctgcggctcacattccctgtgcgggatggcgtggtgctggagcccttccgcctggagcacaacctggcggtcagcaaccatgtgttccacctgcggcccacggtccaccagacgctgatgtggaggtctgacctggagctgcagttcaagtgctaccaccacgaggaccggcagatgaacaccaactggcccgcctcggtgcaggtcagcgtgaacgccacgcccctcaccattgagcgcggcgacaacaagacctcccacaagcccctgcacctgaagcacgtgtgccagccgggccgcaacaccatccagatcaccgtcacggcctgctgctgctcccacctcttcgtgctgcagctggtacaccggccctccgtccgctctgtgctgcaaggactcctcaagaagcgcctcctgcccgcagagcactgtatcacgaaaatcaagcggaatttcagcagcgtggctgcctcctcgggcaacacgaccctcaacggggaggatggggtggagcagacggccatcaaggtgtctctgaagtgccccatcacattccggcgcatccagctgcctgctcgaggacacgattgcaagcatgtgcagtgctttgatctggagtcatacctgcagctgaattgcgagagagggacctggaggtgtcctgtgtgcaataaaaccgctctgctggagggcctggaggtggatcagtacatgtggggaatcctgaatgccatccaacactccgagtttgaagaggtcaccatcgatcccacgtgcagctggcggccggtgcccatcaagtcggacttacacatcaaggacgaccctgatggcatcccctccaagcggttcaagaccatgagtcccagccagatgatcatgcccaatgtcatggagatgatcgcagccctgggccccggcccgtccccctatcccctcccgcctcccccagggggcaccaactccaacgactacagcagccaaggcaacaactaccaaggccatggcaactttgacttcccccacgggaaccctggagggacatccatgaatgacttcatgcacgggcccccccagctctcccaccccccggacatgcccaacaacatggccgccctcgagaaacccctcagccaccccatgcaggaaactatgccacacgctggcagctctgaccagccccacccctccatacaacaaggtttgcacgtaccacaccccagcagccagtcaggcctccattacatcacagtggggctcctcctcctcctccttcccagcctccccggcagccgccacaggccgctcccagcagccatccacacagcgacctgacctttaacccctcctcagccttagagggtcaggccggagcgcagggagcgtccgacatgccggagccttcgctggatctccttcccgaactcacaaatcctgacgagctcctgtcttatctggacccccccgacctgccgagcaatagtaacgatgacctcctgtctctatttgagaacaactgagggccacccggtcggggccatccctccacactctgcatcctaccccacctacccaacacacttttccacctgggagcctgtgccctcagaccgccccgcaccagagccacgggctgtggggcggggagccctcccccgctgcagccctctcagaacagaggggtagggagggtgcaccagtgcaccaggaaggctgtgtgggtctggagcccacgtcccacctccacacccttggcttgggcccatgcccagcgcaggcctgaagaccaccctcccgagaggaaccagcccggtaagagggcacacgctgatgcggcttcccggtccctccgcgtgtgccgattccagatgaccttccagtgtccccaaggttcttccatcttctagactgtaaccctgcctccctgcttcctggtccagagcctccctccagtgactgtggagcctgagaaggcccccgggccccagcatgggccccgagccttggaggagcactggcagttggtggcagtgagaccagccaccaccaccaccacagaaaagcacaaacctctgggaaagacaacgtctctcgggggccaggggtcatcggtttgacccctgacctataagccaagataccccataaacacactcagaaagcagagaaaaaggacaagagtctgtgtttgagagggggtctgccattcctgcttggggactggtggggaagagggccaggacatcttctgagccaggacgtccctgaggctccacctccaagctcagacagggcccaggcttggggaacagagagagcaggtgtacacccaaccaaagtgattgtgcccttggttggggggcgcgggcatataacctgtcagaagcaaacaggagcggcaacttctaactttgctccaagccactctctttttaaacagcaacaatttaaagctatgaagtcacctggagaaaaggaacgttgctcttggacagcaagcaaaccatttctctccgtctgttctgtttttctcctagtccctctcctgccacctctccaagacttccgtgggacacccacttccctctgtcctagttctctttgtccaatcagatggcaagggcagtgcgtggaaaggccggggaggtgcagaaaccagagcccagggcaatggtgtctgtccagcccctccctctgtccctgtgctccaagctgcccccggctgcagcccaggccatggacatgtgcaccagtatgtacctgcaggcatgggggggaggggggcgtgtttctgggcctgccccagacactgcccttggctgccagcctaccctgcctgcactcctccaccatcacaatctcacccaaactcctgctcactcaagcaaaagcagcctctggccttccctccaccgctttgctccatctggcttaccactctccagggcctcctggggagcctgtcctgtgttcactttgtttcaggctggtctgtgccccgtgagccacatggcctagggtgatgccaggttgtcccgtcactggggccctttcctgctctcccgtccgctgtgggtggtccccagcactcctctgtgggttttaccggaaaggtggccccagctgttgacttccagtcactgtcccagacggcacaaggttttctgtaggaaagctgccattgccccggccccttttcttcctttgtcccgttgtcgaggttttttcaaatagcgtgttgttcagtatgcaaatcaattattttaagaatcgcttttgtaaatatctttgtgaatattttagtatcgtctttgataatattcaacattttcatgacctggttatagcctttgctggtgtttttaaaatacctggactcaatgacaaagaccgagtcttctttttttttaaacaaaaacaaaaaaagcaaccagggctatttgtacagttgaaggggtgaacagaatgggcggctgtgctgggagttggaagaccgggcagcccgctatttagagccatccctcagtcagctggcagggacaagccaacgccaggtagcatgtggccacccttgcccagtgtctgtggcctggcaagtggccacgccctgtgtcagaccatctgggaattaagctccagacagacttacagatgccttccttaggagttcttgcttcttgcgttgatactttgccccagaaaggcctgggattcattctggttcttatcagggtgtgtccacactctgctcacaggtggatccacggctttccagtgcggagagtcgagatgctccctgcagcccaggccccgggcacctcctgcaaccatctctgggctcagcacctgaggcgggtttcctgggtcccctctccagcaagcctccaccagcaagctcggcccagagcttcccttccggctggctctgaaccgtgcgtggtgcctacagcctgcagtctggagacaagctcttccggagtgctctgggagccaggccagggtgtgagggaggtgcagaggcatccggggcgggagcaagccccaggttgtgacaggtgcaggtagacaacgcccataaacagagatggtcctgaactctggagagatccttccctgatcctttcggacgactacttggagccataagtaacctcagcaaaaacgaggcctctgcaagccacttttccatgccaagcatccacccggcccacaggcatgtttctgccgccactccgcaagatggacagggagccagcaggcaggcgggaagggccaagtacaggcaatcacccccatcttcttggtttgaagctttatccatgtatcatgttccgtgtagccattttattttttaagaaactgctaatactttctccctaatggaagccctgatcccccagagagctacaggtctgctcccgacgggcctcgggcctgacccgtccacacagggccgtgtcaacagcagcgactcaagggacgtgtgtacatatgtaaatgagaaatagagacgtgtcaacagatgcattcatttctcttggaatgtgtattgtttttattttgcgaaacaaaacaaaacaaaaaaaaaagcttggaactccatcacgtggaaaaactagatcctgttggttatagcatttgtgagttctccacgtctgtctctctcgctcatgtaatatactctgaccctgagtggaaaggggtttttgttctgtttttattttacctacatgtactatttagcttcagtgtactagtcctgccacctgtgtatttttagggtgctatggaaataatgaaaagaaacggggatttcagaagaaaattgtaaccaaattcatactttgtataatttttgatatcatgatcacaggtgattcacacgtacacacataaacacacccaccagtgcagcctgaagtaactcccacagaaaccatcatcgtctttgtacatcgtatgtacaatgcaatcatttcatactttaaactggtcaaaaaactaattgtgatttctagtcttgcaaagctgtatgtagttagatgatgtgacaacctctaatatttatctaataaatatgtattcagatgaaacctgta

SEQ ID NO: 403270 - DNA, 2940 bp, Homo sapiens
tgtggtgggcgcgggcatataccctgtcaaaatcaaactcgagccactacttcgtaatcttggctccctcctcaatctcgtatgaaacatggaaccagtcacagctatcaatacccctggaatccactaaagtcgatcttcaagagtaagcacttcatttctctccgtctgttctgtttttctcctagtccctctcctgccacctctccaagacttccgtgggacacccacttccctctgtcctagttctctttgtccaatcagatggcaagggcagtgcgtggaaaggccggggaggtgcagaaaccagagcccagggcaatggtgtctgtccagcccctccctctgtccctgtgctccaagctgcccccggctgcagcccaggccatggacatgtgcaccagtatgtacctgcaggcatgggggggaggggggcgtgtttctgggcctgccccagacactgcccttggctgccagcctaccctgcctgcactcctccaccatcacaatctcacccaaactcctgctcactcaagcaaaagcagcctctggccttccctccaccgctttgctccatctggcttaccactctccagggcctcctggggagcctgtcctgtgttcactttgtttcaggctggtctgtgccccgtgagccacatggcctagggtgatgccaggttgtcccgtcactggggtcccatctgtaaattctttgcgcccttcccggctgctgcctggggccctttcctgctctcccgtccgctgtgggtggtccccagcactcctctgtgggttttaccggaaaggtggccccagctgttgacttccagtcactgtcccagacggcacaaggttttctgtaggaaagctgccattgccccggccccttttcttcctttgtcccgttgtcgaggttttttcaaatagcgtgttgttcagtatgcaaatcaattattttaagaatcgcttttgtaaatatctttgtgaatattttagtatcgtctttgataatattcaacattttcatgacctggttatagcctttgctggtgtttttaaaatacctggactcaatgacaaagaccgagtcttctttttttttaaacaaaaacaaaaaaagcaaccagggctatttgtacagttgaaggggtgaacagaatgggcggctgtgctgggagttggaagaccgggcagcccgctatttagagccatccctcagtcagctggcagggacaagccaacgccaggtagcatgtggccacccttgcccagtgtctgtggcctggcaagtggccacgccctgtgtcagaccatctgggaattaagctccagacagacttacagatgccttccttaggagttcttgcttcttgcgttgatactttgccccagaaaggcctgggattcattctggttcttatcagggtgtgtccacactctgctcacaggtggatccacggctttccagtgcggagagtcgagatgctccctgcagcccaggccccgggcacctcctgcaaccatctctgggctcagcacctgaggcgggtttcctgggtcccctctccagcaagcctccaccagcaagctcggcccagagcttcccttccggctggctctgaaccgtgcgtggtgcctacagcctgcagtctggagacaagctcttccggagtgctctgggagccaggccagggtgtgagggaggtgcagaggcatccggggcgggagcaagccccaggttgtgacaggtgcaggtagacaacgcccataaacagagatggtcctgaactctggagagatccttccctgatcctttcggacgactacttggagccataagtaacctcagcaaaaacgaggcctctgcaagccacttttccatgccaagcatccacccggcccacaggcatgtttctgccgccactccgcaagatggacagggagccagcaggcaggcgggaagggccaagtacaggcaatcacccccatcttcttggtttgaagctttatccatgtatcatgttccgtgtagccattttattttttaagaaactgctaatactttctccctaatggaagccctgatcccccagagagctacaggtctgctcccgacgggcctcgggcctgacccgtccacacagggccgtgtcaacagcagcgactcaagggacgtgtgtacatatgtaaatgagaaatagagacgtgtcaacagatgcattcatttctcttggaatgtgtattgtttttattttgcgaaacaaaacaaaacaaaaaaaaaagcttggaactccatcacgtggaaaaactagatcctgttggttatagcatttgtgagttctccacgtctgtctctctcgctcatgtaatatactctgaccctgagtggaaaggggtttttgttctgtttttattttacctacatgtactatttagcttcagtgtactagtcctgccacctgtgtatttttagggtgctatggaaataatgaaaagaaacggggatttcagaagaaaattgtaaccaaattcatactttgtataatttttgatatcatgatcacaggtgattcacacgtacacacataaacacacccaccagtgcagcctgaagtaactcccacagaaaccatcatcgtctttgtacatcgtatgtacaatgcaatcatttcatactttaaactggtcaaaaaactaattgtgatttctagtcttgcaaagctgtatgtagttagatgatgtgacaacctctaatatttatctaataaatatgtattcagatgaaacctgtatattaggtgttcatgtggttattttgtatttaaagatcaaattatttgactattgctagacatttctatactctgttgtaacactgaggtatctcatttgcccatgttaatttttttctaaataaattgacaaaaacaaaaaaat

SEQ ID NO: 403271 - DNA, 898 bp, Homo sapiens
ggacgtgtgtacatatgtaaatgagaaatagagacgtgtcaacagatgcattcatttctcttggaatagggccaagtacaggcaatcacccccatcttcttggtttgaagctttatccatgtatcatgttccgtgtagccattttattttttaagaaactgctaatactttctccctaatggaagccctgatcccccagagagctacaggtctgctcccgacgggcctcgggcctgacccgtccacacagggccgtgtcaacagcagcgactcaagggacgtgtgtacatatgtaaatgagaaatagagacgtgtcaacagatgcattcatttctcttggaatgtgtattgtttttattttgcgaaacaaaacaaaacaaaaaaaaaagcttggaactccatcacgtggaaaaactagatcctgttggttatagcatttgtgagttctccacgtctgtctctctcgctcatgtaatatactctgaccctgagtggaaaggggtttttgttctgtttttattttacctacatgtactatttagcttcagtgtactagtcctgccacctgtgtatttttagggtgctatggaaataatgaaaagaaacggggatttcagaagaaaattgtaaccaaattcatactttgtataatttttgatatcatgatcacaggtgattcacacgtacacacataaacacacccaccagtgcagcctgaagtaactcccacagaaaccatcatcgtctttgtacatcgtatgtacaatgcaatcatttcatactttaaactggtcaaaaaactaattgtgatttctagtcttgcaaagctgtatgtagttagatgatgtgacaacctctaatatttatctaataaatatgtattcagatgaaacctgta

SEQ ID NO: 403272 - DNA, 803 bp, Homo sapiens
  misc_feature (7)..(7): n is a, c, g, or t
cccctanttttagaagttcaatagcagcgactcaagggacgtgtgtacatatgtaaatgagaaatagagacgtgtcaacagatgcattcatttctcttggaatgtgtattgtttttattttgcgaaacaaaacaaaacaaaaaaaaaagcttggaactccatcacgtggaaaaactagatcctgttggttatagcatttgtgagttctccacgtctgtctctctcgctcatgtaatatactctgaccctgagtggaaaggggtttttgttctgtttttattttacctacatgtactatttagcttcagtgtactagtcctgccacctgtgtatttttagggtgctatggaaataatgaaaagaaacggggatttcagaagaaaattgtaaccaaattcatactttgtataatttttgatatcatgatcacaggtgattcacacgtacacacataaacacacccaccagtgcagcctgaagtaactcccacagaaaccatcatcgtctttgtacatcgtatgtacaatgcaatcatttcatactttaaactggtcaaaaaactaattgtgatttctagtcttgcaaagctgtatgtagttagatgatgtgacaacctctaatatttatctaataaatatgtattcagatgaaacctgtatattaggtgttcatgtggttattttgtatttaaagatcaaattatttgactattgctagacatttctatactctgttgtaacactgaggtatctcatttgcccatgttaatttttttctaaataaattgacaaaaacaaaaaaat

SEQ ID NO: 403273 - DNA, 5134 bp, Homo sapiens
  misc_feature (14)..(14): n is a, c, g, or t
  misc_feature (3145)..(3145): n is a, c, g, or t
  misc_feature (4158)..(4158): n is a, c, g, or t
cgggcgccgggaancgggcggccgggcggcaggcgggcgagcagcgatcgggcggccgagcgagcgagcaacgccggcgcagcgcggtgaccccagccccagccggcgcggagcaggagccggagccgagcggatctcgcgcgcgcctctgctgctgctacctccctgtgccctgatgcctcgcccttaccctgtgctgggtgtgctgtgctgtgctgctgttcctccatgctgtgctgtgcatgctgtgctgctctgcatgctgccctggactcacggcagctgtgttctgatttcgtactactgctggggctgccacctcctcctccagacgctctcagcagacttgagtcctggtccttctgcagaggcctgagcaggaggaagaggaggaggcccgttggcgtcggaccaatgctgcaaggggtgtgaggagaggagccgctgtttttcactgagctgccataccccgaaagcaggatggagctggagtgaggtggaggggccgcaagctgctgaccggcgtgtgggacactggtggtttgcagatcactgaggctggacaacgttcatggctctcgggtagaacctagtgaaacggccagaatgaattctatggacaggcacatccagcagaccaatgaccgactgcagtgcatcaagcagcacttacagaatcctgccaacttccacaatgccgccacggagctgctggactggtgcggagacccacgggccttccagcggcccttcgagcagagcctgatgggctgtttgacggtggtcagtcgggtggcagcccagcaaggctttgacctggacctcggctacagactgctggctgtgtgtgctgcaaaccgagacaagttcaccccgaagtctgccgccttgttgtcctcctggtgcgaagagctcggccgcctgctgctgctccgacatcagaagagccgccagagcgatccccctgggaaactccccatgcagccccctctcagctccatgagctccatgaaacccactctgtcgcacagtgatgggtcgttcccctatgactctgtcccttggcagcagaacaccaaccagcctcccggctccctttccgtggtcaccacggtttggggagtaaccaacacatcccagagccaggtccttgggaaccctatggccaatgccaacaaccccatgaatccaggcggcaaccccatggcgtcgggcatgaccaccagcaacccaggcctcaactccccacagtttgcggggcagcagcagcagttctcagccaaggctggccccgctcagccctacatccagcagagcatgtatggccggcccaactaccccggcagcgggggctttggggccagttaccctgggggtcctaacgcccccgcaggcatgggcatccctccgcacaccaggccgcctgctgacttcactcagcccgcggcagccgctgcagcagcggcagtggcagcagcagcagccacagctacagccacagccacggccactgtggcagccctgcaggagacacagaacaaggatataaaccagtatggaccggtctgttcctctttccagatgggtcccacccaggcgtataacagccaattcatgaaccagcccgggccgcgggggcctgcctccatggggggcagcatgaaccccgcgagcatggcggctggcatgacgccctcggggatgagcggccctcccatgggcatgaaccagccccggccgcccggcatcagcccctttggcacacacgggcagcggatgccccagcagacctacccgggcccccggccccagtcccttcctattcagaacataaagaggccataccctggagaggtgagtgcagcagtgggagcctgggaggtgggaactgggacacctgggcttgaagacatgggccgtgggtacggctttggaaggggtgtggcttggactccagcacacttggacaaagaggcaggggcttaggggtcaggtgctcctgggtttgagacctggttctgctgtttcccaactgaaagacctcgagccagtcaccctgcctcctagggctgcttgagggacttgaggaggtgtccgtgaagtgcttggccctgggctggcatgtgccgccactcagcaagcagcagttcctcttactgtagtgactcttgtcttggctcagccactaactgggtgacctgggtttagttcctcctgcccacatgagagcttccccaactcctctccaagaaagagagctgagacaaaatgcttccagtctataagggctgacccgtccgggaagtgactggaaggcaggcagcgtgtttccagtctgtaaggattgacctgttggggaagtgactggaaggcagagagcgtgtttccaatctataaggactgacccgttggggaagtgactggaaggccggcagctgtttccagtctataaggactgacccgtcagggaagtgactggaaggcagacagcgtgtttcttagctcttgtttccatccacacttggtcactgtataggaagtggcactgcctcttgggctgcacagccagctcagccaaggtgttggggaagatttggggaagtaaaacccacacctcctgccctctgggaagtgaggttttagcaggaaagaaaagtttttagcagagactcaccagggaatgaagcatagcagactgcacagaactcaatatgagtcagagaaggcaggcttcctggagggtgtgtcacaagtaaatcctcagaaaatgatgctggcagcagctggcccatctgggtacccaggtaaggatttagtttacctgcagaagacgtagggacgtggctctgcagatgcccctcgtgaagccctggttgctccccacgaccaagcccctttttgagcagggtgtgcccagctctctgcctgcctccctcccagcttgcatgcccactctcagagcagttttctcctcctagctcctctcagctctgtggccttcaccttgggttcacagcggctttagattccaaagaccttaagttccttgaagatctgcacatttcccctcagtatccaccttaggatgggcggggaggcttggcaacaagtggaggtattctgagttcaggaggggagagagagngggggggtcaggggcttcctcatgcatccaagaagctggatcaagccccaaccctccacctggtggacactagttcagggaggggccagagaaggaccattggctcctgggtcctgagtttgggggagcctcaagctattggcacctctcctggcactcaggccccatgcagtttctaggccttttctcagccaccctgtgctcaaaatcccagtgtcccactggctgtgctgggggtgcatctgttagcccacgccaaaggaggcaatctcggatgaggcttcagcagaattcctggtcattggtgtcacccctgcacctgcacctgtgccatgcttatggctcttgcctgcctaaagagagcacaccaaaggctctccatatttttactaaattaatcatccttttcatagagtgctgctgctacccagctacagcactgggtggtcacagcctatgcggcctgatcctgtctggaagactggccttccttccccttgccatggcttgttcatacaatatttgaattgttggagccttaggacaggggttgggtcatctggtcccacagaggactctcttctctagcttggtgggcaggtaggcaccagctacgtcttctatacctcctgtggtgggtgcctcactgtcacccagagcagccaccatgttgcaacaacgtgagttgtagattcttccacactgacactttctgacatttatccctaagtccatcattcgtttgttgagcaagtattaagggtattttcccaggcactggggcacagccaccaacaggacctctgggcaagagagacactcagatggggaagaagaaaccactgactcacaggatgtcatgtggccgtgagggtcacctgattttccagacagggaaggtggctggagggtggtgctctctcctcttctctaaattgtctgtcccgggagaagttgtcttgttccttcaccaacctggctctcccacctcctgcacaggtggcaggttgtcnatggcccagaactgaacactaggtgtgtgttctgctctgaggggagtacgaggacaatgccacccaagttcagccttggaatgcaggggcacagggggctcctttctggaattgcatcctgttgactgtgttcctctgtcacattggggtacacattggggagcacagccctaacccaggcaccaggagagacacaaaggtcgggggagttagaatcaggcccctcataatggtgtgagcaagaggctctgaaagtgtccctggagttcaggggcacatgtgctccaggaagaacggcctcaaggggaggtggcctatgatctggacaggcagaacaaaatgcccctggatgtcaggacgagaaggggcccaaagcattatctggttttgtgggtgggaaacagcaggagcaaatgaggagaggcgggccccatcccgttgttcaggtgacctggctatgtgacgttggcaacattgaacgtgttcccctctcctttctctcccaccacagcccaactatggaaaccagcaatatggaccaaacagccagttccccacccagccaggccagtacccagcccccaaccccccgaggccactcacctcccccaactacccaggacagaggatgcccagccagccgagctccgggcagtacccgccccccacggtcaacatggggcagtattacaaggtgagtcccagcctcgccaccacccacggggccccttccctcctaaccacctcactcccctaactccaccgggatcactctgaccctgcgtgtgtttgccccaaggacagcgaggggtgggtgatttctgaacgtccccatgtgttcagggcgaagttcggtggccagaatgtcagagtggcttttctcagttcctattctcattcgtctcggatgatggtttttttttctccttttcttattcacggcactcacaaaataataaaggaaatatattttatt

SEQ ID NO: 403274 - DNA, 2129 bp, Homo sapiens
  misc_feature (14)..(14): n is a, c, g, or t
cgggcgccgggaancgggcggccgggcggcaggcgggcgagcagcgatcgggcggccgagcgagcgagcaacgccggcgcagcgcggtgaccccagccccagccggcgcggagcaggagccggagccgagcggatctcgcgcgcgcctctgctgctgctacctccctgtgccctgatgcctcgcccttaccctgtgctgggtgtgctgtgctgtgctgctgttcctccatgctgtgctgtgcatgctgtgctgctctgcatgctgccctggactcacggcagctgtgttctgatttcgtactactgctggggctgccacctcctcctccagacgctctcagcagacttgagtcctggtccttctgcagaggcctgagcaggaggaagaggaggaggcccgttggcgtcggaccaatgctgcaaggggtgtgaggagaggagccgctgtttttcactgagctgccataccccgaaagcaggatggagctggagtgaggtggaggggccgcaagctgctgaccggcgtgtgggacactggtggtttgcagatcactgaggctggacaacgttcatggctctcgggtagaacctagtgaaacggccagaatgaattctatggacaggcacatccagcagaccaatgaccgactgcagtgcatcaagcagcacttacagaatcctgccaacttccacaatgccgccacggagctgctggactggtgcggagacccacgggccttccagcggcccttcgagcagagcctgatgggctgtttgacggtggtcagtcgggtggcagcccagcaaggctttgacctggacctcggctacagactgctggctgtgtgtgctgcaaaccgagacaagttcaccccgaagtctgccggtaggtgtccgtgggggactctgcgatgtcactgggaggtggggaggggaactgactataaaccatgcctgtttgctgcccctgccttctggtgcctccatttgtctaggtgtagtgcgaacccctgaggaagagcaactcatccaccaggctctgggacccacagttggggctgtcctcgtgcctctcccagggagtatacttgcctcaggggtactgcagggccagagaggctcccgaggcacaccaaacccagcagtaggcactgtgctacaggcaggaccagcatcagctcactccatcaccacggtgaccccttggcataagcactgtgagctccccattttacacatgaggaaactgaggctcacaaacacagaggagatttcccaaggccacacagctggaaggcagcagagcagggatttaagcctaggcctgtacttcagagtcagcattcttaacctttatactccactacgttcattcattccccaaaaattgtttaaaatgaaacacaaaagtcgaaacaaaatgaatcagtacactcagggttccgtattgcaactttgtcatcacctgcggtctcctgaccttgcagtaagcaggggccatggagagtgccaagcagcattctgtctgggagggctttgagcactttaaagatacagttttattttacatttcccaccatcctcataacctggcttaggccacaggcaccctgctagctttaagccggacagacctgtcacttgctaagtgtgtggtctctgagcctcagctgatctttctgggaaggcaggaatggtaaggagactcctgacttcaggggtcattgtaagtgctagaaatacataaagtgcaggccgggcgcggtggctcacgcctgtaatcccagcactttgggaggccgaggcgagcagatcacgaggtcaggagatcgagaccatcctggctaacacggtgaaaccccgtctctactaaaaatacaaaaaaaattagccgggtgtggtggcgggcgcctgtagtcccagctactcaggaggttgaggcaggagaatggcgtgaacccaggaggcggggcttgcagtgaaccgagatcgcgccactgcactccagcctgggtgacagagggagactccgtctcaaaaaaaaaaagaaagaaagaaatacataaagtacctagcaccgtgtctggatattgttaacattccttatggagtcaggacaagcagttgaa

SEQ ID NO: 403275 - DNA, 416 bp, Homo sapiens
acacagaacaaggatataaaccagtatggaccggtaagggttcccactaatcctggtccagccttgcccagccagccaggcagacagccctgggaaaccagagttgggatgtcagtgcttatggggccatgtgtgctgggagagctgactgcattagggtgcatttgggctttcatggaagcatgtggaggtctgtgtgtttagaatggcgcatgtctagaatggggcgtgtcagtgtgcttgggtgtggtggggtgtatgggtgctggtgtttgttctgtgtgttggtggctcatgtacaactgcatatggggaaaaggttctacatggctctctgggcccccaactcaccaaggagtgggctcaatgtctaaaaatagtcttgtgaccggtctgtctcctggattgcctctgag

SEQ ID NO: 403276 - DNA, 252 bp, Homo sapiens
acgttcagcctcgtaccgggtggccacgtttcgggggttgtgacttccctggttgtgttgggtttcattttctccaggcatcatcgccgtgcctcctcacctcacctctcttctctcccgctctctcctcctccacagatgccacacgctggcagctctgaccagccccacccctccatacaacaaggtttgcacgtaccacaccccagcagccagtcaggcctccattacatcacagtggggctcctcctc

SEQ ID NO: 403277 - DNA, 338 bp, Homo sapiens
ctgccgcccaggcccgctccttatcaccggtacactcagaatagttcatccaccctccatttttttcctcctccctgttgtcctgcctccactttgttctttctccctttcccctcttcatttatccctcttcctctccacactgcctcgggtagcaccttaggtgacaaccacttctctgcccacaggtccttgggaaccctatggccaatgccaacaaccccatgaatccaggcggcaaccccatggcgtcgggcatgaccaccagcaacccaggcctcaactccccacagtttgcggggcagcagcagcagttctcagccaaggctggccccgct

SEQ ID NO: 403278 - DNA, 7543 bp, Homo sapiens
  misc_feature (14)..(14): n is a, c, g, or t
  misc_feature (136)..(138): n is a, c, g, or t
  misc_feature (149)..(150): n is a, c, g, or t
  misc_feature (161)..(163): n is a, c, g, or t
  misc_feature (166)..(166): n is a, c, g, or t
cgggcgccgggaancgggcggccgggcggcaggcgggcgagcagcgatcgggcggccgagcgagcgagcaacgccggcgcagcgcggtgaccccagccccagccggcgcggagcaggagccggagccgagcggatnnnggcgccctcgnngcgctcctccnnnccngagcctgccctacccggcggtggcggcggcgcgtcctccagcggcggcagcggcgctcgcagcgcccggactcacggcagctgtgttctgatttcgtactactgctggggctgccacctcctcctccagacgctctcagcagacttgagtcctggtccttctgcagaggcctgagcaggaggaagaggaggaggcccgttggcgtcggaccaatgctgcaaggggtgtgaggagaggagccgctgtttttcactgagctgccataccccgaaagcaggatggagctggagtgaggtggaggggccgcaagctgctgaccggcgtgtgggacactggtggtttgcagatcactgaggctggacaacgttcatggctctcgggtagaacctagtgaaacggccagaatgaattctatggacaggcacatccagcagaccaatgaccgactgcagtgcatcaagcagcacttacagaatcctgccaacttccacaatgccgccacggagctgctggactggtgcggagacccacgggccttccagcggcccttcgagcagagcctgatgggctgtttgacggtggtcagtcgggtggcagcccagcaaggctttgacctggacctcggctacagactgctggctgtgtgtgctgcaaaccgagacaagttcaccccgaagtctgccgccttgttgtcctcctggtgcgaagagctcggccgcctgctgctgctccgacatcagaagagccgccagagcgatccccctgggaaactccccatgcagccccctctcagctccatgagctccatgaaacccactctgtcgcacagtgatgggtcgttcccctatgactctgtcccttggcagcagaacaccaaccagcctcccggctccctttccgtggtcaccacggtttggggagtaaccaacacatcccagagccaggtccttgggaaccctatggccaatgccaacaaccccatgaatccaggcggcaaccccatggcgtcgggcatgaccaccagcaacccaggcctcaactccccacagtttgcggggcagcagcagcagttctcagccaaggctggccccgctcagccctacatccagcagagcatgtatggccggcccaactaccccggcagcgggggctttggggccagttaccctgggggtcctaacgcccccgcaggcatgggcatccctccgcacaccaggccgcctgctgacttcactcagcccgcggcagccgctgcagcagcggcagtggcagcagcagcagccacagctacagccacagccacggccactgtggcagccctgcaggagacacagaacaaggatataaaccagtatggaccgatgggtcccacccaggcgtataacagccaattcatgaaccagcccgggccgcgggggcctgcctccatggggggcagcatgaaccccgcgagcatggcggctggcatgacgccctcggggatgagcggccctcccatgggcatgaaccagccccggccgcccggcatcagcccctttggcacacacgggcagcggatgccccagcagacctacccgggcccccggccccagtcccttcctattcagaacataaagaggccataccctggagagcccaactatggaaaccagcaatatggaccaaacagccagttccccacccagccaggccagtacccagcccccaaccccccgaggccactcacctcccccaactacccaggacagaggatgcccagccagccgagctccgggcagtacccgccccccacggtcaacatggggcagtattacaagccagaacagtttaatggacaaaataacacgttctcgggaagcagctacagtaactacagccaagggaatgtcaacaggcctcccaggccggttcctgtggcaaattacccccactcacctgttccagggaaccccacaccccccatgacccctgggagcagcatccctccatacctgtcccccagccaagacgtcaaaccacccttcccgcctgacatcaagccaaatatgagcgctctgccaccaacccccagccaaccacaatgacgagctgcggctcacattccctgtgcgggatggcgtggtgctggagcccttccgcctggagcacaacctggcggtcagcaaccatgtgttccacctgcggcccacggtccaccagacgctgatgtggaggtctgacctggagctgcagttcaagtgctaccaccacgaggaccggcagatgaacaccaactggcccgcctcggtgcaggtcagcgtgaacgccacgcccctcaccattgagcgcggcgacaacaagacctcccacaagcccctgcacctgaagcacgtgtgccagccgggccgcaacaccatccagatcaccgtcacggcctgctgctgctcccacctcttcgtgctgcagctggtacaccggccctccgtccgctctgtgctgcaaggactcctcaagaagcgcctcctgcccgcagagcactgtatcacgaaaatcaagcggaatttcagcagcgtggctgcctcctcgggcaacacgaccctcaacggggaggatggggtggagcagacggccatcaaggtgtctctgaagtgccccatcacattccggcgcatccagctgcctgctcgaggacacgattgcaagcatgtgcagtgctttgatctggagtcatacctgcagctgaattgcgagagagggacctggaggtgtcctgtgtgcaataaaaccgctctgctggagggcctggaggtggatcagtacatgtggggaatcctgaatgccatccaacactccgagtttgaagaggtcaccatcgatcccacgtgcagctggcggccggtgcccatcaagtcggacttacacatcaaggacgaccctgatggcatcccctccaagcggttcaagaccatgagtcccagccagatgatcatgcccaatgtcatggagatgatcgcagccctgggccccggcccgtccccctatcccctcccgcctcccccagggggcaccaactccaacgactacagcagccaaggcaacaactaccaaggccatggcaactttgacttcccccacgggaaccctggagggacatccatgaatgacttcatgcacgggcccccccagctctcccaccccccggacatgcccaacaacatggccgccctcgagaaacccctcagccaccccatgcaggaaactatgccacacgctggcagctctgaccagccccacccctccatacaacaaggtttgcacgtaccacaccccagcagccagtcaggcctccattacatcacagtggggctcctcctcctcctccttcccagcctccccggcagccgccacaggccgctcccagcagccatccacacagcgacctgacctttaacccctcctcagccttagagggtcaggccggagcgcagggagcgtccgacatgccggagccttcgctggatctccttcccgaactcacaaatcctgacgagctcctgtcttatctggacccccccgacctgccgagcaatagtaacgatgacctcctgtctctatttgagaacaactgagggccacccggtcggggccatccctccacactctgcatcctaccccacctacccaacacacttttccacctgggagcctgtgccctcagaccgccccgcaccagagccacgggctgtggggcggggagccctcccccgctgcagccctctcagaacagaggggtagggagggtgcaccagtgcaccaggaaggctgtgtgggtctggagcccacgtcccacctccacacccttggcttgggcccatgcccagcgcaggcctgaagaccaccctcccgagaggaaccagcccggtaagagggcacacgctgatgcggcttcccggtccctccgcgtgtgccgattccagatgaccttccagtgtccccaaggttcttccatcttctagactgtaaccctgcctccctgcttcctggtccagagcctccctccagtgactgtggagcctgagaaggcccccgggccccagcatgggccccgagccttggaggagcactggcagttggtggcagtgagaccagccaccaccaccaccacagaaaagcacaaacctctgggaaagacaacgtctctcgggggccaggggtcatcggtttgacccctgacctataagccaagataccccataaacacactcagaaagcagagaaaaaggacaagagtctgtgtttgagagggggtctgccattcctgcttggggactggtggggaagagggccaggacatcttctgagccaggacgtccctgaggctccacctccaagctcagacagggcccaggcttggggaacagagagagcaggtgtacacccaaccaaagtgattgtgcccttggttggggggcgcgggcatataacctgtcagaagcaaacaggagcggcaacttctaactttgctccaagccactctctttttaaacagcaacaatttaaagctatgaagtcacctggagaaaaggaacgttgctcttggacagcaagcaaaccatttctctccgtctgttctgtttttctcctagtccctctcctgccacctctccaagacttccgtgggacacccacttccctctgtcctagttctctttgtccaatcagatggcaagggcagtgcgtggaaaggccggggaggtgcagaaaccagagcccagggcaatggtgtctgtccagcccctccctctgtccctgtgctccaagctgcccccggctgcagcccaggccatggacatgtgcaccagtatgtacctgcaggcatgggggggaggggggcgtgtttctgggcctgccccagacactgcccttggctgccagcctaccctgcctgcactcctccaccatcacaatctcacccaaactcctgctcactcaagcaaaagcagcctctggccttccctccaccgctttgctccatctggcttaccactctccagggcctcctggggagcctgtcctgtgttcactttgtttcaggctggtctgtgccccgtgagccacatggcctagggtgatgccaggttgtcccgtcactggggtcccatctgtaaattctttgcgcccttcccggctgctgcctggggccctttcctgctctcccgtccgctgtgggtggtccccagcactcctctgtgggttttaccggaaaggtggccccagctgttgacttccagtcactgtcccagacggcacaaggttttctgtaggaaagctgccattgccccggccccttttcttcctttgtcccgttgtcgaggttttttcaaatagcgtgttgttcagtatgcaaatcaattattttaagaatcgcttttgtaaatatctttgtgaatattttagtatcgtctttgataatattcaacattttcatgacctggttatagcctttgctggtgtttttaaaatacctggactcaatgacaaagaccgagtcttctttttttttaaacaaaaacaaaaaaagcaaccagggctatttgtacagttgaaggggtgaacagaatgggcggctgtgctgggagttggaagaccgggcagcccgctatttagagccatccctcagtcagctggcagggacaagccaacgccaggtagcatgtggccacccttgcccagtgtctgtggcctggcaagtggccacgccctgtgtcagaccatctgggaattaagctccagacagacttacagatgccttccttaggagttcttgcttcttgcgttgatactttgccccagaaaggcctgggattcattctggttcttatcagggtgtgtccacactctgctcacaggtggatccacggctttccagtgcggagagtcgagatgctccctgcagcccaggccccgggcacctcctgcaaccatctctgggctcagcacctgaggcgggtttcctgggtcccctctccagcaagcctccaccagcaagctcggcccagagcttcccttccggctggctctgaaccgtgcgtggtgcctacagcctgcagtctggagacaagctcttccggagtgctctgggagccaggccagggtgtgagggaggtgcagaggcatccggggcgggagcaagccccaggttgtgacaggtgcaggtagacaacgcccataaacagagatggtcctgaactctggagagatccttccctgatcctttcggacgactacttggagccataagtaacctcagcaaaaacgaggcctctgcaagccacttttccatgccaagcatccacccggcccacaggcatgtttctgccgccactccgcaagatggacagggagccagcaggcaggcgggaagggccaagtacaggcaatcacccccatcttcttggtttgaagctttatccatgtatcatgttccgtgtagccattttattttttaagaaactgctaatactttctccctaatggaagccctgatcccccagagagctacaggtctgctcccgacgggcctcgggcctgacccgtccacacagggccgtgtcaacagcagcgactcaagggacgtgtgtacatatgtaaatgagaaatagagacgtgtcaacagatgcattcatttctcttggaatgtgtattgtttttattttgcgaaacaaaacaaaacaaaaaaaaaagcttggaactccatcacgtggaaaaactagatcctgttggttatagcatttgtgagttctccacgtctgtctctctcgctcatgtaatatactctgaccctgagtggaaaggggtttttgttctgtttttattttacctacatgtactatttagcttcagtgtactagtcctgccacctgtgtatttttagggtgctatggaaataatgaaaagaaacggggatttcagaagaaaattgtaaccaaattcatactttgtataatttttgatatcatgatcacaggtgattcacacgtacacacataaacacacccaccagtgcagcctgaagtaactcccacagaaaccatcatcgtctttgtacatcgtatgtacaatgcaatcatttcatactttaaactggtcaaaaaactaattgtgatttctagtcttgcaaagctgtatgtagttagatgatgtgacaacctctaatatttatctaataaatatgtattcagatgaaacctgtatattaggtgttcatgtggttattttgtatttaaagatcaaattatttgactattgctagacatttctatactctgttgtaacactgaggtatctcatttgcccatgttaatttttttctaaataaattgacaaaaacaaaaaaat

SEQ ID NO: 403279 - DNA, 7259 bp, Homo sapiens
tctagagatccccgcgcaagaggaacggcggcaagaggaggaacggcggaaagagtaacggaggaagaggaggaggcccgttggcgtcggaccaatgctgcaaggggtgtgaggagaggagccgctgtttttcactgagctgccataccccgaaagcaggatggagctggagtgaggtggaggggccgcaagctgctgaccggcgtgtgggacactggtggtttgcagatcactgaggctggacaacgttcatggctctcgggtagaacctagtgaaacggccagaatgaattctatggacaggcacatccagcagaccaatgaccgactgcagtgcatcaagcagcacttacagaatcctgccaacttccacaatgccgccacggagctgctggactggtgcggagacccacgggccttccagcggcccttcgagcagagcctgatgggctgtttgacggtggtcagtcgggtggcagcccagcaaggctttgacctggacctcggctacagactgctggctgtgtgtgctgcaaaccgagacaagttcaccccgaagtctgccgccttgttgtcctcctggtgcgaagagctcggccgcctgctgctgctccgacatcagaagagccgccagagcgatccccctgggaaactccccatgcagccccctctcagctccatgagctccatgaaacccactctgtcgcacagtgatgggtcgttcccctatgactctgtcccttggcagcagaacaccaaccagcctcccggctccctttccgtggtcaccacggtttggggagtaaccaacacatcccagagccaggtccttgggaaccctatggccaatgccaacaaccccatgaatccaggcggcaaccccatggcgtcgggcatgaccaccagcaacccaggcctcaactccccacagtttgcggggcagcagcagcagttctcagccaaggctggccccgctcagccctacatccagcagagcatgtatggccggcccaactaccccggcagcgggggctttggggccagttaccctgggggtcctaacgcccccgcaggcatgggcatccctccgcacaccaggccgcctgctgacttcactcagcccgcggcagccgctgcagcagcggcagtggcagcagcagcagccacagctacagccacagccacggccactgtggcagccctgcaggagacacagaacaaggatataaaccagtatggaccgatgggtcccacccaggcgtataacagccaattcatgaaccagcccgggccgcgggggcctgcctccatggggggcagcatgaaccccgcgagcatggcggctggcatgacgccctcggggatgagcggccctcccatgggcatgaaccagccccggccgcccggcatcagcccctttggcacacacgggcagcggatgccccagcagacctacccgggcccccggccccagtcccttcctattcagaacataaagaggccataccctggagagcccaactatggaaaccagcaatatggaccaaacagccagttccccacccagccaggccagtacccagcccccaaccccccgaggccactcacctcccccaactacccaggacagaggatgcccagccagccgagctccgggcagtacccgccccccacggtcaacatggggcagtattacaagccagaacagtttaatggacaaaataacacgttctcgggaagcagctacagtaactacagccaagggaatgtcaacaggcctcccaggccggttcctgtggcaaattacccccactcacctgttccagggaaccccacaccccccatgacccctgggagcagcatccctccatacctgtcccccagccaagacgtcaaaccacccttcccgcctgacatcaagccaaatatgagcgctctgccaccaacccccagccaaccacaatgacgagctgcggctcacattccctgtgcgggatggcgtggtgctggagcccttccgcctggagcacaacctggcggtcagcaaccatgtgttccacctgcggcccacggtccaccagacgctgatgtggaggtctgacctggagctgcagttcaagtgctaccaccacgaggaccggcagatgaacaccaactggcccgcctcggtgcaggtcagcgtgaacgccacgcccctcaccattgagcgcggcgacaacaagacctcccacaagcccctgcacctgaagcacgtgtgccagccgggccgcaacaccatccagatcaccgtcacggcctgctgctgctcccacctcttcgtgctgcagctggtacaccggccctccgtccgctctgtgctgcaaggactcctcaagaagcgcctcctgcccgcagagcactgtatcacgaaaatcaagcggaatttcagcagcgtggctgcctcctcgggcaacacgaccctcaacggggaggatggggtggagcagacggccatcaaggtgtctctgaagtgccccatcacattccggcgcatccagctgcctgctcgaggacacgattgcaagcatgtgcagtgctttgatctggagtcatacctgcagctgaattgcgagagagggacctggaggtgtcctgtgtgcaataaaaccgctctgctggagggcctggaggtggatcagtacatgtggggaatcctgaatgccatccaacactccgagtttgaagaggtcaccatcgatcccacgtgcagctggcggccggtgcccatcaagtcggacttacacatcaaggacgaccctgatggcatcccctccaagcggttcaagaccatgagtcccagccagatgatcatgcccaatgtcatggagatgatcgcagccctgggccccggcccgtccccctatcccctcccgcctcccccagggggcaccaactccaacgactacagcagccaaggcaacaactaccaaggccatggcaactttgacttcccccacgggaaccctggagggacatccatgaatgacttcatgcacgggcccccccagctctcccaccccccggacatgcccaacaacatggccgccctcgagaaacccctcagccaccccatgcaggaaactatgccacacgctggcagctctgaccagccccacccctccatacaacaaggtttgcacgtaccacaccccagcagccagtcaggcctccattacatcacagtggggctcctcctcctcctccttcccagcctccccggcagccgccacaggccgctcccagcagccatccacacagcgacctgacctttaacccctcctcagccttagagggtcaggccggagcgcagggagcgtccgacatgccggagccttcgctggatctccttcccgaactcacaaatcctgacgagctcctgtcttatctggacccccccgacctgccgagcaatagtaacgatgacctcctgtctctatttgagaacaactgagggccacccggtcggggccatccctccacactctgcatcctaccccacctacccaacacacttttccacctgggagcctgtgccctcagaccgccccgcaccagagccacgggctgtggggcggggagccctcccccgctgcagccctctcagaacagaggggtagggagggtgcaccagtgcaccaggaaggctgtgtgggtctggagcccacgtcccacctccacacccttggcttgggcccatgcccagcgcaggcctgaagaccaccctcccgagaggaaccagcccggtaagagggcacacgctgatgcggcttcccggtccctccgcgtgtgccgattccagatgaccttccagtgtccccaaggttcttccatcttctagactgtaaccctgcctccctgcttcctggtccagagcctccctccagtgactgtggagcctgagaaggcccccgggccccagcatgggccccgagccttggaggagcactggcagttggtggcagtgagaccagccaccaccaccaccacagaaaagcacaaacctctgggaaagacaacgtctctcgggggccaggggtcatcggtttgacccctgacctataagccaagataccccataaacacactcagaaagcagagaaaaaggacaagagtctgtgtttgagagggggtctgccattcctgcttggggactggtggggaagagggccaggacatcttctgagccaggacgtccctgaggctccacctccaagctcagacagggcccaggcttggggaacagagagagcaggtgtacacccaaccaaagtgattgtgcccttggttggggggcgcgggcatataacctgtcagaagcaaacaggagcggcaacttctaactttgctccaagccactctctttttaaacagcaacaatttaaagctatgaagtcacctggagaaaaggaacgttgctcttggacagcaagcaaaccatttctctccgtctgttctgtttttctcctagtccctctcctgccacctctccaagacttccgtgggacacccacttccctctgtcctagttctctttgtccaatcagatggcaagggcagtgcgtggaaaggccggggaggtgcagaaaccagagcccagggcaatggtgtctgtccagcccctccctctgtccctgtgctccaagctgcccccggctgcagcccaggccatggacatgtgcaccagtatgtacctgcaggcatgggggggaggggggcgtgtttctgggcctgccccagacactgcccttggctgccagcctaccctgcctgcactcctccaccatcacaatctcacccaaactcctgctcactcaagcaaaagcagcctctggccttccctccaccgctttgctccatctggcttaccactctccagggcctcctggggagcctgtcctgtgttcactttgtttcaggctggtctgtgccccgtgagccacatggcctagggtgatgccaggttgtcccgtcactggggtcccatctgtaaattctttgcgcccttcccggctgctgcctggggccctttcctgctctcccgtccgctgtgggtggtccccagcactcctctgtgggttttaccggaaaggtggccccagctgttgacttccagtcactgtcccagacggcacaaggttttctgtaggaaagctgccattgccccggccccttttcttcctttgtcccgttgtcgaggttttttcaaatagcgtgttgttcagtatgcaaatcaattattttaagaatcgcttttgtaaatatctttgtgaatattttagtatcgtctttgataatattcaacattttcatgacctggttatagcctttgctggtgtttttaaaatacctggactcaatgacaaagaccgagtcttctttttttttaaacaaaaacaaaaaaagcaaccagggctatttgtacagttgaaggggtgaacagaatgggcggctgtgctgggagttggaagaccgggcagcccgctatttagagccatccctcagtcagctggcagggacaagccaacgccaggtagcatgtggccacccttgcccagtgtctgtggcctggcaagtggccacgccctgtgtcagaccatctgggaattaagctccagacagacttacagatgccttccttaggagttcttgcttcttgcgttgatactttgccccagaaaggcctgggattcattctggttcttatcagggtgtgtccacactctgctcacaggtggatccacggctttccagtgcggagagtcgagatgctccctgcagcccaggccccgggcacctcctgcaaccatctctgggctcagcacctgaggcgggtttcctgggtcccctctccagcaagcctccaccagcaagctcggcccagagcttcccttccggctggctctgaaccgtgcgtggtgcctacagcctgcagtctggagacaagctcttccggagtgctctgggagccaggccagggtgtgagggaggtgcagaggcatccggggcgggagcaagccccaggttgtgacaggtgcaggtagacaacgcccataaacagagatggtcctgaactctggagagatccttccctgatcctttcggacgactacttggagccataagtaacctcagcaaaaacgaggcctctgcaagccacttttccatgccaagcatccacccggcccacaggcatgtttctgccgccactccgcaagatggacagggagccagcaggcaggcgggaagggccaagtacaggcaatcacccccatcttcttggtttgaagctttatccatgtatcatgttccgtgtagccattttattttttaagaaactgctaatactttctccctaatggaagccctgatcccccagagagctacaggtctgctcccgacgggcctcgggcctgacccgtccacacagggccgtgtcaacagcagcgactcaagggacgtgtgtacatatgtaaatgagaaatagagacgtgtcaacagatgcattcatttctcttggaatgtgtattgtttttattttgcgaaacaaaacaaaacaaaaaaaaaagcttggaactccatcacgtggaaaaactagatcctgttggttatagcatttgtgagttctccacgtctgtctctctcgctcatgtaatatactctgaccctgagtggaaaggggtttttgttctgtttttattttacctacatgtactatttagcttcagtgtactagtcctgccacctgtgtatttttagggtgctatggaaataatgaaaagaaacggggatttcagaagaaaattgtaaccaaattcatactttgtataatttttgatatcatgatcacaggtgattcacacgtacacacataaacacacccaccagtgcagcctgaagtaactcccacagaaaccatcatcgtctttgtacatcgtatgtacaatgcaatcatttcatactttaaactggtcaaaaaactaattgtgatttctagtcttgcaaagctgtatgtagttagatgatgtgacaacctctaatatttatctaataaatatgtattcagatgaaacctgtatattaggtgttcatgtggttattttgtatttaaagatcaaattatttgactattgctagacatttctatactctgttgtaacactgaggtatctcatttgcccatgttaatttttttctaaataaattgacaaaaacaaaaaaat

SEQ ID NO: 403280 - DNA, 7358 bp, Homo sapiens
atcgtgccggagatcgcgccattgcactccagcctaggtgacaagagcaaaactccatctcaaaaaaaagaaaagagaagaaatgtgtgcacctgcatgtgcagttccttatcccctggtgggcatgcctgcccagtgctcacatgtgccacacatggaaagcacccagaagcatttcctgccctcagcccagtggggtaccccaggtgcagccccacagggcccagcaaaggactctggaacctgccagtgttgtggccagagggcagttgggaggctgctcaaggttggcaggcctggcgtgatccagtgacaacctctcctttctcttcgcaggctggacaacgttcatggctctcgggtagaacctagtgaaacggccagaatgaattctatggacaggcacatccagcagaccaatgaccgactgcagtgcatcaagcagcacttacagaatcctgccaacttccacaatgccgccacggagctgctggactggtgcggagacccacgggccttccagcggcccttcgagcagagcctgatgggctgtttgacggtggtcagtcgggtggcagcccagcaaggctttgacctggacctcggctacagactgctggctgtgtgtgctgcaaaccgagacaagttcaccccgaagtctgccgccttgttgtcctcctggtgcgaagagctcggccgcctgctgctgctccgacatcagaagagccgccagagcgatccccctgggaaactccccatgcagccccctctcagctccatgagctccatgaaacccactctgtcgcacagtgatgggtcgttcccctatgactctgtcccttggcagcagaacaccaaccagcctcccggctccctttccgtggtcaccacggtttggggagtaaccaacacatcccagagccaggtccttgggaaccctatggccaatgccaacaaccccatgaatccaggcggcaaccccatggcgtcgggcatgaccaccagcaacccaggcctcaactccccacagtttgcggggcagcagcagcagttctcagccaaggctggccccgctcagccctacatccagcagagcatgtatggccggcccaactaccccggcagcgggggctttggggccagttaccctgggggtcctaacgcccccgcaggcatgggcatccctccgcacaccaggccgcctgctgacttcactcagcccgcggcagccgctgcagcagcggcagtggcagcagcagcagccacagctacagccacagccacggccactgtggcagccctgcaggagacacagaacaaggatataaaccagtatggaccgatgggtcccacccaggcgtataacagccaattcatgaaccagcccgggccgcgggggcctgcctccatggggggcagcatgaaccccgcgagcatggcggctggcatgacgccctcggggatgagcggccctcccatgggcatgaaccagccccggccgcccggcatcagcccctttggcacacacgggcagcggatgccccagcagacctacccgggcccccggccccagtcccttcctattcagaacataaagaggccataccctggagagcccaactatggaaaccagcaatatggaccaaacagccagttccccacccagccaggccagtacccagcccccaaccccccgaggccactcacctcccccaactacccaggacagaggatgcccagccagccgagctccgggcagtacccgccccccacggtcaacatggggcagtattacaagccagaacagtttaatggacaaaataacacgttctcgggaagcagctacagtaactacagccaagggaatgtcaacaggcctcccaggccggttcctgtggcaaattacccccactcacctgttccagggaaccccacaccccccatgacccctgggagcagcatccctccatacctgtcccccagccaagacgtcaaaccacccttcccgcctgacatcaagccaaatatgagcgctctgccaccaacccccagccaaccacaatgacgagctgcggctcacattccctgtgcgggatggcgtggtgctggagcccttccgcctggagcacaacctggcggtcagcaaccatgtgttccacctgcggcccacggtccaccagacgctgatgtggaggtctgacctggagctgcagttcaagtgctaccaccacgaggaccggcagatgaacaccaactggcccgcctcggtgcaggtcagcgtgaacgccacgcccctcaccattgagcgcggcgacaacaagacctcccacaagcccctgcacctgaagcacgtgtgccagccgggccgcaacaccatccagatcaccgtcacggcctgctgctgctcccacctcttcgtgctgcagctggtacaccggccctccgtccgctctgtgctgcaaggactcctcaagaagcgcctcctgcccgcagagcactgtatcacgaaaatcaagcggaatttcagcagcgtggctgcctcctcgggcaacacgaccctcaacggggaggatggggtggagcagacggccatcaaggtgtctctgaagtgccccatcacattccggcgcatccagctgcctgctcgaggacacgattgcaagcatgtgcagtgctttgatctggagtcatacctgcagctgaattgcgagagagggacctggaggtgtcctgtgtgcaataaaaccgctctgctggagggcctggaggtggatcagtacatgtggggaatcctgaatgccatccaacactccgagtttgaagaggtcaccatcgatcccacgtgcagctggcggccggtgcccatcaagtcggacttacacatcaaggacgaccctgatggcatcccctccaagcggttcaagaccatgagtcccagccagatgatcatgcccaatgtcatggagatgatcgcagccctgggccccggcccgtccccctatcccctcccgcctcccccagggggcaccaactccaacgactacagcagccaaggcaacaactaccaaggccatggcaactttgacttcccccacgggaaccctggagggacatccatgaatgacttcatgcacgggcccccccagctctcccaccccccggacatgcccaacaacatggccgccctcgagaaacccctcagccaccccatgcaggaaactatgccacacgctggcagctctgaccagccccacccctccatacaacaaggtttgcacgtaccacaccccagcagccagtcaggcctccattacatcacagtggggctcctcctcctcctccttcccagcctccccggcagccgccacaggccgctcccagcagccatccacacagcgacctgacctttaacccctcctcagccttagagggtcaggccggagcgcagggagcgtccgacatgccggagccttcgctggatctccttcccgaactcacaaatcctgacgagctcctgtcttatctggacccccccgacctgccgagcaatagtaacgatgacctcctgtctctatttgagaacaactgagggccacccggtcggggccatccctccacactctgcatcctaccccacctacccaacacacttttccacctgggagcctgtgccctcagaccgccccgcaccagagccacgggctgtggggcggggagccctcccccgctgcagccctctcagaacagaggggtagggagggtgcaccagtgcaccaggaaggctgtgtgggtctggagcccacgtcccacctccacacccttggcttgggcccatgcccagcgcaggcctgaagaccaccctcccgagaggaaccagcccggtaagagggcacacgctgatgcggcttcccggtccctccgcgtgtgccgattccagatgaccttccagtgtccccaaggttcttccatcttctagactgtaaccctgcctccctgcttcctggtccagagcctccctccagtgactgtggagcctgagaaggcccccgggccccagcatgggccccgagccttggaggagcactggcagttggtggcagtgagaccagccaccaccaccaccacagaaaagcacaaacctctgggaaagacaacgtctctcgggggccaggggtcatcggtttgacccctgacctataagccaagataccccataaacacactcagaaagcagagaaaaaggacaagagtctgtgtttgagagggggtctgccattcctgcttggggactggtggggaagagggccaggacatcttctgagccaggacgtccctgaggctccacctccaagctcagacagggcccaggcttggggaacagagagagcaggtgtacacccaaccaaagtgattgtgcccttggttggggggcgcgggcatataacctgtcagaagcaaacaggagcggcaacttctaactttgctccaagccactctctttttaaacagcaacaatttaaagctatgaagtcacctggagaaaaggaacgttgctcttggacagcaagcaaaccatttctctccgtctgttctgtttttctcctagtccctctcctgccacctctccaagacttccgtgggacacccacttccctctgtcctagttctctttgtccaatcagatggcaagggcagtgcgtggaaaggccggggaggtgcagaaaccagagcccagggcaatggtgtctgtccagcccctccctctgtccctgtgctccaagctgcccccggctgcagcccaggccatggacatgtgcaccagtatgtacctgcaggcatgggggggaggggggcgtgtttctgggcctgccccagacactgcccttggctgccagcctaccctgcctgcactcctccaccatcacaatctcacccaaactcctgctcactcaagcaaaagcagcctctggccttccctccaccgctttgctccatctggcttaccactctccagggcctcctggggagcctgtcctgtgttcactttgtttcaggctggtctgtgccccgtgagccacatggcctagggtgatgccaggttgtcccgtcactggggtcccatctgtaaattctttgcgcccttcccggctgctgcctggggccctttcctgctctcccgtccgctgtgggtggtccccagcactcctctgtgggttttaccggaaaggtggccccagctgttgacttccagtcactgtcccagacggcacaaggttttctgtaggaaagctgccattgccccggccccttttcttcctttgtcccgttgtcgaggttttttcaaatagcgtgttgttcagtatgcaaatcaattattttaagaatcgcttttgtaaatatctttgtgaatattttagtatcgtctttgataatattcaacattttcatgacctggttatagcctttgctggtgtttttaaaatacctggactcaatgacaaagaccgagtcttctttttttttaaacaaaaacaaaaaaagcaaccagggctatttgtacagttgaaggggtgaacagaatgggcggctgtgctgggagttggaagaccgggcagcccgctatttagagccatccctcagtcagctggcagggacaagccaacgccaggtagcatgtggccacccttgcccagtgtctgtggcctggcaagtggccacgccctgtgtcagaccatctgggaattaagctccagacagacttacagatgccttccttaggagttcttgcttcttgcgttgatactttgccccagaaaggcctgggattcattctggttcttatcagggtgtgtccacactctgctcacaggtggatccacggctttccagtgcggagagtcgagatgctccctgcagcccaggccccgggcacctcctgcaaccatctctgggctcagcacctgaggcgggtttcctgggtcccctctccagcaagcctccaccagcaagctcggcccagagcttcccttccggctggctctgaaccgtgcgtggtgcctacagcctgcagtctggagacaagctcttccggagtgctctgggagccaggccagggtgtgagggaggtgcagaggcatccggggcgggagcaagccccaggttgtgacaggtgcaggtagacaacgcccataaacagagatggtcctgaactctggagagatccttccctgatcctttcggacgactacttggagccataagtaacctcagcaaaaacgaggcctctgcaagccacttttccatgccaagcatccacccggcccacaggcatgtttctgccgccactccgcaagatggacagggagccagcaggcaggcgggaagggccaagtacaggcaatcacccccatcttcttggtttgaagctttatccatgtatcatgttccgtgtagccattttattttttaagaaactgctaatactttctccctaatggaagccctgatcccccagagagctacaggtctgctcccgacgggcctcgggcctgacccgtccacacagggccgtgtcaacagcagcgactcaagggacgtgtgtacatatgtaaatgagaaatagagacgtgtcaacagatgcattcatttctcttggaatgtgtattgtttttattttgcgaaacaaaacaaaacaaaaaaaaaagcttggaactccatcacgtggaaaaactagatcctgttggttatagcatttgtgagttctccacgtctgtctctctcgctcatgtaatatactctgaccctgagtggaaaggggtttttgttctgtttttattttacctacatgtactatttagcttcagtgtactagtcctgccacctgtgtatttttagggtgctatggaaataatgaaaagaaacggggatttcagaagaaaattgtaaccaaattcatactttgtataatttttgatatcatgatcacaggtgattcacacgtacacacataaacacacccaccagtgcagcctgaagtaactcccacagaaaccatcatcgtctttgtacatcgtatgtacaatgcaatcatttcatactttaaactggtcaaaaaactaattgtgatttctagtcttgcaaagctgtatgtagttagatgatgtgacaacctctaatatttatctaataaatatgtattcagatgaaacctgtatattaggtgttcatgtggttattttgtatttaaagatcaaattatttgactattgctagacatttctatactctgttgtaacactgaggtatctcatttgcccatgttaatttttttctaaataaattgacaaaaacaaaaaaat

SEQ ID NO: 403281 - DNA, 7398 bp, Homo sapiens
  misc_feature (14)..(14): n is a, c, g, or t
  misc_feature (136)..(138): n is a, c, g, or t
  misc_feature (149)..(150): n is a, c, g, or t
  misc_feature (161)..(163): n is a, c, g, or t
  misc_feature (166)..(166): n is a, c, g, or t
cgggcgccgggaancgggcggccgggcggcaggcgggcgagcagcgatcgggcggccgagcgagcgagcaacgccggcgcagcgcggtgaccccagccccagccggcgcggagcaggagccggagccgagcggatnnnggcgccctcgnngcgctcctccnnnccngagcctgccctacccggcggtggcggcggcgcgtcctccagcggcggcagcggcgctcgcagcgcccggactcacggcagctgtgttctgatttcgtactactgctggggctgccacctcctcctccagacgctctcagcagacttgagtcctggtccttctgcagaggcctgagcaggaggaagaggaggaggcccgttggcgtcggaccaatgctgcaaggggtgtgaggagaggagccgctgtttttcactgagctgccataccccgaaagcaggatggagctggagtgaggtggaggggccgcaagctgctgaccggcgtgtgggacactggtggtttgcagatcactgaggctggacaacgttcatggctctcgggtagaacctagtgaaacggccagaatgaattctatggacaggcacatccagcagaccaatgaccgactgcagtgcatcaagcagcacttacagaatcctgccaacttccacaatgccgccacggagctgctggactggtgcggagacccacgggccttccagcggcccttcgagcagagcctgatgggctgtttgacggtggtcagtcgggtggcagcccagcaaggctttgacctggacctcggctacagactgctggctgtgtgtgctgcaaaccgagacaagttcaccccgaagtctgccgccttgttgtcctcctggtgcgaagagctcggccgcctgctgctgctccgacatcagaagagccgccagagcgatccccctgggaaactccccatgcagccccctctcagctccatgagctccatgaaacccactctgtcgcacagtgatgggtcgttcccctatgactctgtcccttggcagcagaacaccaaccagcctcccggctccctttccgtggtcaccacggtttggggagtaaccaacacatcccagagccaggtccttgggaaccctatggccaatgccaacaaccccatgaatccaggcggcaaccccatggcgtcgggcatgaccaccagcaacccaggcctcaactccccacagtttgcggggcagcagcagcagttctcagccaaggctggccccgctcagccctacatccagcagagcatgtatggccggcccaactaccccggcagcgggggctttggggccagttaccctgggggtcctaacgcccccgcaggcatgggcatccctccgcacaccaggccgcctgctgacttcactcagcccgcggcagccgctgcagcagcggcagtggcagcagcagcagccacagctacagccacagccacggccactgtggcagccctgcaggagacacagaacaaggatataaaccagtatggaccgatgggtcccacccaggcgtataacagccaattcatgaaccagcccgggccgcgggggcctgcctccatggggggcagcatgaaccccgcgagcatggcggctggcatgacgccctcggggatgagcggccctcccatgggcatgaaccagccccggccgcccggcatcagcccctttggcacacacgggcagcggatgccccagcagacctacccgggcccccggccccagtcccttcctattcagaacataaagaggccataccctggagagcccaactatggaaaccagcaatatggaccaaacagccagttccccacccagccaggccagtacccagcccccaaccccccgaggccactcacctcccccaactacccaggacagaggatgcccagccagccgagctccgggcagtacccgccccccacggtcaacatggggcagtattacaagccagaacagtttaatggacaaaataacacgttctcgggaagcagctacagtaactacagccaagggaatgtcaacaggcctcccaggccggttcctgtggcaaattacccccactcacctgttccagggaaccccacaccccccatgacccctgggagcagcatccctccatacctgtcccccagccaagacgtcaaaccacccttcccgcctgacatcaagccaaatatgagcgctctgccaccaacccccagccaaccacaatgacgagctgcggctcacattccctgtgcgggatggcgtggtgctggagcccttccgcctggagcacaacctggcggtcagcaaccatgtgttccacctgcggcccacggtccaccagacgctgatgtggaggtctgacctggagctgcagttcaagtgctaccaccacgaggaccggcagatgaacaccaactggcccgcctcggtgcaggtcagcgtgaacgccacgcccctcaccattgagcgcggcgacaacaagacctcccacaagcccctgcacctgaagcacgtgtgccagccgggccgcaacaccatccagatcaccgtcacggcctgctgctgctcccacctcttcgtgctgcagctggtacaccggccctccgtccgctctgtgctgcaaggactcctcaagaagcgcctcctgcccgcagagcactgtatcacgaaaatcaagcggaatttcagcagcgtggctgcctcctcgggcaacacgaccctcaacggggaggatggggtggagcagacggccatcaaggtgtctctgaagtgccccatcacattccggcgcatccagctgcctgctcgaggacacgattgcaagcatgtgcagtgctttgatctggagtcatacctgcagctgaattgcgagagagggacctggaggtgtcctgtgtgcaataaaaccgctctgctggagggcctggaggtggatcagtacatgtggggaatcctgaatgccatccaacactccgagtttgaagaggtcaccatcgatcccacgtgcagctggcggccggtgcccatcaagtcggacttacacatcaaggacgaccctgatggcatcccctccaagcggttcaagaccatgagtcccagccagatgatcatgcccaatgtcatggagatgatcgcagccctgggccccggcccgtccccctatcccctcccgcctcccccagggggcaccaactccaacgactacagcagccaaggcaacaactaccaaggccatggcaactttgacttcccccacgggaaccctggagggacatccatgaatgacttcatgcacgggcccccccagctctcccaccccccggacatgcccaacaacatggccgccctcgagaaacccctcagccaccccatgcaggaaactatgccacacgctggcagctctgaccagccccacccctccatacaacaaggtttgcacgtaccacaccccagcagccagtcaggcctccattacatcacagtggggctcctcctcctcctccttcccagcctccccggcagccgccacaggccgctcccagcagccatccacacagcgacctgacctttaacccctcctcagccttagagggtcaggccggagcgcagggagcgtccgacatgccggagccttcgctggatctccttcccgaactcacaaatcctgacgagctcctgtcttatctggacccccccgacctgccgagcaatagtaacgatgacctcctgtctctatttgagaacaactgagggccacccggtcggggccatccctccacactctgcatcctaccccacctacccaacacacttttccacctgggagcctgtgccctcagaccgccccgcaccagagccacgggctgtggggcggggagccctcccccgctgcagccctctcagaacagaggggtagggagggtgcaccagtgcaccaggaaggctgtgtgggtctggagcccacgtcccacctccacacccttggcttgggcccatgcccagcgcaggcctgaagaccaccctcccgagaggaaccagcccggtaagagggcacacgctgatgcggcttcccggtccctccgcgtgtgccgattccagatgaccttccagtgtccccaaggttcttccatcttctagactgtaaccctgcctccctgcttcctggtccagagcctccctccagtgactgtggagcctgagaaggcccccgggccccagcatgggccccgagccttggaggagcactggcagttggtggcagtgagaccagccaccaccaccaccacagaaaagcacaaacctctgggaaagacaacgtctctcgggggccaggggtcatcggtttgacccctgacctataagccaagataccccataaacacactcagaaagcagagaaaaaggacaagagtctgtgtttgagagggggtctgccattcctgcttggggactggtggggaagagggccaggacatcttctgagccaggacgtccctgaggctccacctccaagctcagacagggcccaggcttggggaacagagagagcaggtgtacacccaaccaaagtgattgtgcccttggttggggggcgcgggcatataacctgtcagaagcaaacaggagcggcaacttctaactttgctccaagccactctctttttaaacagcaacaatttaaagctatgaagtcacctggagaaaaggaacgttgctcttggacagcaagcaaaccatttctctccgtctgttctgtttttctcctagtccctctcctgccacctctccaagacttccgtgggacacccacttccctctgtcctagttctctttgtccaatcagatggcaagggcagtgcgtggaaaggccggggaggtgcagaaaccagagcccagggcaatggtgtctgtccagcccctccctctgtccctgtgctccaagctgcccccggctgcagcccaggccatggacatgtgcaccagtatgtacctgcaggcatgggggggaggggggcgtgtttctgggcctgccccagacactgcccttggctgccagcctaccctgcctgcactcctccaccatcacaatctcacccaaactcctgctcactcaagcaaaagcagcctctggccttccctccaccgctttgctccatctggcttaccactctccagggcctcctggggagcctgtcctgtgttcactttgtttcaggctggtctgtgccccgtgagccacatggcctagggtgatgccaggttgtcccgtcactggggtcccatctgtaaattctttgcgcccttcccggctgctgcctggggccctttcctgctctcccgtccgctgtgggtggtccccagcactcctctgtgggttttaccggaaaggtggccccagctgttgacttccagtcactgtcccagacggcacaaggttttctgtaggaaagctgccattgccccggccccttttcttcctttgtcccgttgtcgaggttttttcaaatagcgtgttgttcagtatgcaaatcaattattttaagaatcgcttttgtaaatatctttgtgaatattttagtatcgtctttgataatattcaacattttcatgacctggttatagcctttgctggtgtttttaaaatacctggactcaatgacaaagaccgagtcttctttttttttaaacaaaaacaaaaaaagcaaccagggctatttgtacagttgaaggggtgaacagaatgggcggctgtgctgggagttggaagaccgggcagcccgctatttagagccatccctcagtcagctggcagggacaagccaacgccaggtagcatgtggccacccttgcccagtgtctgtggcctggcaagtggccacgccctgtgtcagaccatctgggaattaagctccagacagacttacagatgccttccttaggagttcttgcttcttgcgttgatactttgccccagaaaggcctgggattcattctggttcttatcagggtgtgtccacactctgctcacaggtggatccacggctttccagtgcggagagtcgagatgctccctgcagcccaggccccgggcacctcctgcaaccatctctgggctcagcacctgaggcgggtttcctgggtcccctctccagcaagcctccaccagcaagctcggcccagagcttcccttccggctggctctgaaccgtgcgtggtgcctacagcctgcagtctggagacaagctcttccggagtgctctgggagccaggccagggtgtgagggaggtgcagaggcatccggggcgggagcaagccccaggttgtgacaggtgcaggtagacaacgcccataaacagagatggtcctgaactctggagagatccttccctgatcctttcggacgactacttggagccataagtaacctcagcaaaaacgaggcctctgcaagccacttttccatgccaagcatccacccggcccacaggcatgtttctgccgccactccgcaagatggacagggagccagcaggcaggcgggaagggccaagtacaggcaatcacccccatcttcttggtttgaagctttatccatgtatcatgttccgtgtagccattttattttttaagaaactgctaatactttctccctaatggaagccctgatcccccagagagctacaggtctgctcccgacgggcctcgggcctgacccgtccacacagggccgtgtcaacagcagcgactcaagggacgtgtgtacatatgtaaatgagaaatagagacgtgtcaacagatgcattcatttctcttggaatgtgtattgtttttattttgcgaaacaaaacaaaacaaaaaaaaaagcttggaactccatcacgtggaaaaactagatcctgttggttatagcatttgtgagttctccacgtctgtctctctcgctcatgtaatatactctgaccctgagtggaaaggggtttttgttctgtttttattttacctacatgtactatttagcttcagtgtactagtcctgccacctgtgtatttttagggtgctatggaaataatgaaaagaaacggggatttcagaagaaaattgtaaccaaattcatactttgtataatttttgatatcatgatcacaggtgattcacacgtacacacataaacacacccaccagtgcagcctgaagtaactcccacagaaaccatcatcgtctttgtacatcgtatgtacaatgcaatcatttcatactttaaactggtcaaaaaactaattgtgatttctagtcttgcaaagctgtatgtagttagatgatgtgacaacctctaatatttatctaataaatatgtattcagatgaaacctgta

SEQ ID NO: 403282 - DNA, 7438 bp, Homo sapiens
  misc_feature (14)..(14): n is a, c, g, or t
  misc_feature (136)..(138): n is a, c, g, or t
  misc_feature (149)..(150): n is a, c, g, or t
  misc_feature (161)..(163): n is a, c, g, or t
  misc_feature (166)..(166): n is a, c, g, or t
cgggcgccgggaancgggcggccgggcggcaggcgggcgagcagcgatcgggcggccgagcgagcgagcaacgccggcgcagcgcggtgaccccagccccagccggcgcggagcaggagccggagccgagcggatnnnggcgccctcgnngcgctcctccnnnccngagcctgccctacccggcggtggcggcggcgcgtcctccagcggcggcagcggcgctcgcagcgcccggactcacggcagctgtgttctgatttcgtactactgctggggctgccacctcctcctccagacgctctcagcagacttgagtcctggtccttctgcagaggcctgagcaggaggaagaggaggaggcccgttggcgtcggaccaatgctgcaaggggtgtgaggagaggagccgctgtttttcactgagctgccataccccgaaagcaggatggagctggagtgaggtggaggggccgcaagctgctgaccggcgtgtgggacactggtggtttgcagatcactgaggctggacaacgttcatggctctcgggtagaacctagtgaaacggccagaatgaattctatggacaggcacatccagcagaccaatgaccgactgcagtgcatcaagcagcacttacagaatcctgccaacttccacaatgccgccacggagctgctggactggtgcggagacccacgggccttccagcggcccttcgagcagagcctgatgggctgtttgacggtggtcagtcgggtggcagcccagcaaggctttgacctggacctcggctacagactgctggctgtgtgtgctgcaaaccgagacaagttcaccccgaagtctgccgccttgttgtcctcctggtgcgaagagctcggccgcctgctgctgctccgacatcagaagagccgccagagcgatccccctgggaaactccccatgcagccccctctcagctccatgagctccatgaaacccactctgtcgcacagtgatgggtcgttcccctatgactctgtcccttggcagcagaacaccaaccagcctcccggctccctttccgtggtcaccacggtttggggagtaaccaacacatcccagagccaggtccttgggaaccctatggccaatgccaacaaccccatgaatccaggcggcaaccccatggcgtcgggcatgaccaccagcaacccaggcctcaactccccacagtttgcggggcagcagcagcagttctcagccaaggctggccccgctcagccctacatccagcagagcatgtatggccggcccaactaccccggcagcgggggctttggggccagttaccctgggggtcctaacgcccccgcaggcatgggcatccctccgcacaccaggccgcctgctgacttcactcagcccgcggcagccgctgcagcagcggcagtggcagcagcagcagccacagctacagccacagccacggccactgtggcagccctgcaggagacacagaacaaggatataaaccagtatggaccgatgggtcccacccaggcgtataacagccaattcatgaaccagcccgggccgcgggggcctgcctccatggggggcagcatgaaccccgcgagcatggcggctggcatgacgccctcggggatgagcggccctcccatgggcatgaaccagccccggccgcccggcatcagcccctttggcacacacgggcagcggatgccccagcagacctacccgggcccccggccccagtcccttcctattcagaacataaagaggccataccctggagagcccaactatggaaaccagcaatatggaccaaacagccagttccccacccagccaggccagtacccagcccccaaccccccgaggccactcacctcccccaactacccaggacagaggatgcccagccagccgagctccgggcagtacccgccccccacggtcaacatggggcagtattacaagccagaacagtttaatggacaaaataacacgttctcgggaagcagctacagtaactacagccaagggaatgtcaacaggcctcccaggccggttcctgtggcaaattacccccactcacctgttccagggaaccccacaccccccatgacccctgggagcagcatccctccatacctgtcccccagccaagacgtcaaaccacccttcccgcctgacatcaagccaaatatgagcgctctgccaccaacccccagccaaccacaatgacgagctgcggctcacattccctgtgcgggatggcgtggtgctggagcccttccgcctggagcacaacctggcggtcagcaaccatgtgttccacctgcggcccacggtccaccagacgctgatgtggaggtctgacctggagctgcagttcaagtgctaccaccacgaggaccggcagatgaacaccaactggcccgcctcggtgcaggtcagcgtgaacgccacgcccctcaccattgagcgcggcgacaacaagacctcccacaagcccctgcacctgaagcacgtgtgccagccgggccgcaacaccatccagatcaccgtcacggcctgctgctgctcccacctcttcgtgctgcagctggtacaccggccctccgtccgctctgtgctgcaaggactcctcaagaagcgcctcctgcccgcagagcactgtatcacgaaaatcaagcggaatttcagcagcgtggctgcctcctcgggcaacacgaccctcaacggggaggatggggtggagcagacggccatcaaggtgtctctgaagtgccccatcacattccggcgcatccagctgcctgctcgaggacacgattgcaagcatgtgcagtgctttgatctggagtcatacctgcagctgaattgcgagagagggacctggaggtgtcctgtgtgcaataaaaccgctctgctggagggcctggaggtggatcagtacatgtggggaatcctgaatgccatccaacactccgagtttgaagaggtcaccatcgatcccacgtgcagctggcggccggtgcccatcaagtcggacttacacatcaaggacgaccctgatggcatcccctccaagcggttcaagaccatgagtcccagccagatgatcatgcccaatgtcatggagatgatcgcagccctgggccccggcccgtccccctatcccctcccgcctcccccagggggcaccaactccaacgactacagcagccaaggcaacaactaccaaggccatggcaactttgacttcccccacgggaaccctggagggacatccatgaatgacttcatgcacgggcccccccagctctcccaccccccggacatgcccaacaacatggccgccctcgagaaacccctcagccaccccatgcaggaaactatgccacacgctggcagctctgaccagccccacccctccatacaacaaggtttgcacgtaccacaccccagcagccagtcaggcctccattacatcacagtggggctcctcctcctcctccttcccagcctccccggcagccgccacaggccgctcccagcagccatccacacagcgacctgacctttaacccctcctcagccttagagggtcaggccggagcgcagggagcgtccgacatgccggagccttcgctggatctccttcccgaactcacaaatcctgacgagctcctgtcttatctggacccccccgacctgccgagcaatagtaacgatgacctcctgtctctatttgagaacaactgagggccacccggtcggggccatccctccacactctgcatcctaccccacctacccaacacacttttccacctgggagcctgtgccctcagaccgccccgcaccagagccacgggctgtggggcggggagccctcccccgctgcagccctctcagaacagaggggtagggagggtgcaccagtgcaccaggaaggctgtgtgggtctggagcccacgtcccacctccacacccttggcttgggcccatgcccagcgcaggcctgaagaccaccctcccgagaggaaccagcccggtaagagggcacacgctgatgcggcttcccggtccctccgcgtgtgccgattccagatgaccttccagtgtccccaaggttcttccatcttctagactgtaaccctgcctccctgcttcctggtccagagcctccctccagtgactgtggagcctgagaaggcccccgggccccagcatgggccccgagccttggaggagcactggcagttggtggcagtgagaccagccaccaccaccaccacagaaaagcacaaacctctgggaaagacaacgtctctcgggggccaggggtcatcggtttgacccctgacctataagccaagataccccataaacacactcagaaagcagagaaaaaggacaagagtctgtgtttgagagggggtctgccattcctgcttggggactggtggggaagagggccaggacatcttctgagccaggacgtccctgaggctccacctccaagctcagacagggcccaggcttggggaacagagagagcaggtgtacacccaaccaaagtgattgtgcccttggttggggggcgcgggcatataacctgtcagaagcaaacaggagcggcaacttctaactttgctccaagccactctctttttaaacagcaacaatttaaagctatgaagtcacctggagaaaaggaacgttgctcttggacagcaagcaaaccatttctctccgtctgttctgtttttctcctagtccctctcctgccacctctccaagacttccgtgggacacccacttccctctgtcctagttctctttgtccaatcagatggcaagggcagtgcgtggaaaggccggggaggtgcagaaaccagagcccagggcaatggtgtctgtccagcccctccctctgtccctgtgctccaagctgcccccggctgcagcccaggccatggacatgtgcaccagtatgtacctgcaggcatgggggggaggggggcgtgtttctgggcctgccccagacactgcccttggctgccagcctaccctgcctgcactcctccaccatcacaatctcacccaaactcctgctcactcaagcaaaagcagcctctggccttccctccaccgctttgctccatctggcttaccactctccagggcctcctggggagcctgtcctgtgttcactttgtttcaggctggtctgtgccccgtgagccacatggcctagggtgatgccaggttgtcccgtcactggggtcccatctgtaaattctttgcgcccttcccggctgctgcctggggccctttcctgctctcccgtccgctgtgggtggtccccagcactcctctgtgggttttaccggaaaggtggccccagctgttgacttccagtcactgtcccagacggcacaaggttttctgtaggaaagctgccattgccccggccccttttcttcctttgtcccgttgtcgaggttttttcaaatagcgtgttgttcagtatgcaaatcaattattttaagaatcgcttttgtaaatatctttgtgaatattttagtatcgtctttgataatattcaacattttcatgacctggttatagcctttgctggtgtttttaaaatacctggactcaatgacaaagaccgagtcttctttttttttaaacaaaaacaaaaaaagcaaccagggctatttgtacagttgaaggggtgaacagaatgggcggctgtgctgggagttggaagaccgggcagcccgctatttagagccatccctcagtcagctggcagggacaagccaacgccaggtagcatgtggccacccttgcccagtgtctgtggcctggcaagtggccacgccctgtgtcagaccatctgggaattaagctccagacagacttacagatgccttccttaggagttcttgcttcttgcgttgatactttgccccagaaaggcctgggattcattctggttcttatcagggtgtgtccacactctgctcacaggtggatccacggctttccagtgcggagagtcgagatgctccctgcagcccaggccccgggcacctcctgcaaccatctctgggctcagcacctgaggcgggtttcctgggtcccctctccagcaagcctccaccagcaagctcggcccagagcttcccttccggctggctctgaaccgtgcgtggtgcctacagcctgcagtctggagacaagctcttccggagtgctctgggagccaggccagggtgtgagggaggtgcagaggcatccggggcgggagcaagccccaggttgtgacaggtgcaggtagacaacgcccataaacagagatggtcctgaactctggagagatccttccctgatcctttcggacgactacttggagccataagtaacctcagcaaaaacgaggcctctgcaagccacttttccatgccaagcatccacccggcccacaggcatgtttctgccgccactccgcaagatggacagggagccagcaggcaggcgggaagggccaagtacaggcaatcacccccatcttcttggtttgaagctttatccatgtatcatgttccgtgtagccattttattttttaagaaactgctaatactttctccctaatggaagccctgatcccccagagagctacaggtctgctcccgacgggcctcgggcctgacccgtccacacagggccgtgtcaacagcagcgactcaagggacgtgtgtacatatgtaaatgagaaatagagacgtgtcaacagatgcattcatttctcttggaatgtgtattgtttttattttgcgaaacaaaacaaaacaaaaaaaaaagcttggaactccatcacgtggaaaaactagatcctgttggttatagcatttgtgagttctccacgtctgtctctctcgctcatgtaatatactctgaccctgagtggaaaggggtttttgttctgtttttattttacctacatgtactatttagcttcagtgtactagtcctgccacctgtgtatttttagggtgctatggaaataatgaaaagaaacggggatttcagaagaaaattgtaaccaaattcatactttgtataatttttgatatcatgatcacaggtgattcacacgtacacacataaacacacccaccagtgcagcctgaagtaactcccacagaaaccatcatcgtctttgtacatcgtatgtacaatgcaatcatttcatactttaaactggtcaaaaaactaattgtgatttctagtcttgcaaagctgtatgtagttagatgatgtgacaacctctaatatttatctaataaatatgtattcagatgaaacctgtaaaaaaaaaaaaaaaaacccctttccactcagggtcagagt

SEQ ID NO: 403283 - DNA, 5447 bp, Homo sapiens
  misc_feature (14)..(14): n is a, c, g, or t
  misc_feature (136)..(138): n is a, c, g, or t
  misc_feature (149)..(150): n is a, c, g, or t
  misc_feature (161)..(163): n is a, c, g, or t
  misc_feature (166)..(166): n is a, c, g, or t
cgggcgccgggaancgggcggccgggcggcaggcgggcgagcagcgatcgggcggccgagcgagcgagcaacgccggcgcagcgcggtgaccccagccccagccggcgcggagcaggagccggagccgagcggatnnnggcgccctcgnngcgctcctccnnnccngagcctgccctacccggcggtggcggcggcgcgtcctccagcggcggcagcggcgctcgcagcgcccggactcacggcagctgtgttctgatttcgtactactgctggggctgccacctcctcctccagacgctctcagcagacttgagtcctggtccttctgcagaggcctgagcaggaggaagaggaggaggcccgttggcgtcggaccaatgctgcaaggggtgtgaggagaggagccgctgtttttcactgagctgccataccccgaaagcaggatggagctggagtgaggtggaggggccgcaagctgctgaccggcgtgtgggacactggtggtttgcagatcactgaggctggacaacgttcatggctctcgggtagaacctagtgaaacggccagaatgaattctatggacaggcacatccagcagaccaatgaccgactgcagtgcatcaagcagcacttacagaatcctgccaacttccacaatgccgccacggagctgctggactggtgcggagacccacgggccttccagcggcccttcgagcagagcctgatgggctgtttgacggtggtcagtcgggtggcagcccagcaaggctttgacctggacctcggctacagactgctggctgtgtgtgctgcaaaccgagacaagttcaccccgaagtctgccgccttgttgtcctcctggtgcgaagagctcggccgcctgctgctgctccgacatcagaagagccgccagagcgatccccctgggaaactccccatgcagccccctctcagctccatgagctccatgaaacccactctgtcgcacagtgatgggtcgttcccctatgactctgtcccttggcagcagaacaccaaccagcctcccggctccctttccgtggtcaccacggtttggggagtaaccaacacatcccagagccaggtccttgggaaccctatggccaatgccaacaaccccatgaatccaggcggcaaccccatggcgtcgggcatgaccaccagcaacccaggcctcaactccccacagtttgcggggcagcagcagcagttctcagccaaggctggccccgctcagccctacatccagcagagcatgtatggccggcccaactaccccggcagcgggggctttggggccagttaccctgggggtcctaacgcccccgcaggcatgggcatccctccgcacaccaggccgcctgctgacttcactcagcccgcggcagccgctgcagcagcggcagtggcagcagcagcagccacagctacagccacagccacggccactgtggcagccctgcaggagacacagaacaaggatataaaccagtatggaccgatgggtcccacccaggcgtataacagccaattcatgaaccagcccgggccgcgggggcctgcctccatggggggcagcatgaaccccgcgagcatggcggctggcatgacgccctcggggatgagcggccctcccatgggcatgaaccagccccggccgcccggcatcagcccctttggcacacacgggcagcggatgccccagcagacctacccgggcccccggccccagtcccttcctattcagaacataaagaggccataccctggagagcccaactatggaaaccagcaatatggaccaaacagccagttccccacccagccaggccagtacccagcccccaaccccccgaggccactcacctcccccaactacccaggacagaggatgcccagccagccgagctccgggcagtacccgccccccacggtcaacatggggcagtattacaagccagaacagtttaatggacaaaataacacgttctcgggaagcagctacagtaactacagccaagggaatgtcaacaggcctcccaggccggttcctgtggcaaattacccccactcacctgttccagggaaccccacaccccccatgacccctgggagcagcatccctccatacctgtcccccagccaagacgtcaaaccacccttcccgcctgacatcaagccaaatatgagcgctctgccaccaacccccagccaaccacaatgacgagctgcggctcacattccctgtgcgggatggcgtggtgctggagcccttccgcctggagcacaacctggcggtcagcaaccatgtgttccacctgcggcccacggtccaccagacgctgatgtggaggtctgacctggagctgcagttcaagtgctaccaccacgaggaccggcagatgaacaccaactggcccgcctcggtgcaggtcagcgtgaacgccacgcccctcaccattgagcgcggcgacaacaagacctcccacaagcccctgcacctgaagcacgtgtgccagccgggccgcaacaccatccagatcaccgtcacggcctgctgctgctcccacctcttcgtgctgcagctggtacaccggccctccgtccgctctgtgctgcaaggactcctcaagaagcgcctcctgcccgcagagcactgtatcacgaaaatcaagcggaatttcagcagcgtggctgcctcctcgggcaacacgaccctcaacggggaggatggggtggagcagacggccatcaaggtgtctctgaagtgccccatcacattccggcgcatccagctgcctgctcgaggacacgattgcaagcatgtgcagtgctttgatctggagtcatacctgcagctgaattgcgagagagggacctggaggtgtcctgtgtgcaataaaaccgctctgctggagggcctggaggtggatcagtacatgtggggaatcctgaatgccatccaacactccgagtttgaagaggtcaccatcgatcccacgtgcagctggcggccggtgcccatcaagtcggacttacacatcaaggacgaccctgatggcatcccctccaagcggttcaagaccatgagtcccagccagatgatcatgcccaatgtcatggagatgatcgcagccctgggccccggcccgtccccctatcccctcccgcctcccccagggggcaccaactccaacgactacagcagccaaggcaacaactaccaaggccatggcaactttgacttcccccacgggaaccctggagggacatccatgaatgacttcatgcacgggcccccccagctctcccaccccccggacatgcccaacaacatggccgccctcgagaaacccctcagccaccccatgcaggaaactatgccacacgctggcagctctgaccagccccacccctccatacaacaaggtttgcacgtaccacaccccagcagccagtcaggcctccattacatcacagtggggctcctcctcctcctccttcccagcctccccggcagccgccacaggccgctcccagcagccatccacacagcgacctgacctttaacccctcctcagccttagagggtcaggccggagcgcagggagcgtccgacatgccggagccttcgctggatctccttcccgaactcacaaatcctgacgagctcctgtcttatctggacccccccgacctgccgagcaatagtaacgatgacctcctgtctctatttgagaacaactgagggccacccggtcggggccatccctccacactctgcatcctaccccacctacccaacacacttttccacctgggagcctgtgccctcagaccgccccgcaccagagccacgggctgtggggcggggagccctcccccgctgcagccctctcagaacagaggggtagggagggtgcaccagtgcaccaggaaggctgtgtgggtctggagcccacgtcccacctccacacccttggcttgggcccatgcccagcgcaggcctgaagaccaccctcccgagaggaaccagcccggtaagagggcacacgctgatgcggcttcccggtccctccgcgtgtgccgattccagatgaccttccagtgtccccaaggttcttccatcttctagactgtaaccctgcctccctgcttcctggtccagagcctccctccagtgactgtggagcctgagaaggcccccgggccccagcatgggccccgagccttggaggagcactggcagttggtggcagtgagaccagccaccaccaccaccacagaaaagcacaaacctctgggaaagacaacgtctctcgggggccaggggtcatcggtttgacccctgacctataagccaagataccccataaacacactcagaaagcagagaaaaaggacaagagtctgtgtttgagagggggtctgccattcctgcttggggactggtggggaagagggccaggacatcttctgagccaggacgtccctgaggctccacctccaagctcagacagggcccaggcttggggaacagagagagcaggtgtacacccaaccaaagtgattgtgcccttggttggggggcgcgggcatataacctgtcagaagcaaacaggagcggcaacttctaactttgctccaagccactctctttttaaacagcaacaatttaaagctatgaagtcacctggagaaaaggaacgttgctcttggacagcaagcaaaccatttctctccgtctgttctgtttttctcctagtccctctcctgccacctctccaagacttccgtgggacacccacttccctctgtcctagttctctttgtccaatcagatggcaagggcagtgcgtggaaaggccggggaggtgcagaaaccagagcccagggcaatggtgtctgtccagcccctccctctgtccctgtgctccaagctgcccccggctgcagcccaggccatggacatgtgcaccagtatgtacctgcaggcatgggggggaggggggcgtgtttctgggcctgccccagacactgcccttggctgccagcctaccctgcctgcactcctccaccatcacaatctcactcctccccttcccaaataaagatgagggtactaaagttgtcttggtataaatatacattattattaaatactttttccagtatactagcttgtcttttaagaaaggggatattcagacaaacaacaaaccagacaacagtcgccaaaaaaaacgcaacaaccgaaacctgggccacgcaacacacgcagctaaacaccgagctacaaacgccagatctcataaagagaacaagtggcaaaacgcctgaatcacgggctgagacaaaactaggcacattccacccataaagcatgggagaaaggttccacaaacaacacaaagcaaaagc

SEQ ID NO: 403284 - DNA, 885 bp, Homo sapiens
atcgtgccggagatcgcgccattgcactccagcctaggtgacaagagcaaaactccatctcaaaaaaaagaaaagagaagaaatgtgtgcacctgcatgtgcagttccttatcccctggtgggcatgcctgcccagtgctcacatgtgccacacatggaaagcacccagaagcatttcctgccctcagcccagtggggtaccccaggtgcagccccacagggcccagcaaaggactctggaacctgccagtgttgtggccagagggcagttgggaggctgctcaaggttggcaggcctggcgtgatccagtgacaacctctcctttctcttcgcaggctggacaacgttcatggctctcgggtagaacctagtgaaacggccagaatgaattctatggacaggcacatccagcagaccaatgaccgactgcagtgcatcaagcaggtgggtgtggggcaaggcacactccgagggcggggcagatggggcgggcttgcagcagcagggcatctggcgggttctggctggagacgatggcagggcctcctgaccacctacctatcgaggccgttattggcatgctggcactgaccagcctaatgctggaatcacatgcctgggtttcagtgccaatgctgccctgtccctttccacacccttcccagctgtgtgacgttgggccagtgttgtggcctctctgggctctgtttatgtgcaaggatgtagtgatgcacctggcacttccatctctctcccaccacctccctccctagaactaagctccctgcccctttgctccagtcgttctcaaaaaaaaggccaaggtaggaagattgttcgagcccagcctgggtaacatagcaagaccctgtctcagaaaaaaa

SEQ ID NO: 403285 - DNA, 245 bp, Homo sapiens
acgagttagtgggtgcagcacaccagcatggcacatgtatacatatgtaactaacctgcacatcatgcacatgtaccctaaaacttaaagtataataataaatttaaaaaatttaaaaataaaataaaaataaaaaggcaccattaacaaaaacatcagaaagtatcggttaactaggaagaacctaattaaatacgcgatctctaccgcgaaatggctagaagggcctcaggcaaacccaccag

SEQ ID NO: 403286 - DNA, 285 bp, Homo sapiens
atgtgtgtacacaggtgcctgtgcatgcgtatgtatgtgtgtgcacagacctgtgtgtgcatctgtctccatgtacctacgtctgtgtgtggcacagatgggatcctgtgggtgcatctgtacgtgtgtgtacacaggtgcctgtgcatgcatacgtgtgtgcacagacctgtgtgtgcatctgtctccatgtacctatgtcagtgtgtggcacagatgggatgctgtgggtgcatctgtatgtgtgtggacacaggtgcctgtgtgggcatgcgtacgtgtgtg

SEQ ID NO: 403287 - DNA, 447 bp, Homo sapiens
tcatgttattattgcaacattcttaggtggttttatgcagaaatttatgtaagaagtctccattgataatggtaaaacctattaaatgatacctctttttctttctcgtttttttctccctgtatgtaaggaagcacgtttttttgttaggtcaatagaacacttgaagcaaatatttaatgcacatgttcaaaatggtaagtaaacagatgttagaaacatcactgtttgatctaaaagaggcttcctgatttaacaggatgtgaatttaaagatttacaacctattaaatttttatttgattatcctgcagcctaacatattactgtgtattggctgaggtgcaagggtctcttgagcccagtagttcaaggctgcagtgagctatgatcacaccactgcatccagcctgggtgacagagtgagaccctgtctctaaaaaaaaaa

SEQ ID NO: 403288 - DNA, 2390 bp, Homo sapiens
  misc_feature (1359)..(1359): n is a, c, g, or t
  misc_feature (1523)..(1523): n is a, c, g, or t
ataatgaaaacaaaagtgtataatacactataacacgtactatattgggcttgcgtagtactatgggaatctatagtaggagcatttaaagccagccttgacggggctaatctccggaagagcaattaatcttttcaaaatccgactcttgcaggatacggtcccccactggcctgccactagtttaaaacgaattagtttctgtgaaacatcaggatcgtgccaatagtaggggaccaataagactgaataagtcaaagggctgcgcggacaagtccaattagaacacctctggctaaaagccagaatgaatgaaagggttcatgcctcggcgtagacacacaactgggactgaaaaatctgccccaagcctccacgtcgactttggctccacctgcagcggcggcgccgtagtcacgtgacccgggcccccgcgccctaggcgcctgggccagcctgcgcctgcgcagtactcggagacagcggacccgtgtcagtgacagcttccggtttggtttctccgccttctgcttggctagagctattggggctcggtggcggccgcagtggggtggagggggcagggcgtggtgaggtaaggtgagtgccgtagtggggttccctggagccatggcctgctccattgtccagttctgctacttccaggacctccaggccgcccgggacttcctctttcctcacctgcgggaggagatcctcagcggcgccttgcggagggaccccagtaaatcaacagactgggaagatgatggttggggagcatgggaagaaaatgaaccacaagaacctgaagaagaaggaaatacttgcaaaacacaaaaaacttcctggctccaagattgtgttttatccttatctccaaccaatgatcttatggtgatagctcgagagcaaaaagctgtatttctagtgccaaaatggaaatatagtgataaaggaaaggaagaaatgcaatttgctgttggctggagtggttccttaaatgtcgaagaaggggaatgtgtaaccagtgctctatgtatcccactagcaagccaaaagaggagttccactgggcgtcctgactggacctgcattgtggtgggttttacttcaggttatgtacgcttctacactgagaatggtgtgctcttgcttgcacagcttttgaatgaggacccagtacttcaacttaaatgcagaacctatgaaataccacgacatcccggcgtgactgagcaggtagtgtaaaaaattgtgttccaacagtaacagtggcattattttgaagcagtttctctcctcttttttaggtagaaacttaaaagagatctttgtcttgtggcacagttagttagntctgctatcatagtctagaaatataatctatttgtagctgagtaaagaataccagtcttgcttttacttatttaatgaaatattatatgtttcattctacaacaaagtaaaaccctttagttagaagccaagaaaatttcttatttttagaatttaataatggnaaggcaaaaatatgatattttataaccttatatcttgttttatttggatttaggtgccaaaattacccagagtaaaagaaaaaaaatttggccttgttactagtgatactaccttgtacttaactgtttctcagaaaaggggttactaagcttttgttcatagtggaaaatacatatattcattgaagatttcaactgagaaaataatgctgtttagtatccaaggctctaacttcttaggtgccttgtaacattttggttgtcttagtcaaaaaataattgtagggccatttaaaccaatatgcttttatttgttttgcggagtgcatagtcaaaactatgtaatatgccttccctttgttgtactacttggcctccaaaagatttcaagtgaacagatgtatatactgtatgcatttgttaatttaatttgcatgggagatggactggagctgtgaaagaatcttaactatctcgtaggagagactaggattaaaatctaataatatctatggatgaattaatcagtaatataaagcaatacctaatttattggtaatttatttggacagaatacagtctgtacaagcttagagaaagaggagttcaatttggaccaggaaaataagaaaatttcattgatgaggcgagatttgcattaaaccttgaataatgggtatagaatttaattaggtaatagaattagccatccttaaaagattttaatccaatactgaactgtttataaaatgctttctctattgtaatgtactgtaagtagtgaaattctgtatatactgctattttctgtctgttcattgttgtgaacttcttatgtatattagtgaaataaattttcagctttca

SEQ ID NO: 403289 - DNA, 7768 bp, Homo sapiens
ataatgaaaacaaaagtgtataatacactataacacgtactatattgggcttgcgtagtactatgggaatctatagtaggagcatttaaagccagccttgacggggctaatctccggaagagcaattaatcttttcaaaatccgactcttgcaggatacggtcccccactggcctgccactagtttaaaacgaattagtttctgtgaaacatcaggatcgtgccaatagtaggggaccaataagactgaataagtcaaagggctgcgcggacaagtccaattagaacacctctggctaaaagccagaatgaatgaaagggttcatgcctcggcgtagacacacaactgggactgaaaaatctgccccaagcctccacgtcgactttggctccacctgcagcggcggcgccgtagtcacgtgacccgggcccccgcgccctaggcgcctgggccagcctgcgcctgcgcagtactcggagacagcggacccgtgtcagtgacagcttccggtttggtttctccgccttctgcttggctagagctattggggctcggtggcggccgcagtggggtggagggggcagggcgtggtgaggtaaggtgagtgccgtagtggggttccctggagccatggcctgctccattgtccagttctgctacttccaggacctccaggccgcccgggacttcctctttcctcacctgcgggaggagatcctcagcggcgccttgcggagggaccccagtaaatcaacagactgggaagatgatggttggggagcatgggaagaaaatgaaccacaagaacctgaagaagaaggaaatacttgcaaaacacaaaaaacttcctggctccaagattgtgttttatccttatctccaaccaatgatcttatggtgatagctcgagagcaaaaagctgtatttctagtgccaaaatggaaatatagtgataaaggaaaggaagaaatgcaatttgctgttggctggagtggttccttaaatgtcgaagaaggggaatgtgtaaccagtgctctatgtatcccactagcaagccaaaagaggagttccactgggcgtcctgactggacctgcattgtggtgggttttacttcaggttatgtacgcttctacactgagaatggtgtgctcttgcttgcacagcttttgaatgaggacccagtacttcaacttaaatgcagaacctatgaaataccacgacatcccggcgtgactgagcagaatgaagagttgagtatcttatatccagctgccattgtgactattgatggatttagcctttttcaatctcttcgtgcttgtcgaaatcaggtagcaaaagctgcagcatcaggcaatgagaacatacaaccaccaccattagcttataagaaatggggtctacaagatattgacactattattgatcatgctagtgttggtattatgactctgtccccctttgatcaaatgaagactgcctccaatataggtggatttaatgcagcaattaaaaatagtccacctgccatgtctcagtatatcactgtagggtccaatccatttactggcttcttctatgctttagagggaagcacacaaccattattatcccatgttgcactagcagttgcaagtaaactcacttctgctttatttaatgctgccagtggttggcttggttggaaaagtaagcacgaagaagaagctgtccaaaagcaaaagccgaaggttgagccagctaccccattagctgtaagatttggacttccagattctagacgccatggtgaaagcatatgtctgtctccatgtaacacactggcagcagtaacagatgatttcggcagagttattttattggatgtagctagaggaattgcaatacgcatgtggaaagggtaccgcgacgcacaaattggatggattcaaactgtagaggacctccatgaaagagtgccagaaaaggcagatttttccccctttggaaattctcagggtccaagtcgagtagctcaattccttgtgatctatgcgccaagaaggggaattttagaagtgtggagcacacagcagggacctagagtaggagctttcaatgtggggaagcactgcaggctgctgtatcctggctataaaataatgggtttaaataatgttaccagtcagagttggcagccacagacttatcagatctgtctggttgatccagtgtctggaagtgtgaaaacagtgaacgttcccttccatttagcactgagtgataagaagagtgaacgagccaaggatatgcacctagtgaagaaactagcagccttactgaaaacaaaatctcccaatcttgatttggttgaaacagaaataaaggaattaattcttgatattaaataccctgcaaccaaaaaacaagctttggaaagcattttggcaagtgaacgtttaccattttcttgccttagaaacatcactcagactttaatggacactttaaaaagtcaagaacttgagtctgttgatgaaggattgctacagttttgtgccaataaactaaaactgctgcaactctatgagtctgtcagtcaattaaattcccttgattttcatttagacacaccattctctgataatgacttggctctgttactaaggcttgatgaaaaagaactgcttaagctccaggcattactagagaaatataagcaagagaacaccaggacaaatgttcgattttctgatgataaagatggtgtgttgcctgtaaaaacattcttggaatatttagaatatgaaaaggatgtgctcaacataaagaaaataagtgaagaggaatatgtggctttaggtagtttctttttttggaagtgtttgcatggagaaagctccactgaggatatgtgtcacactttggagtcggctggtcttagccctcagctgttgttgtctctgctcctgagtgtttggctttcaaaggaaaaggatattttggataaaccacagtcaatctgctgtcttcataccatgctgtccctcctgagcaagatgaaagtggccatcgatgagacctgggattctcagtctgtgtccccatggtggcagcagatgcgcacagcctgtattcagtctgagaacaatggagccgctctgttgtctgcgcatgttgggcattctgttgctgcacagatatcaaacaacatgacagagaaaaaattttcccaaacagttttgggtgctgattcagaggccctcactgattcctgggaggcactttctcttgacactgagtactggaaactccttctgaaacagctggaggattgtctcatacttcagactctgcttcacagcaaagggaacactcagacctccaaagtgtcatcactgcaggctgagccacttccaaggctttctgttaaaaagttattagaaggaggaaaaggtggcattgcagacagtgtagccaagtggatatttaaacaggacttcagccctgaagtattaaaactggctaatgaagaaagagatgcagaaaacccagatgaacccaaagaaggtgttaacagaagtttccttgaggtatcagagatggagatggacttaggagccataccagacttactgcatttagcctatgagcagtttccttgtagccttgagctcgatgtcttgcatgcacattgctgctgggagtacgttgttcagtggaataaagatccagaggaagcacgtttttttgttaggtcaatagaacacttgaagcaaatatttaatgcacatgttcaaaatggcattgcactgatgatgtggaatacgttcttagttaaaagattttctgctgctacatacttaatggataaggttggaaaatcaccaaaagataggttatgccgaagggatgtgggaatgagtgacacagcaatgacatctttcctcggctcctgtttggatcttcttcagatcttaatggaggcagatgttagcagggatgaaatacaggtgcctgtgctggatactgaggatgcgtggctctccgtggaaggaccaatctccatagtggaactggcccttgaacagaagcacatccactacccactggtggagcaccactccatcctgtgctccatcttgtatgcagtcatgaggttttctctgaagaccgtgaagccactttcactttttgacagtaagggaaaaaatgcatttttcaaagacctaacttcaattcagttattacctagtggggaaatggatccaaattttatttctgtacgacaacagttcttattgaaagttgtcagtgcagctgtccaggcccaacattcagccacaaaggtcaaagatcccacagaagaggccacacccactccttttgggaaagaccaagattggccagctctagctgtggatttagcccatcaccttcaagttagtgaagatgttgttagaaggcattatgtgggggaactatacaactatggagttgaccacttaggagaagaggccattctacaggttcatgacaaagaggtccttgcctctcagctgctggtgctcacggggcaaaggctggctcatgcgcttctccacacccagacaaaagaaggaatggagctgcttgccagacttccacccacactgtgtacttggctgaaagcaatggacccccaggaccttcaaaacactgaagtgccaattgcaacaacagctaaactagtaaataaagtaattgagcttttaccagaaaaacatgggcaatatggtctagccttacacctcattgaagctgtggaagccatatctcttccttctttatgacacttacctactggaaatagtctaaaattatgattataacatgaagtagtgcatggttattttacatagtaagacctggaattttatgggaaaagtatgtctttttttttccttttgtaaaataaataaaagtatatacaacttttaaaaagtgcaaccctggctaaattccactcctttggttaatactgaagataaaatataaacaaatgtcaactctgttataattaatacagatgttttactgtttatttctaattcaaacacttaagtagctttattgttaaactttgctatttaaaattggttataatttagattatgttcttataagattctatatttcctatctaaaatgttgttgtaattcaatttaaatgtgttcatgtacagtccccatcagtagcgtatagaacaccccactctcctttagtaaatgttgagaaaatgcctttgttgtcatgctccaaatcccacactgggctgccacctgggagttctggataccgaaaggttcctttcccagaggttctgctgttgccatcagaggaggatgaccgtgcttgaggaggaagaatgggttcaagatcatcatattcatcagaaggggacactaaatagaacccttaacctgttgtacttgccaaaattgagaatcagagatgtgtaaaatgcagcaaattaattataatgtaagttaagatttgctttttgccaagttgcaaagttgtatccacatcaggtcactgtaaaaatgtattatcttgtaaaacttatgtaaaaaaaaaaaaaaaaaggcaaagatactaaaaattttaagtccgactttatttttcctacaagtgtttagaaatgcttctgggatttgctaatattatctgtccttgggaacagtattgaaaaaactgcttagtggtattacagctttagcaaacctacctcacagctgggatgagaggataaaatacaactaattttgtaccctatagtgcctagagcagtccaagtgctaaataaatatttactgattaaaaccaaactatagctactcgggaggctggaggaggatcgcttgagcccaggagtttgaggccattctgggcaatatagcaagaccctgtctcgaaaaaaaaaaaaaaaagaaaaaaaccaaactaaccaaaactctgtaaaagagtgctttgagctctacaaataccaagtatttattgtggtatatttttagaatgtagccatacagtgtaattatgggtatctgtcatggatcacaattattattcatagtaagtcattgtgatacagaagtttgtttcttcacttccccttaagaagccaactatagtaatcatgcaaagttgaggagtatgtccttcagggatataaaaagaaaaacaaatctgttttttgagctaaaagagcacatccaaacaagaatttaactggctaaaatttagtaattactgttaagtaactatcaaacttgaaatcttacaagataaatggttaagatgtcttgagtatttgggatgggggcctgtgagtctgattgagacatacattttacagagtagcagcactggaaagggctagtccaacctcccagcctctgcttgggtctccgctgccccagccacacacatcctagaattcttgtaaacatatctggctctgtgttaacagtcacttgttatatgttttctaagagattagttcttcctgtgatttttccaagtacgctgaaagtagtagtatgaacttaaggaggctagtcaaagaaacttggagttataggtatttttaaagaataaatcctcaattccatcatcacttggcggggagggggcacttattaagcattttagataataaaactggttaagcttactctggtagaacagacaatcaaatctggggattgctgagaacaataataagctgaagtatggctcacagaatcctaacacaaatcattaagtctctagttagatttgttatcctaaaatttttcatagaattttaaaatctaattctgacttgtatggttaagaaaagcagttaaatattttactacttatcaagggcttttaaaataaataaatctgattgataggaagaaaggcaaataaatacctatgtagacattctataataacaaagagccatagatgataaaggaattagattttaatgtagaatgggtggtttctgaaacaaaggtatgtggtactttgtagttattgatgagaagccagtaaccagtagtgttttcctagatatatgcccaccctcacacaactttcttcattaacaaacattaaatatgcatttgtatcttattaaattatattgtataatgctgaaggaaaacaaaaagtgttcaaataatcataacttctacattacaggttctgtttagatgcagaactagaggggccagggtaaatgtagataaagagatatatagcaccatgcttcttaatgcttcatacttttgcaaacagaaaaaaaaagttttacttttattataaaacttcatctatggtcaaagtaaacactgttacatttaaattgctttttaaaaacaattgcgatctaaaaagtcaaaaatctgaaatttaataatatgagacttacactgaatataatgttcatttagaagttgctgtggtccacttcatttataaggaacaaatatttttacagtacactatagcaacagcaaaagccctctctcaccctgataggaatgggtttgctgggtgtctagaagttagattcctgctgaatagaattagccatccttaaaagattttaatccaatactgaactgtttataaaatgctttctctattgtaatgtactgtaagtagtgaaattctgtatatactgctattttctgtctgttcattgttgtgaacttcttatgtatattagtgaaataaattttcagctttca

SEQ ID NO: 403290 - DNA, 5937 bp, Homo sapiens
ataatgaaaacaaaagtgtataatacactataacacgtactatattgggcttgcgtagtactatgggaatctatagtaggagcatttaaagccagccttgacggggctaatctccggaagagcaattaatcttttcaaaatccgactcttgcaggatacggtcccccactggcctgccactagtttaaaacgaattagtttctgtgaaacatcaggatcgtgccaatagtaggggaccaataagactgaataagtcaaagggctgcgcggacaagtccaattagaacacctctggctaaaagccagaatgaatgaaagggttcatgcctcggcgtagacacacaactgggactgaaaaatctgccccaagcctccacgtcgactttggctccacctgcagcggcggcgccgtagtcacgtgacccgggcccccgcgccctaggcgcctgggccagcctgcgcctgcgcagtactcggagacagcggacccgtgtcagtgacagcttccggtttggtttctccgccttctgcttggctagagctattggggctcggtggcggccgcagtggggtggagggggcagggcgtggtgaggtaaggtgagtgccgtagtggggttccctggagccatggcctgctccattgtccagttctgctacttccaggacctccaggccgcccgggacttcctctttcctcacctgcgggaggagatcctcagcggcgccttgcggagggaccccagtaaatcaacagactgggaagatgatggttggggagcatgggaagaaaatgaaccacaagaacctgaagaagaaggaaatacttgcaaaacacaaaaaacttcctggctccaagattgtgttttatccttatctccaaccaatgatcttatggtgatagctcgagagcaaaaagctgtatttctagtgccaaaatggaaatatagtgataaaggaaaggaagaaatgcaatttgctgttggctggagtggttccttaaatgtcgaagaaggggaatgtgtaaccagtgctctatgtatcccactagcaagccaaaagaggagttccactgggcgtcctgactggacctgcattgtggtgggttttacttcaggttatgtacgcttctacactgagaatggtgtgctcttgcttgcacagcttttgaatgaggacccagtacttcaacttaaatgcagaacctatgaaataccacgacatcccggcgtgactgagcagaatgaagagttgagtatcttatatccagctgccattgtgactattgatggatttagcctttttcaatctcttcgtgcttgtcgaaatcaggtagcaaaagctgcagcatcaggcaatgagaacatacaaccaccaccattagcttataagaaatggggtctacaagatattgacactattattgatcatgctagtgttggtattatgactctgtccccctttgatcaaatgaagactgcctccaatataggtggatttaatgcagcaattaaaaatagtccacctgccatgtctcagtatatcactgtagggtccaatccatttactggcttcttctatgctttagagggaagcacacaaccattattatcccatgttgcactagcagttgcaagtaaactcacttctgctttatttaatgctgccagtggttggcttggttggaaaagtaagcacgaagaagaagctgtccaaaagcaaaagccgaaggttgagccagctaccccattagctgtaagatttggacttccagattctagacgccatggtgaaagcatatgtctgtctccatgtaacacactggcagcagtaacagatgatttcggcagagttattttattggatgtagctagaggaattgcaatacgcatgtggaaagggtaccgcgacgcacaaattggatggattcaaactgtagaggacctccatgaaagagtgccagaaaaggcagatttttccccctttggaaattctcagggtccaagtcgagtagctcaattccttgtgatctatgcgccaagaaggggaattttagaagtgtggagcacacagcagggacctagagtaggagctttcaatgtggggaagcactgcaggctgctgtatcctggctataaaataatgggtttaaataatgttaccagtcagagttggcagccacagacttatcagatctgtctggttgatccagtgtctggaagtgtgaaaacagtgaacgttcccttccatttagcactgagtgataagaagagtgaacgagccaaggatatgcacctagtgaagaaactagcagccttactgaaaacaaaatctcccaatcttgatttggttgaaacagaaataaaggaattaattcttgatattaaataccctgcaaccaaaaaacaagctttggaaagcattttggcaagtgaacgtttaccattttcttgccttagaaacatcactcagactttaatggacactttaaaaagtcaagaacttgagtctgttgatgaaggattgctacagttttgtgccaataaactaaaactgctgcaactctatgagtctgtcagtcaattaaattcccttgattttcatttagacacaccattctctgataatgacttggctctgttactaaggcttgatgaaaaagaactgcttaagctccaggcattactagagaaatataagcaagagaacaccaggacaaatgttcgattttctgatgataaagatggtgtgttgcctgtaaaaacattcttggaatatttagaatatgaaaaggatgtgctcaacataaagaaaataagtgaagaggaatatgtggctttaggtagtttctttttttggaagtgtttgcatggagaaagctccactgaggatatgtgtcacactttggagtcggctggtcttagccctcagctgttgttgtctctgctcctgagtgtttggctttcaaaggaaaaggatattttggataaaccacagtcaatctgctgtcttcataccatgctgtccctcctgagcaagatgaaagtggccatcgatgagacctgggattctcagtctgtgtccccatggtggcagcagatgcgcacagcctgtattcagtctgagaacaatggagccgctctgttgtctgcgcatgttgggcattctgttgctgcacagatatcaaacaacatgacagagaaaaaattttcccaaacagttttgggtgctgattcagaggccctcactgattcctgggaggcactttctcttgacactgagtactggaaactccttctgaaacagctggaggattgtctcatacttcagactctgcttcacagcaaagggaacactcagacctccaaagtgtcatcactgcaggctgagccacttccaaggctttctgttaaaaagttattagaaggaggaaaaggtggcattgcagacagtgtagccaagtggatatttaaacaggacttcagccctgaagtattaaaactggctaatgaagaaagagatgcagaaaacccagatgaacccaaagaaggtgttaacagaagtttccttgaggtatcagagatggagatggacttaggagccataccagacttactgcatttagcctatgagcagtttccttgtagccttgagctcgatgtcttgcatgcacattgctgctgggagtacgttgttcagtggaataaagatccagaggaagcacgtttttttgttaggtcaatagaacacttgaagcaaatatttaatgcacatgttcaaaatggcattgcactgatgatgtggaatacgttcttagttaaaagattttctgctgctacatacttaatggataaggttggaaaatcaccaaaagataggttatgccgaagggatgtgggaatgagtgacacagcaatgacatctttcctcggctcctgtttggatcttcttcagatcttaatggaggcagatgttagcagggatgaaatacaggtgcctgtgctggatactgaggatgcgtggctctccgtggaaggaccaatctccatagtggaactggcccttgaacagaagcacatccactacccactggtggagcaccactccatcctgtgctccatcttgtatgcagtcatgaggttttctctgaagaccgtgaagccactttcactttttgacagtaagggaaaaaatgcatttttcaaagacctaacttcaattcagttattacctagtggggaaatggatccaaattttatttctgtacgacaacagttcttattgaaagttgtcagtgcagctgtccaggcccaacattcagccacaaaggtcaaagatcccacagaagaggccacacccactccttttgggaaagaccaagattggccagctctagctgtggatttagcccatcaccttcaagttagtgaagatgttgttagaaggcattatgtgggggaactatacaactatggagttgaccacttaggagaagaggccattctacaggttcatgacaaagaggtccttgcctctcagctgctggtgctcacggggcaaaggctggctcatgcgcttctccacacccagacaaaagaaggaatggagctgcttgccagacttccacccacactgtgtacttggctgaaagcaatggacccccaggaccttcaaaacactgaagtgccaattgcaacaacagctaaactagtaaataaagtaattgagcttttaccagaaaaacatgggcaatatggtctagccttacacctcattgaagctgtggaagccatatctcttccttctttatgacacttacctactggaaatagtctaaaattatgattataacatgaagtagtgcatggttattttacatagtaagacctggaattttatgggaaaagtatgtctttttttttccttttgtaaaataaataaaagtatatacaacttttaaaaagtgcaaccctggctaaattccactcctttggttaatactgaagataaaatataaacaaatgtcaactctgttataattaatacagatgttttactgtttatttctaattcaaacacttaagtagctttattgttaaactttgctatttaaaattggttataatttagattatgttcttataagattctatatttcctatctaaaatgttgttgtaattcaatttaaatgtgttcatgtacagtccccatcagtagcgtatagaacaccccactctcctttagtaaatgttgagaaaatgcctttgttgtcatgctccaaatcccacactgggctgccacctgggagttctggataccgaaaggttcctttcccagaggttctgctgttgccatcagaggaggatgaccgtgcttgaggaggaagaatgggttcaagatcatcatattcatcagaaggggacactaaatagaacccttaacctgttgtacttgccaaaattgagaatcagagatgtgtaaaatgcagcaaattaattataatgtaagttaagatttgctttttgccaagttgcaaagttgtatccacatcaggtcactgtaaaaatgtattatcttgtaaaacttatgtaaaaaaaaaaaaaaaaaggcaaagatactaaaaattttaagtccgactttatttttcctacaagtgtttagaaatgcttctgggatttgctaatattatctgtccttgggaacagtattgaaaaaactgcttagtggtattacagctttagcaaacctacctcacagctgggatgagaggataaaatacaactaattttgtaccctatagtgcctagagcagtccaagtgctaaataaatatttactgattaaaaccaaactatagctactcgggaggctggaggaggatcgcttgagcccaggagtttgaggccattctgggcaatatagcaagaccctgtctcg

SEQ ID NO: 403291 - DNA, 7963 bp, Homo sapiens
ataatgaaaacaaaagtgtataatacactataacacgtactatattgggcttgcgtagtactatgggaatctatagtaggagcatttaaagccagccttgacggggctaatctccggaagagcaattaatcttttcaaaatccgactcttgcaggatacggtcccccactggcctgccactagtttaaaacgaattagtttctgtgaaacatcaggatcgtgccaatagtaggggaccaataagactgaataagtcaaagggctgcgcggacaagtccaattagaacacctctggctaaaagccagaatgaatgaaagggttcatgcctcggcgtagacacacaactgggactgaaaaatctgccccaagcctccacgtcgactttggctccacctgcagcggcggcgccgtagtcacgtgacccgggcccccgcgccctaggcgcctgggccagcctgcgcctgcgcagtactcggagacagcggacccgtgtcagtgacagcttccggtttggtttctccgccttctgcttggctagagctattggggctcggtggcggccgcagtggggtggagggggcagggcgtggtgaggtaaggtgagtgccgtagtggggttccctggagccatggcctgctccattgtccagttctgctacttccaggacctccaggccgcccgggacttcctctttcctcacctgcgggaggagatcctcagcggcgccttgcggagggaccccagtaaatcaacagactgggaagatgatggttggggagcatgggaagaaaatgaaccacaagaacctcccttctggagcaatactgtggcagtgttgtacaggatacattaaagcagagagagagagatatgagaacatcgagggtctagtctttctcatggattctgacccacaggccatttcctcattcttcctcagacccctgattttagaagtgaaggaccagagttcctctgtaaattgtccagggactgtgtgaatgaagaagaaggaaatacttgcaaaacacaaaaaacttcctggctccaagattgtgttttatccttatctccaaccaatgatcttatggtgatagctcgagagcaaaaagctgtatttctagtgccaaaatggaaatatagtgataaaggaaaggaagaaatgcaatttgctgttggctggagtggttccttaaatgtcgaagaaggggaatgtgtaaccagtgctctatgtatcccactagcaagccaaaagaggagttccactgggcgtcctgactggacctgcattgtggtgggttttacttcaggttatgtacgcttctacactgagaatggtgtgctcttgcttgcacagcttttgaatgaggacccagtacttcaacttaaatgcagaacctatgaaataccacgacatcccggcgtgactgagcagaatgaagagttgagtatcttatatccagctgccattgtgactattgatggatttagcctttttcaatctcttcgtgcttgtcgaaatcaggtagcaaaagctgcagcatcaggcaatgagaacatacaaccaccaccattagcttataagaaatggggtctacaagatattgacactattattgatcatgctagtgttggtattatgactctgtccccctttgatcaaatgaagactgcctccaatataggtggatttaatgcagcaattaaaaatagtccacctgccatgtctcagtatatcactgtagggtccaatccatttactggcttcttctatgctttagagggaagcacacaaccattattatcccatgttgcactagcagttgcaagtaaactcacttctgctttatttaatgctgccagtggttggcttggttggaaaagtaagcacgaagaagaagctgtccaaaagcaaaagccgaaggttgagccagctaccccattagctgtaagatttggacttccagattctagacgccatggtgaaagcatatgtctgtctccatgtaacacactggcagcagtaacagatgatttcggcagagttattttattggatgtagctagaggaattgcaatacgcatgtggaaagggtaccgcgacgcacaaattggatggattcaaactgtagaggacctccatgaaagagtgccagaaaaggcagatttttccccctttggaaattctcagggtccaagtcgagtagctcaattccttgtgatctatgcgccaagaaggggaattttagaagtgtggagcacacagcagggacctagagtaggagctttcaatgtggggaagcactgcaggctgctgtatcctggctataaaataatgggtttaaataatgttaccagtcagagttggcagccacagacttatcagatctgtctggttgatccagtgtctggaagtgtgaaaacagtgaacgttcccttccatttagcactgagtgataagaagagtgaacgagccaaggatatgcacctagtgaagaaactagcagccttactgaaaacaaaatctcccaatcttgatttggttgaaacagaaataaaggaattaattcttgatattaaataccctgcaaccaaaaaacaagctttggaaagcattttggcaagtgaacgtttaccattttcttgccttagaaacatcactcagactttaatggacactttaaaaagtcaagaacttgagtctgttgatgaaggattgctacagttttgtgccaataaactaaaactgctgcaactctatgagtctgtcagtcaattaaattcccttgattttcatttagacacaccattctctgataatgacttggctctgttactaaggcttgatgaaaaagaactgcttaagctccaggcattactagagaaatataagcaagagaacaccaggacaaatgttcgattttctgatgataaagatggtgtgttgcctgtaaaaacattcttggaatatttagaatatgaaaaggatgtgctcaacataaagaaaataagtgaagaggaatatgtggctttaggtagtttctttttttggaagtgtttgcatggagaaagctccactgaggatatgtgtcacactttggagtcggctggtcttagccctcagctgttgttgtctctgctcctgagtgtttggctttcaaaggaaaaggatattttggataaaccacagtcaatctgctgtcttcataccatgctgtccctcctgagcaagatgaaagtggccatcgatgagacctgggattctcagtctgtgtccccatggtggcagcagatgcgcacagcctgtattcagtctgagaacaatggagccgctctgttgtctgcgcatgttgggcattctgttgctgcacagatatcaaacaacatgacagagaaaaaattttcccaaacagttttgggtgctgattcagaggccctcactgattcctgggaggcactttctcttgacactgagtactggaaactccttctgaaacagctggaggattgtctcatacttcagactctgcttcacagcaaagggaacactcagacctccaaagtgtcatcactgcaggctgagccacttccaaggctttctgttaaaaagttattagaaggaggaaaaggtggcattgcagacagtgtagccaagtggatatttaaacaggacttcagccctgaagtattaaaactggctaatgaagaaagagatgcagaaaacccagatgaacccaaagaaggtgttaacagaagtttccttgaggtatcagagatggagatggacttaggagccataccagacttactgcatttagcctatgagcagtttccttgtagccttgagctcgatgtcttgcatgcacattgctgctgggagtacgttgttcagtggaataaagatccagaggaagcacgtttttttgttaggtcaatagaacacttgaagcaaatatttaatgcacatgttcaaaatggcattgcactgatgatgtggaatacgttcttagttaaaagattttctgctgctacatacttaatggataaggttggaaaatcaccaaaagataggttatgccgaagggatgtgggaatgagtgacacagcaatgacatctttcctcggctcctgtttggatcttcttcagatcttaatggaggcagatgttagcagggatgaaatacaggtgcctgtgctggatactgaggatgcgtggctctccgtggaaggaccaatctccatagtggaactggcccttgaacagaagcacatccactacccactggtggagcaccactccatcctgtgctccatcttgtatgcagtcatgaggttttctctgaagaccgtgaagccactttcactttttgacagtaagggaaaaaatgcatttttcaaagacctaacttcaattcagttattacctagtggggaaatggatccaaattttatttctgtacgacaacagttcttattgaaagttgtcagtgcagctgtccaggcccaacattcagccacaaaggtcaaagatcccacagaagaggccacacccactccttttgggaaagaccaagattggccagctctagctgtggatttagcccatcaccttcaagttagtgaagatgttgttagaaggcattatgtgggggaactatacaactatggagttgaccacttaggagaagaggccattctacaggttcatgacaaagaggtccttgcctctcagctgctggtgctcacggggcaaaggctggctcatgcgcttctccacacccagacaaaagaaggaatggagctgcttgccagacttccacccacactgtgtacttggctgaaagcaatggacccccaggaccttcaaaacactgaagtgccaattgcaacaacagctaaactagtaaataaagtaattgagcttttaccagaaaaacatgggcaatatggtctagccttacacctcattgaagctgtggaagccatatctcttccttctttatgacacttacctactggaaatagtctaaaattatgattataacatgaagtagtgcatggttattttacatagtaagacctggaattttatgggaaaagtatgtctttttttttccttttgtaaaataaataaaagtatatacaacttttaaaaagtgcaaccctggctaaattccactcctttggttaatactgaagataaaatataaacaaatgtcaactctgttataattaatacagatgttttactgtttatttctaattcaaacacttaagtagctttattgttaaactttgctatttaaaattggttataatttagattatgttcttataagattctatatttcctatctaaaatgttgttgtaattcaatttaaatgtgttcatgtacagtccccatcagtagcgtatagaacaccccactctcctttagtaaatgttgagaaaatgcctttgttgtcatgctccaaatcccacactgggctgccacctgggagttctggataccgaaaggttcctttcccagaggttctgctgttgccatcagaggaggatgaccgtgcttgaggaggaagaatgggttcaagatcatcatattcatcagaaggggacactaaatagaacccttaacctgttgtacttgccaaaattgagaatcagagatgtgtaaaatgcagcaaattaattataatgtaagttaagatttgctttttgccaagttgcaaagttgtatccacatcaggtcactgtaaaaatgtattatcttgtaaaacttatgtaaaaaaaaaaaaaaaaaggcaaagatactaaaaattttaagtccgactttatttttcctacaagtgtttagaaatgcttctgggatttgctaatattatctgtccttgggaacagtattgaaaaaactgcttagtggtattacagctttagcaaacctacctcacagctgggatgagaggataaaatacaactaattttgtaccctatagtgcctagagcagtccaagtgctaaataaatatttactgattaaaaccaaactatagctactcgggaggctggaggaggatcgcttgagcccaggagtttgaggccattctgggcaatatagcaagaccctgtctcgaaaaaaaaaaaaaaaagaaaaaaaccaaactaaccaaaactctgtaaaagagtgctttgagctctacaaataccaagtatttattgtggtatatttttagaatgtagccatacagtgtaattatgggtatctgtcatggatcacaattattattcatagtaagtcattgtgatacagaagtttgtttcttcacttccccttaagaagccaactatagtaatcatgcaaagttgaggagtatgtccttcagggatataaaaagaaaaacaaatctgttttttgagctaaaagagcacatccaaacaagaatttaactggctaaaatttagtaattactgttaagtaactatcaaacttgaaatcttacaagataaatggttaagatgtcttgagtatttgggatgggggcctgtgagtctgattgagacatacattttacagagtagcagcactggaaagggctagtccaacctcccagcctctgcttgggtctccgctgccccagccacacacatcctagaattcttgtaaacatatctggctctgtgttaacagtcacttgttatatgttttctaagagattagttcttcctgtgatttttccaagtacgctgaaagtagtagtatgaacttaaggaggctagtcaaagaaacttggagttataggtatttttaaagaataaatcctcaattccatcatcacttggcggggagggggcacttattaagcattttagataataaaactggttaagcttactctggtagaacagacaatcaaatctggggattgctgagaacaataataagctgaagtatggctcacagaatcctaacacaaatcattaagtctctagttagatttgttatcctaaaatttttcatagaattttaaaatctaattctgacttgtatggttaagaaaagcagttaaatattttactacttatcaagggcttttaaaataaataaatctgattgataggaagaaaggcaaataaatacctatgtagacattctataataacaaagagccatagatgataaaggaattagattttaatgtagaatgggtggtttctgaaacaaaggtatgtggtactttgtagttattgatgagaagccagtaaccagtagtgttttcctagatatatgcccaccctcacacaactttcttcattaacaaacattaaatatgcatttgtatcttattaaattatattgtataatgctgaaggaaaacaaaaagtgttcaaataatcataacttctacattacaggttctgtttagatgcagaactagaggggccagggtaaatgtagataaagagatatatagcaccatgcttcttaatgcttcatacttttgcaaacagaaaaaaaaagttttacttttattataaaacttcatctatggtcaaagtaaacactgttacatttaaattgctttttaaaaacaattgcgatctaaaaagtcaaaaatctgaaatttaataatatgagacttacactgaatataatgttcatttagaagttgctgtggtccacttcatttataaggaacaaatatttttacagtacactatagcaacagcaaaagccctctctcaccctgataggaatgggtttgctgggtgtctagaagttagattcctgctgaatagaattagccatccttaaaagattttaatccaatactgaactgtttataaaatgctttctctattgtaatgtactgtaagtagtgaaattctgtatatactgctattttctgtctgttcattgttgtgaacttcttatgtatattagtgaaataaattttcagctttca

SEQ ID NO: 403292 - DNA, 7021 bp, Homo sapiens
  misc_feature (63)..(63): n is a, c, g, or t
tcactaaataaaaagtaatcaatgtcaaccaacaaacacgaaccagccttagggagaactagngaagaagaaggaaatacttgcaaaacacaaaaaacttcctggctccaagattgtgttttatccttatctccaaccaatgatcttatggtgatagctcgagagcaaaaagctgtatttctagtgccaaaatggaaatatagtgataaaggaaaggaagaaatgcaatttgctgttggctggagtggttccttaaatgtcgaagaaggggaatgtgtaaccagtgctctatgtatcccactagcaagccaaaagaggagttccactgggcgtcctgactggacctgcattgtggtgggttttacttcaggttatgtacgcttctacactgagaatggtgtgctcttgcttgcacagcttttgaatgaggacccagtacttcaacttaaatgcagaacctatgaaataccacgacatcccggcgtgactgagcagaatgaagagttgagtatcttatatccagctgccattgtgactattgatggatttagcctttttcaatctcttcgtgcttgtcgaaatcaggtagcaaaagctgcagcatcaggcaatgagaacatacaaccaccaccattagcttataagaaatggggtctacaagatattgacactattattgatcatgctagtgttggtattatgactctgtccccctttgatcaaatgaagactgcctccaatataggtggatttaatgcagcaattaaaaatagtccacctgccatgtctcagtatatcactgtagggtccaatccatttactggcttcttctatgctttagagggaagcacacaaccattattatcccatgttgcactagcagttgcaagtaaactcacttctgctttatttaatgctgccagtggttggcttggttggaaaagtaagcacgaagaagaagctgtccaaaagcaaaagccgaaggttgagccagctaccccattagctgtaagatttggacttccagattctagacgccatggtgaaagcatatgtctgtctccatgtaacacactggcagcagtaacagatgatttcggcagagttattttattggatgtagctagaggaattgcaatacgcatgtggaaagggtaccgcgacgcacaaattggatggattcaaactgtagaggacctccatgaaagagtgccagaaaaggcagatttttccccctttggaaattctcagggtccaagtcgagtagctcaattccttgtgatctatgcgccaagaaggggaattttagaagtgtggagcacacagcagggacctagagtaggagctttcaatgtggggaagcactgcaggctgctgtatcctggctataaaataatgggtttaaataatgttaccagtcagagttggcagccacagacttatcagatctgtctggttgatccagtgtctggaagtgtgaaaacagtgaacgttcccttccatttagcactgagtgataagaagagtgaacgagccaaggatatgcacctagtgaagaaactagcagccttactgaaaacaaaatctcccaatcttgatttggttgaaacagaaataaaggaattaattcttgatattaaataccctgcaaccaaaaaacaagctttggaaagcattttggcaagtgaacgtttaccattttcttgccttagaaacatcactcagactttaatggacactttaaaaagtcaagaacttgagtctgttgatgaaggattgctacagttttgtgccaataaactaaaactgctgcaactctatgagtctgtcagtcaattaaattcccttgattttcatttagacacaccattctctgataatgacttggctctgttactaaggcttgatgaaaaagaactgcttaagctccaggcattactagagaaatataagcaagagaacaccaggacaaatgttcgattttctgatgataaagatggtgtgttgcctgtaaaaacattcttggaatatttagaatatgaaaaggatgtgctcaacataaagaaaataagtgaagaggaatatgtggctttaggtagtttctttttttggaagtgtttgcatggagaaagctccactgaggatatgtgtcacactttggagtcggctggtcttagccctcagctgttgttgtctctgctcctgagtgtttggctttcaaaggaaaaggatattttggataaaccacagtcaatctgctgtcttcataccatgctgtccctcctgagcaagatgaaagtggccatcgatgagacctgggattctcagtctgtgtccccatggtggcagcagatgcgcacagcctgtattcagtctgagaacaatggagccgctctgttgtctgcgcatgttgggcattctgttgctgcacagatatcaaacaacatgacagagaaaaaattttcccaaacagttttgggtgctgattcagaggccctcactgattcctgggaggcactttctcttgacactgagtactggaaactccttctgaaacagctggaggattgtctcatacttcagactctgcttcacagcaaagggaacactcagacctccaaagtgtcatcactgcaggctgagccacttccaaggctttctgttaaaaagttattagaaggaggaaaaggtggcattgcagacagtgtagccaagtggatatttaaacaggacttcagccctgaagtattaaaactggctaatgaagaaagagatgcagaaaacccagatgaacccaaagaaggtgttaacagaagtttccttgaggtatcagagatggagatggacttaggagccataccagacttactgcatttagcctatgagcagtttccttgtagccttgagctcgatgtcttgcatgcacattgctgctgggagtacgttgttcagtggaataaagatccagaggaagcacgtttttttgttaggtcaatagaacacttgaagcaaatatttaatgcacatgttcaaaatggcattgcactgatgatgtggaatacgttcttagttaaaagattttctgctgctacatacttaatggataaggttggaaaatcaccaaaagataggttatgccgaagggatgtgggaatgagtgacacagcaatgacatctttcctcggctcctgtttggatcttcttcagatcttaatggaggcagatgttagcagggatgaaatacaggtgcctgtgctggatactgaggatgcgtggctctccgtggaaggaccaatctccatagtggaactggcccttgaacagaagcacatccactacccactggtggagcaccactccatcctgtgctccatcttgtatgcagtcatgaggttttctctgaagaccgtgaagccactttcactttttgacagtaagggaaaaaatgcatttttcaaagacctaacttcaattcagttattacctagtggggaaatggatccaaattttatttctgtacgacaacagttcttattgaaagttgtcagtgcagctgtccaggcccaacattcagccacaaaggtcaaagatcccacagaagaggccacacccactccttttgggaaagaccaagattggccagctctagctgtggatttagcccatcaccttcaagttagtgaagatgttgttagaaggcattatgtgggggaactatacaactatggagttgaccacttaggagaagaggccattctacaggttcatgacaaagaggtccttgcctctcagctgctggtgctcacggggcaaaggctggctcatgcgcttctccacacccagacaaaagaaggaatggagctgcttgccagacttccacccacactgtgtacttggctgaaagcaatggacccccaggaccttcaaaacactgaagtgccaattgcaacaacagctaaactagtaaataaagtaattgagcttttaccagaaaaacatgggcaatatggtctagccttacacctcattgaagctgtggaagccatatctcttccttctttatgacacttacctactggaaatagtctaaaattatgattataacatgaagtagtgcatggttattttacatagtaagacctggaattttatgggaaaagtatgtctttttttttccttttgtaaaataaataaaagtatatacaacttttaaaaagtgcaaccctggctaaattccactcctttggttaatactgaagataaaatataaacaaatgtcaactctgttataattaatacagatgttttactgtttatttctaattcaaacacttaagtagctttattgttaaactttgctatttaaaattggttataatttagattatgttcttataagattctatatttcctatctaaaatgttgttgtaattcaatttaaatgtgttcatgtacagtccccatcagtagcgtatagaacaccccactctcctttagtaaatgttgagaaaatgcctttgttgtcatgctccaaatcccacactgggctgccacctgggagttctggataccgaaaggttcctttcccagaggttctgctgttgccatcagaggaggatgaccgtgcttgaggaggaagaatgggttcaagatcatcatattcatcagaaggggacactaaatagaacccttaacctgttgtacttgccaaaattgagaatcagagatgtgtaaaatgcagcaaattaattataatgtaagttaagatttgctttttgccaagttgcaaagttgtatccacatcaggtcactgtaaaaatgtattatcttgtaaaacttatgtaaaaaaaaaaaaaaaaaggcaaagatactaaaaattttaagtccgactttatttttcctacaagtgtttagaaatgcttctgggatttgctaatattatctgtccttgggaacagtattgaaaaaactgcttagtggtattacagctttagcaaacctacctcacagctgggatgagaggataaaatacaactaattttgtaccctatagtgcctagagcagtccaagtgctaaataaatatttactgattaaaaccaaactatagctactcgggaggctggaggaggatcgcttgagcccaggagtttgaggccattctgggcaatatagcaagaccctgtctcgaaaaaaaaaaaaaaaagaaaaaaaccaaactaaccaaaactctgtaaaagagtgctttgagctctacaaataccaagtatttattgtggtatatttttagaatgtagccatacagtgtaattatgggtatctgtcatggatcacaattattattcatagtaagtcattgtgatacagaagtttgtttcttcacttccccttaagaagccaactatagtaatcatgcaaagttgaggagtatgtccttcagggatataaaaagaaaaacaaatctgttttttgagctaaaagagcacatccaaacaagaatttaactggctaaaatttagtaattactgttaagtaactatcaaacttgaaatcttacaagataaatggttaagatgtcttgagtatttgggatgggggcctgtgagtctgattgagacatacattttacagagtagcagcactggaaagggctagtccaacctcccagcctctgcttgggtctccgctgccccagccacacacatcctagaattcttgtaaacatatctggctctgtgttaacagtcacttgttatatgttttctaagagattagttcttcctgtgatttttccaagtacgctgaaagtagtagtatgaacttaaggaggctagtcaaagaaacttggagttataggtatttttaaagaataaatcctcaattccatcatcacttggcggggagggggcacttattaagcattttagataataaaactggttaagcttactctggtagaacagacaatcaaatctggggattgctgagaacaataataagctgaagtatggctcacagaatcctaacacaaatcattaagtctctagttagatttgttatcctaaaatttttcatagaattttaaaatctaattctgacttgtatggttaagaaaagcagttaaatattttactacttatcaagggcttttaaaataaataaatctgattgataggaagaaaggcaaataaatacctatgtagacattctataataacaaagagccatagatgataaaggaattagattttaatgtagaatgggtggtttctgaaacaaaggtatgtggtactttgtagttattgatgagaagccagtaaccagtagtgttttcctagatatatgcccaccctcacacaactttcttcattaacaaacattaaatatgcatttgtatcttattaaattatattgtataatgctgaaggaaaacaaaaagtgttcaaataatcataacttctacattacaggttctgtttagatgcagaactagaggggccagggtaaatgtagataaagagatatatagcaccatgcttcttaatgcttcatacttttgcaaacagaaaaaaaaagttttacttttattataaaacttcatctatggtcaaagtaaacactgttacatttaaattgctttttaaaaacaattgcgatctaaaaagtcaaaaatctgaaatttaataatatgagacttacactgaatataatgttcatttagaagttgctgtggtccacttcatttataaggaacaaatatttttacagtacactatagcaacagcaaaagccctctctcaccctgataggaatgggtttgctgggtgtctagaagttagattcctgctgaatagaattagccatccttaaaagattttaatccaatactgaactgtttataaaatgctttctctattgtaatgtactgtaagtagtgaaattctgtatatactgctattttctgtctgttcattgttgtgaacttcttatgtatattagtgaaataaattttcagctttca

SEQ ID NO: 403293 - DNA, 7723 bp, Homo sapiens
ataatgaaaacaaaagtgtataatacactataacacgtactatattgggcttgcgtagtactatgggaatctatagtaggagcatttaaagccagccttgacggggctaatctccggaagagcaattaatcttttcaaaatccgactcttgcaggatacggtcccccactggcctgccactagtttaaaacgaattagtttctgtgaaacatcaggatcgtgccaatagtaggggaccaataagactgaataagtcaaagggctgcgcggacaagtccaattagaacacctctggctaaaagccagaatgaatgaaagggttcatgcctcggcgtagacacacaactgggactgaaaaatctgccccaagcctccacgtcgactttggctccacctgcagcggcggcgccgtagtcacgtgacccgggcccccgcgccctaggcgcctgggccagcctgcgcctgcgcagtactcggagacagcggacccgtgtcagtgacagcttccggtttggtttctccgccttctgcttggctagagctattggggctcggtggcggccgcagtggggtggagggggcagggcgtggtgaggtaaggtgagtgccgtagtggggttccctggagccatggcctgctccattgtccagttctgctacttccaggacctccaggccgcccgggacttcctctttcctcacctgcgggaggagatcctcagcggcgccttgcggagggaccccagtaaatcaacagactgggaagatgatggttggggagcatgggaagaaaatgaaccacaagaacctgaagaagaaggaaatacttgcaaaacacaaaaaacttcctggctccaagattgtgttttatccttatctccaaccaatgatcttatggtgatagctcgagagcaaaaagctgtatttctagtgccaaaatggaaatatagtgataaaggaaaggaagaaatgcaatttgctgttggctggagtggttccttaaatgtcgaagaaggggaatgtgtaaccagtgctctatgtatcccactagcaagccaaaagaggagttccactgggcgtcctgactggacctgcattgtggtgggttttacttcaggttatgtacgcttctacactgagaatggtgtgctcttgcttgcacagcttttgaatgaggacccagtacttcaacttaaatgcagaacctatgaaataccacgacatcccggcgtgactgagcagaatgaagagttgagtatcttatatccagctgccattgtgactattgatggatttagcctttttcaatctcttcgtgcttgtcgaaatcaggtagcaaaagctgcagcatcaggcaatgagaacatacaaccaccaccattagcttataagaaatggggtctacaagatattgacactattattgatcatgctagtgttggtattatgactctgtccccctttgatcaaatgaagactgcctccaatataggtggatttaatgcagcaattaaaaatagtccacctgccatgtctcagtatatcactgtagggtccaatccatttactggcttcttctatgctttagagggaagcacacaaccattattatcccatgttgcactagcagttgcaagtaaactcacttctgctttatttaatgctgccagtggttggcttggttggaaaagtaagcacgaagaagaagctgtccaaaagcaaaagccgaaggttgagccagctaccccattagctgtaagatttggacttccagattctagacgccatggtgaaagcatatgtctgtctccatgtaacacactggcagcagtaacagatgatttcggcagagttattttattggatgtagctagaggaattgcaatacgcatgtggaaagggtaccgcgacgcacaaattggatggattcaaactgtagaggacctccatgaaagagtgccagaaaaggcagatttttccccctttggaaattctcagggtccaagtcgagtagctcaattccttgtgatctatgcgccaagaaggggaattttagaagtgtggagcacacagcagggacctagagtaggagctttcaatgtggggaagcactgcaggctgctgtatcctggctataaaataatgggtttaaataatgttaccagtcagagttggcagccacagacttatcagatctgtctggttgatccagtgtctggaagtgtgaaaacagtgaacgttcccttccatttagcactgagtgataagaagagtgaacgagccaaggatatgcacctagtgaagaaactagcagccttactgaaaacaaaatctcccaatcttgatttggttgaaacagaaataaaggaattaattcttgatattaaataccctgcaaccaaaaaacaagctttggaaagcattttggcaagtgaacgtttaccattttcttgccttagaaacatcactcagactttaatggacactttaaaaagtcaagaacttgagtctgttgatgaaggattgctacagttttgtgccaataaactaaaactgctgcaactctatgagtctgtcagtcaattaaattcccttgattttcatttagacacaccattctctgataatgacttggctctgttactaaggcttgatgaaaaagaactgcttaagctccaggcattactagagaaatataagcaagagaacaccaggacaaatgttcgattttctgatgataaagatggtgtgttgcctgtaaaaacattcttggaatatttagaatatgaaaaggatgtgctcaacataaagaaaataagtgaagaggaatatgtggctttaggtagtttctttttttggaagtgtttgcatggagaaagctccactgaggatatgtgtcacactttggagtcggctggtcttagccctcagctgttgttgtctctgctcctgagtgtttggctttcaaaggaaaaggatattttggataaaccacagtcaatctgctgtcttcataccatgctgtccctcctgagcaagatgaaagtggccatcgatgagacctgggattctcagtctgtgtccccatggtggcagcagatgcgcacagcctgtattcagtctgagaacaatggagccgctctgttgtctgcgcatgttgggcattctgttgctgcacagatatcaaacaacatgacagagaaaaaattttcccaaacagttttgggtgctgattcagaggccctcactgattcctgggaggcactttctcttgacactgagtactggaaactccttctgaaacagctggaggattgtctcatacttcagactctgcttcacagcaaagggaacactcagacctccaaagtgtcatcactgcaggctgagccacttccaaggctttctgttaaaaagttattagaaggaggaaaaggtggcattgcagacagtgtagccaagtggatatttaaacaggacttcagccctgaagtattaaaactggctaatgaagaaagagatgcagaaaacccagatgaacccaaagaaggtgttaacagaagtttccttgaggtatcagagatggagatggacttaggagccataccagacttactgcatttagcctatgagcagtttccttgtagccttgagctcgatgtcttgcatgcacattgctgctgggagtacgttgttcagtggaataaagatccagaggaagcacgtttttttgttaggtcaatagaacacttgaagcaaatatttaatgcacatgttcaaaatggcattgcactgatgatgtggaatacgttcttagttaaaagattttctgctgctacatacttaatggataaggttggaaaatcaccaaaagataggttatgccgaagggatgtgggaatgagtgacacagcaatgacatctttcctcggctcctgtttggatcttcttcagatcttaatggaggcagatgttagcagggatgaaatacaggtgcctgtgctggatactgaggatgcgtggctctccgtggaaggaccaatctccatagtggaactggcccttgaacagaagcacatccactacccactggtggagcaccactccatcctgtgctccatcttgtatgcagtcatgaggttttctctgaagaccgtgaagccactttcactttttgacagtaagggaaaaaatgcatttttcaaagacctaacttcaattcagttattacctagtggggaaatggatccaaattttatttctgtacgacaacagttcttattgaaagttgtcagtgcagctgtccaggcccaacattcagccacaaaggtcaaagatcccacagaagaggccacacccactccttttgggaaagaccaagattggccagctctagctgtggatttagcccatcaccttcaagttagtgaagatgttgttagaaggcattatgtgggggaactatacaactatggagttgaccacttaggagaagaggccattctacaggttcatgacaaagaggtccttgcctctcagctgctggtgctcacggggcaaaggctggctcatgcgcttctccacacccagacaaaagaaggaatggagctgcttgccagacttccacccacactgtgtacttggctgaaagcaatggacccccaggaccttcaaaacactgaagtgccaattgcaacaacagctaaactagtaaataaagtaattgagcttttaccagaaaaacatgggcaatatggtctagccttacacctcattgaagctgtggaagccatatctcttccttctttatgacacttacctactggaaatagtctaaaattatgattataacatgaagtagtgcatggttattttacatagtaagacctggaattttatgggaaaagtatgtctttttttttccttttgtaaaataaataaaagtatatacaacttttaaaaagtgcaaccctggctaaattccactcctttggttaatactgaagataaaatataaacaaatgtcaactctgttataattaatacagatgttttactgtttatttctaattcaaacacttaagtagctttattgttaaactttgctatttaaaattggttataatttagattatgttcttataagattctatatttcctatctaaaatgttgttgtaattcaatttaaatgtgttcatgtacagtccccatcagtagcgtatagaacaccccactctcctttagtaaatgttgagaaaatgccttctggataccgaaaggttcctttcccagaggttctgctgttgccatcagaggaggatgaccgtgcttgaggaggaagaatgggttcaagatcatcatattcatcagaaggggacactaaatagaacccttaacctgttgtacttgccaaaattgagaatcagagatgtgtaaaatgcagcaaattaattataatgtaagttaagatttgctttttgccaagttgcaaagttgtatccacatcaggtcactgtaaaaatgtattatcttgtaaaacttatgtaaaaaaaaaaaaaaaaaggcaaagatactaaaaattttaagtccgactttatttttcctacaagtgtttagaaatgcttctgggatttgctaatattatctgtccttgggaacagtattgaaaaaactgcttagtggtattacagctttagcaaacctacctcacagctgggatgagaggataaaatacaactaattttgtaccctatagtgcctagagcagtccaagtgctaaataaatatttactgattaaaaccaaactatagctactcgggaggctggaggaggatcgcttgagcccaggagtttgaggccattctgggcaatatagcaagaccctgtctcgaaaaaaaaaaaaaaaagaaaaaaaccaaactaaccaaaactctgtaaaagagtgctttgagctctacaaataccaagtatttattgtggtatatttttagaatgtagccatacagtgtaattatgggtatctgtcatggatcacaattattattcatagtaagtcattgtgatacagaagtttgtttcttcacttccccttaagaagccaactatagtaatcatgcaaagttgaggagtatgtccttcagggatataaaaagaaaaacaaatctgttttttgagctaaaagagcacatccaaacaagaatttaactggctaaaatttagtaattactgttaagtaactatcaaacttgaaatcttacaagataaatggttaagatgtcttgagtatttgggatgggggcctgtgagtctgattgagacatacattttacagagtagcagcactggaaagggctagtccaacctcccagcctctgcttgggtctccgctgccccagccacacacatcctagaattcttgtaaacatatctggctctgtgttaacagtcacttgttatatgttttctaagagattagttcttcctgtgatttttccaagtacgctgaaagtagtagtatgaacttaaggaggctagtcaaagaaacttggagttataggtatttttaaagaataaatcctcaattccatcatcacttggcggggagggggcacttattaagcattttagataataaaactggttaagcttactctggtagaacagacaatcaaatctggggattgctgagaacaataataagctgaagtatggctcacagaatcctaacacaaatcattaagtctctagttagatttgttatcctaaaatttttcatagaattttaaaatctaattctgacttgtatggttaagaaaagcagttaaatattttactacttatcaagggcttttaaaataaataaatctgattgataggaagaaaggcaaataaatacctatgtagacattctataataacaaagagccatagatgataaaggaattagattttaatgtagaatgggtggtttctgaaacaaaggtatgtggtactttgtagttattgatgagaagccagtaaccagtagtgttttcctagatatatgcccaccctcacacaactttcttcattaacaaacattaaatatgcatttgtatcttattaaattatattgtataatgctgaaggaaaacaaaaagtgttcaaataatcataacttctacattacaggttctgtttagatgcagaactagaggggccagggtaaatgtagataaagagatatatagcaccatgcttcttaatgcttcatacttttgcaaacagaaaaaaaaagttttacttttattataaaacttcatctatggtcaaagtaaacactgttacatttaaattgctttttaaaaacaattgcgatctaaaaagtcaaaaatctgaaatttaataatatgagacttacactgaatataatgttcatttagaagttgctgtggtccacttcatttataaggaacaaatatttttacagtacactatagcaacagcaaaagccctctctcaccctgataggaatgggtttgctgggtgtctagaagttagattcctgctgaatagaattagccatccttaaaagattttaatccaatactgaactgtttataaaatgctttctctattgtaatgtactgtaagtagtgaaattctgtatatactgctattttctgtctgttcattgttgtgaacttcttatgtatattagtgaaataaattttcagctttca

SEQ ID NO: 403294 - DNA, 4749 bp, Homo sapiens
catgagtctccaatctactcctgaccctcatgtttcatccagccaagtagtaatatttgttgaaatagcatgtatgtgttgctttgtgatgtatcctcagtatccatcagctttcaagttaaaagctcattcaagttaatattgattcagaatctttggcaaagaatcaccagtgcattttttattagttttcccaaacagttttgggtgctgattcagaggccctcactgattcctgggaggcactttctcttgacactgagtactggaaactccttctgaaacagctggaggattgtctcatacttcagactctgcttcacagcaaagggaacactcagacctccaaagtgtcatcactgcaggctgagccacttccaaggctttctgttaaaaagttattagaaggaggaaaaggtggcattgcagacagtgtagccaagtggatatttaaacaggacttcagccctgaagtattaaaactggctaatgaagaaagagatgcagaaaacccagatgaacccaaagaaggtgttaacagaagtttccttgaggtatcagagatggagatggacttaggagccataccagacttactgcatttagcctatgagcagtttccttgtagccttgagctcgatgtcttgcatgcacattgctgctgggagtacgttgttcagtggaataaagatccagaggaagcacgtttttttgttaggtcaatagaacacttgaagcaaatatttaatgcacatgttcaaaatggcattgcactgatgatgtggaatacgttcttagttaaaagattttctgctgctacatacttaatggataaggttggaaaatcaccaaaagataggttatgccgaagggatgtgggaatgagtgacacagcaatgacatctttcctcggctcctgtttggatcttcttcagatcttaatggaggcagatgttagcagggatgaaatacaggtgcctgtgctggatactgaggatgcgtggctctccgtggaaggaccaatctccatagtggaactggcccttgaacagaagcacatccactacccactggtggagcaccactccatcctgtgctccatcttgtatgcagtcatgaggttttctctgaagaccgtgaagccactttcactttttgacagtaagggaaaaaatgcatttttcaaagacctaacttcaattcagttattacctagtggggaaatggatccaaattttatttctgtacgacaacagttcttattgaaagttgtcagtgcagctgtccaggcccaacattcagccacaaaggtcaaagatcccacagaagaggccacacccactccttttgggaaagaccaagattggccagctctagctgtggatttagcccatcaccttcaagttagtgaagatgttgttagaaggcattatgtgggggaactatacaactatggagttgaccacttaggagaagaggccattctacaggttcatgacaaagaggtccttgcctctcagctgctggtgctcacggggcaaaggctggctcatgcgcttctccacacccagacaaaagaaggaatggagctgcttgccagacttccacccacactgtgtacttggctgaaagcaatggacccccaggaccttcaaaacactgaagtgccaattgcaacaacagctaaactagtaaataaagtaattgagcttttaccagaaaaacatgggcaatatggtctagccttacacctcattgaagctgtggaagccatatctcttccttctttatgacacttacctactggaaatagtctaaaattatgattataacatgaagtagtgcatggttattttacatagtaagacctggaattttatgggaaaagtatgtctttttttttccttttgtaaaataaataaaagtatatacaacttttaaaaagtgcaaccctggctaaattccactcctttggttaatactgaagataaaatataaacaaatgtcaactctgttataattaatacagatgttttactgtttatttctaattcaaacacttaagtagctttattgttaaactttgctatttaaaattggttataatttagattatgttcttataagattctatatttcctatctaaaatgttgttgtaattcaatttaaatgtgttcatgtacagtccccatcagtagcgtatagaacaccccactctcctttagtaaatgttgagaaaatgcctttgttgtcatgctccaaatcccacactgggctgccacctgggagttctggataccgaaaggttcctttcccagaggttctgctgttgccatcagaggaggatgaccgtgcttgaggaggaagaatgggttcaagatcatcatattcatcagaaggggacactaaatagaacccttaacctgttgtacttgccaaaattgagaatcagagatgtgtaaaatgcagcaaattaattataatgtaagttaagatttgctttttgccaagttgcaaagttgtatccacatcaggtcactgtaaaaatgtattatcttgtaaaacttatgtaaaaaaaaaaaaaaaaaggcaaagatactaaaaattttaagtccgactttatttttcctacaagtgtttagaaatgcttctgggatttgctaatattatctgtccttgggaacagtattgaaaaaactgcttagtggtattacagctttagcaaacctacctcacagctgggatgagaggataaaatacaactaattttgtaccctatagtgcctagagcagtccaagtgctaaataaatatttactgattaaaaccaaactatagctactcgggaggctggaggaggatcgcttgagcccaggagtttgaggccattctgggcaatatagcaagaccctgtctcgaaaaaaaaaaaaaaaagaaaaaaaccaaactaaccaaaactctgtaaaagagtgctttgagctctacaaataccaagtatttattgtggtatatttttagaatgtagccatacagtgtaattatgggtatctgtcatggatcacaattattattcatagtaagtcattgtgatacagaagtttgtttcttcacttccccttaagaagccaactatagtaatcatgcaaagttgaggagtatgtccttcagggatataaaaagaaaaacaaatctgttttttgagctaaaagagcacatccaaacaagaatttaactggctaaaatttagtaattactgttaagtaactatcaaacttgaaatcttacaagataaatggttaagatgtcttgagtatttgggatgggggcctgtgagtctgattgagacatacattttacagagtagcagcactggaaagggctagtccaacctcccagcctctgcttgggtctccgctgccccagccacacacatcctagaattcttgtaaacatatctggctctgtgttaacagtcacttgttatatgttttctaagagattagttcttcctgtgatttttccaagtacgctgaaagtagtagtatgaacttaaggaggctagtcaaagaaacttggagttataggtatttttaaagaataaatcctcaattccatcatcacttggcggggagggggcacttattaagcattttagataataaaactggttaagcttactctggtagaacagacaatcaaatctggggattgctgagaacaataataagctgaagtatggctcacagaatcctaacacaaatcattaagtctctagttagatttgttatcctaaaatttttcatagaattttaaaatctaattctgacttgtatggttaagaaaagcagttaaatattttactacttatcaagggcttttaaaataaataaatctgattgataggaagaaaggcaaataaatacctatgtagacattctataataacaaagagccatagatgataaaggaattagattttaatgtagaatgggtggtttctgaaacaaaggtatgtggtactttgtagttattgatgagaagccagtaaccagtagtgttttcctagatatatgcccaccctcacacaactttcttcattaacaaacattaaatatgcatttgtatcttattaaattatattgtataatgctgaaggaaaacaaaaagtgttcaaataatcataacttctacattacaggttctgtttagatgcagaactagaggggccagggtaaatgtagataaagagatatatagcaccatgcttcttaatgcttcatacttttgcaaacagaaaaaaaaagttttacttttattataaaacttcatctatggtcaaagtaaacactgttacatttaaattgctttttaaaaacaattgcgatctaaaaagtcaaaaatctgaaatttaataatatgagacttacactgaatataatgttcatttagaagttgctgtggtccacttcatttataaggaacaaatatttttacagtacactatagcaacagcaaaagccctctctcaccctgataggaatgggtttgctgggtgtctagaagttagattcctgctgaatagaattagccatccttaaaagattttaatccaatactgaactgtttataaaatgctttctctattgtaatgtactgtaagtagtgaaattctgtatatactgctattttctgtctgttcattgttgtgaacttcttatgtatattagtgaaataaattttcagctttca

SEQ ID NO: 403295 - DNA, 4267 bp, Homo sapiens
ctcaaaaaaaaaaaaaaaaaggattcagggtacatatatgtattacttagctattactgcggagtaaatcatcccaaaacttggctgaaaataacaaatatttattatctcacagttgttgtgggtcagtaatctgtgttctccttatctaggtgcctctggcttagtctctcatgaggctgtagttaaggtgctgcatctgaaagctcaactgggatggggacagggtgattcacttctaagcacaattgttggcaagattcagttatgccacatgtgcctctccatacagcagctcacaacacggaacctggcttcctgcagaacaagtgagagtgaatatgagtgcctcaaggcagaagaagcagtcttttggaacgtggtcttggaagtaacatgtatcacctctacctgcttctgttgctagaagcaagtcatcagcctccatgcaaggagaggagactataggaaacacgaataccaggaggaggggatcactgggtttcatcttaaaggctgtctactatatactagataattgttataaaaattattctaaaatcttactgttcaaggagaaataaaaatcaaccataagttattattaagttttaaacaaatctttctccctctccccccttaataatccacactcatcagttttcttgctctctttctttttagggaaaaaatgcatttttcaaagacctaacttcaattcagttattacctagtggggaaatggatccaaattttatttctgtacgacaacagttcttattgaaagttgtcagtgcagctgtccaggcccaacattcagccacaaaggtcaaagatcccacagaagaggccacacccactccttttgggaaagaccaagattggccagctctagctgtggatttagcccatcaccttcaagttagtgaagatgttgttagaaggcattatgtgggggaactatacaactatggagttgaccacttaggagaagaggccattctacaggttcatgacaaagaggtccttgcctctcagctgctggtgctcacggggcaaaggctggctcatgcgcttctccacacccagacaaaagaaggaatggagctgcttgccagacttccacccacactgtgtacttggctgaaagcaatggacccccaggaccttcaaaacactgaagtgccaattgcaacaacagctaaactagtaaataaagtaattgagcttttaccagaaaaacatgggcaatatggtctagccttacacctcattgaagctgtggaagccatatctcttccttctttatgacacttacctactggaaatagtctaaaattatgattataacatgaagtagtgcatggttattttacatagtaagacctggaattttatgggaaaagtatgtctttttttttccttttgtaaaataaataaaagtatatacaacttttaaaaagtgcaaccctggctaaattccactcctttggttaatactgaagataaaatataaacaaatgtcaactctgttataattaatacagatgttttactgtttatttctaattcaaacacttaagtagctttattgttaaactttgctatttaaaattggttataatttagattatgttcttataagattctatatttcctatctaaaatgttgttgtaattcaatttaaatgtgttcatgtacagtccccatcagtagcgtatagaacaccccactctcctttagtaaatgttgagaaaatgcctttgttgtcatgctccaaatcccacactgggctgccacctgggagttctggataccgaaaggttcctttcccagaggttctgctgttgccatcagaggaggatgaccgtgcttgaggaggaagaatgggttcaagatcatcatattcatcagaaggggacactaaatagaacccttaacctgttgtacttgccaaaattgagaatcagagatgtgtaaaatgcagcaaattaattataatgtaagttaagatttgctttttgccaagttgcaaagttgtatccacatcaggtcactgtaaaaatgtattatcttgtaaaacttatgtaaaaaaaaaaaaaaaaaggcaaagatactaaaaattttaagtccgactttatttttcctacaagtgtttagaaatgcttctgggatttgctaatattatctgtccttgggaacagtattgaaaaaactgcttagtggtattacagctttagcaaacctacctcacagctgggatgagaggataaaatacaactaattttgtaccctatagtgcctagagcagtccaagtgctaaataaatatttactgattaaaaccaaactatagctactcgggaggctggaggaggatcgcttgagcccaggagtttgaggccattctgggcaatatagcaagaccctgtctcgaaaaaaaaaaaaaaaagaaaaaaaccaaactaaccaaaactctgtaaaagagtgctttgagctctacaaataccaagtatttattgtggtatatttttagaatgtagccatacagtgtaattatgggtatctgtcatggatcacaattattattcatagtaagtcattgtgatacagaagtttgtttcttcacttccccttaagaagccaactatagtaatcatgcaaagttgaggagtatgtccttcagggatataaaaagaaaaacaaatctgttttttgagctaaaagagcacatccaaacaagaatttaactggctaaaatttagtaattactgttaagtaactatcaaacttgaaatcttacaagataaatggttaagatgtcttgagtatttgggatgggggcctgtgagtctgattgagacatacattttacagagtagcagcactggaaagggctagtccaacctcccagcctctgcttgggtctccgctgccccagccacacacatcctagaattcttgtaaacatatctggctctgtgttaacagtcacttgttatatgttttctaagagattagttcttcctgtgatttttccaagtacgctgaaagtagtagtatgaacttaaggaggctagtcaaagaaacttggagttataggtatttttaaagaataaatcctcaattccatcatcacttggcggggagggggcacttattaagcattttagataataaaactggttaagcttactctggtagaacagacaatcaaatctggggattgctgagaacaataataagctgaagtatggctcacagaatcctaacacaaatcattaagtctctagttagatttgttatcctaaaatttttcatagaattttaaaatctaattctgacttgtatggttaagaaaagcagttaaatattttactacttatcaagggcttttaaaataaataaatctgattgataggaagaaaggcaaataaatacctatgtagacattctataataacaaagagccatagatgataaaggaattagattttaatgtagaatgggtggtttctgaaacaaaggtatgtggtactttgtagttattgatgagaagccagtaaccagtagtgttttcctagatatatgcccaccctcacacaactttcttcattaacaaacattaaatatgcatttgtatcttattaaattatattgtataatgctgaaggaaaacaaaaagtgttcaaataatcataacttctacattacaggttctgtttagatgcagaactagaggggccagggtaaatgtagataaagagatatatagcaccatgcttcttaatgcttcatacttttgcaaacagaaaaaaaaagttttacttttattataaaacttcatctatggtcaaagtaaacactgttacatttaaattgctttttaaaaacaattgcgatctaaaaagtcaaaaatctgaaatttaataatatgagacttacactgaatataatgttcatttagaagttgctgtggtccacttcatttataaggaacaaatatttttacagtacactatagcaacagcaaaagccctctctcaccctgataggaatgggtttgctgggtgtctagaagttagattcctgctgaatagaattagccatccttaaaagattttaatccaatactgaactgtttataaaatgctttctctattgtaatgtactgtaagtagtgaaattctgtatatactgctattttctgtctgttcattgttgtgaacttcttatgtatattagtgaaataaattttcagctttca

SEQ ID NO: 403296 - DNA, 4466 bp, Homo sapiens
ctcaaaaaaaaaaaaaaaaaggattcagggtacatatatgtattacttagctattactgcggagtaaatcatcccaaaacttggctgaaaataacaaatatttattatctcacagttgttgtgggtcagtaatctgtgttctccttatctaggtgcctctggcttagtctctcatgaggctgtagttaaggtgctgcatctgaaagctcaactgggatggggacagggtgattcacttctaagcacaattgttggcaagattcagttatgccacatgtgcctctccatacagcagctcacaacacggaacctggcttcctgcagaacaagtgagagtgaatatgagtgcctcaaggcagaagaagcagtcttttggaacgtggtcttggaagtaacatgtatcacctctacctgcttctgttgctagaagcaagtcatcagcctccatgcaaggagaggagactataggaaacacgaataccaggaggaggggatcactgggtttcatcttaaaggctgtctactatatactagataattgttataaaaattattctaaaatcttactgttcaaggagaaataaaaatcaaccataagttattattaagttttaaacaaatctttctccctctccccccttaataatccacactcatcagttttcttgctctctttctttttagggaaaaaatgcatttttcaaagacctaacttcaattcagttattacctagtggggaaatggatccaaattttatttctgtacgacaacagttcttattgaaagttgtcagtgcagctgtccaggcccaacattcagccacaaaggtcaaagatcccacagaagaggccacacccactccttttgggaaagaccaagattggccagctctagctgtggatttagcccatcaccttcaagttagtgaagatgttgttagaaggcattatgtgggggaactatacaactatggagttgaccacttaggagaagaggccattctacaggttcatgacaaagaggtccttgcctctcagctgctggtgctcacggggcaaaggctggctcatgcgcttctccacacccagacaaaagaaggaatggagctgcttgccagacttccacccacactgtgtacttggctgaaagcaatggtcagtacaatagaacgagatcaggcaaaaggtcattggatgttttcttgagtgcctggttaataacagttatgaagaaaatttgacaagtttaattcacctagttacaaagaaaagcatttttatgtaataactcttaagtcaataacaattattgtttagttgtctataataggttatttttgtgtcccatttgcaggacccccaggaccttcaaaacactgaagtgccaattgcaacaacagctaaactagtaaataaagtaattgagcttttaccagaaaaacatgggcaatatggtctagccttacacctcattgaagctgtggaagccatatctcttccttctttatgacacttacctactggaaatagtctaaaattatgattataacatgaagtagtgcatggttattttacatagtaagacctggaattttatgggaaaagtatgtctttttttttccttttgtaaaataaataaaagtatatacaacttttaaaaagtgcaaccctggctaaattccactcctttggttaatactgaagataaaatataaacaaatgtcaactctgttataattaatacagatgttttactgtttatttctaattcaaacacttaagtagctttattgttaaactttgctatttaaaattggttataatttagattatgttcttataagattctatatttcctatctaaaatgttgttgtaattcaatttaaatgtgttcatgtacagtccccatcagtagcgtatagaacaccccactctcctttagtaaatgttgagaaaatgcctttgttgtcatgctccaaatcccacactgggctgccacctgggagttctggataccgaaaggttcctttcccagaggttctgctgttgccatcagaggaggatgaccgtgcttgaggaggaagaatgggttcaagatcatcatattcatcagaaggggacactaaatagaacccttaacctgttgtacttgccaaaattgagaatcagagatgtgtaaaatgcagcaaattaattataatgtaagttaagatttgctttttgccaagttgcaaagttgtatccacatcaggtcactgtaaaaatgtattatcttgtaaaacttatgtaaaaaaaaaaaaaaaaaggcaaagatactaaaaattttaagtccgactttatttttcctacaagtgtttagaaatgcttctgggatttgctaatattatctgtccttgggaacagtattgaaaaaactgcttagtggtattacagctttagcaaacctacctcacagctgggatgagaggataaaatacaactaattttgtaccctatagtgcctagagcagtccaagtgctaaataaatatttactgattaaaaccaaactatagctactcgggaggctggaggaggatcgcttgagcccaggagtttgaggccattctgggcaatatagcaagaccctgtctcgaaaaaaaaaaaaaaaagaaaaaaaccaaactaaccaaaactctgtaaaagagtgctttgagctctacaaataccaagtatttattgtggtatatttttagaatgtagccatacagtgtaattatgggtatctgtcatggatcacaattattattcatagtaagtcattgtgatacagaagtttgtttcttcacttccccttaagaagccaactatagtaatcatgcaaagttgaggagtatgtccttcagggatataaaaagaaaaacaaatctgttttttgagctaaaagagcacatccaaacaagaatttaactggctaaaatttagtaattactgttaagtaactatcaaacttgaaatcttacaagataaatggttaagatgtcttgagtatttgggatgggggcctgtgagtctgattgagacatacattttacagagtagcagcactggaaagggctagtccaacctcccagcctctgcttgggtctccgctgccccagccacacacatcctagaattcttgtaaacatatctggctctgtgttaacagtcacttgttatatgttttctaagagattagttcttcctgtgatttttccaagtacgctgaaagtagtagtatgaacttaaggaggctagtcaaagaaacttggagttataggtatttttaaagaataaatcctcaattccatcatcacttggcggggagggggcacttattaagcattttagataataaaactggttaagcttactctggtagaacagacaatcaaatctggggattgctgagaacaataataagctgaagtatggctcacagaatcctaacacaaatcattaagtctctagttagatttgttatcctaaaatttttcatagaattttaaaatctaattctgacttgtatggttaagaaaagcagttaaatattttactacttatcaagggcttttaaaataaataaatctgattgataggaagaaaggcaaataaatacctatgtagacattctataataacaaagagccatagatgataaaggaattagattttaatgtagaatgggtggtttctgaaacaaaggtatgtggtactttgtagttattgatgagaagccagtaaccagtagtgttttcctagatatatgcccaccctcacacaactttcttcattaacaaacattaaatatgcatttgtatcttattaaattatattgtataatgctgaaggaaaacaaaaagtgttcaaataatcataacttctacattacaggttctgtttagatgcagaactagaggggccagggtaaatgtagataaagagatatatagcaccatgcttcttaatgcttcatacttttgcaaacagaaaaaaaaagttttacttttattataaaacttcatctatggtcaaagtaaacactgttacatttaaattgctttttaaaaacaattgcgatctaaaaagtcaaaaatctgaaatttaataatatgagacttacactgaatataatgttcatttagaagttgctgtggtccacttcatttataaggaacaaatatttttacagtacactatagcaacagcaaaagccctctctcaccctgataggaatgggtttgctgggtgtctagaagttagattcctgctgaatagaattagccatccttaaaagattttaatccaatactgaactgtttataaaatgctttctctattgtaatgtactgtaagtagtgaaattctgtatatactgctattttctgtctgttcattgttgtgaacttcttatgtatattagtgaaataaattttcagctttca

SEQ ID NO: 403297 - DNA, 2559 bp, Homo sapiens
gcggccgcctactactactactgctcgaattcaagcttctaacgatgtacggggatttgttgtcatgctccaaatcccacactgggctgccacctgggagttctggataccgaaaggttcctttcccagaggttctgctgttgccatcagaggaggatgaccgtgcttgaggaggaagaatgggttcaagatcatcatattcatcagaaggggacactaaatagaacccttaacctgttgtacttgccaaaattgagaatcagagatgtgtaaaatgcagcaaattaattataatgtaagttaagatttgctttttgccaagttgcaaagttgtatccacatcaggtcactgtaaaaatgtattatcttgtaaaacttatgtaaaaaaaaaaaaaaaaaggcaaagatactaaaaattttaagtccgactttatttttcctacaagtgtttagaaatgcttctgggatttgctaatattatctgtccttgggaacagtattgaaaaaactgcttagtggtattacagctttagcaaacctacctcacagctgggatgagaggataaaatacaactaattttgtaccctatagtgcctagagcagtccaagtgctaaataaatatttactgattaaaaccaaactatagctactcgggaggctggaggaggatcgcttgagcccaggagtttgaggccattctgggcaatatagcaagaccctgtctcgaaaaaaaaaaaaaaaagaaaaaaaccaaactaaccaaaactctgtaaaagagtgctttgagctctacaaataccaagtatttattgtggtatatttttagaatgtagccatacagtgtaattatgggtatctgtcatggatcacaattattattcatagtaagtcattgtgatacagaagtttgtttcttcacttccccttaagaagccaactatagtaatcatgcaaagttgaggagtatgtccttcagggatataaaaagaaaaacaaatctgttttttgagctaaaagagcacatccaaacaagaatttaactggctaaaatttagtaattactgttaagtaactatcaaacttgaaatcttacaagataaatggttaagatgtcttgagtatttgggatgggggcctgtgagtctgattgagacatacattttacagagtagcagcactggaaagggctagtccaacctcccagcctctgcttgggtctccgctgccccagccacacacatcctagaattcttgtaaacatatctggctctgtgttaacagtcacttgttatatgttttctaagagattagttcttcctgtgatttttccaagtacgctgaaagtagtagtatgaacttaaggaggctagtcaaagaaacttggagttataggtatttttaaagaataaatcctcaattccatcatcacttggcggggagggggcacttattaagcattttagataataaaactggttaagcttactctggtagaacagacaatcaaatctggggattgctgagaacaataataagctgaagtatggctcacagaatcctaacacaaatcattaagtctctagttagatttgttatcctaaaatttttcatagaattttaaaatctaattctgacttgtatggttaagaaaagcagttaaatattttactacttatcaagggcttttaaaataaataaatctgattgataggaagaaaggcaaataaatacctatgtagacattctataataacaaagagccatagatgataaaggaattagattttaatgtagaatgggtggtttctgaaacaaaggtatgtggtactttgtagttattgatgagaagccagtaaccagtagtgttttcctagatatatgcccaccctcacacaactttcttcattaacaaacattaaatatgcatttgtatcttattaaattatattgtataatgctgaaggaaaacaaaaagtgttcaaataatcataacttctacattacaggttctgtttagatgcagaactagaggggccagggtaaatgtagataaagagatatatagcaccatgcttcttaatgcttcatacttttgcaaacagaaaaaaaaagttttacttttattataaaacttcatctatggtcaaagtaaacactgttacatttaaattgctttttaaaaacaattgcgatctaaaaagtcaaaaatctgaaatttaataatatgagacttacactgaatataatgttcatttagaagttgctgtggtccacttcatttataaggaacaaatatttttacagtacactatagcaacagcaaaagccctctctcaccctgataggaatgggtttgctgggtgtctagaagttagattcctgctgaatagaattagccatccttaaaagattttaatccaatactgaactgtttataaaatgctttctctattgtaatgtactgtaagtagtgaaattctgtatatactgctattttctgtctgttcattgttgtgaacttcttatgtatattagtgaaataaattttcagctttca

SEQ ID NO: 403298 - DNA, 923 bp, Homo sapiens
tatcatctatggctctttgttattatagaatgtctacataggtatttatttgcctttcttcctatcaatcagatttatttattttaaaagcccttgataagtagtaaaatatttaactgcttttcttaaccatacaagtcagaattagattttaatgtagaatgggtggtttctgaaacaaaggtatgtggtactttgtagttattgatgagaagccagtaaccagtagtgttttcctagatatatgcccaccctcacacaactttcttcattaacaaacattaaatatgcatttgtatcttattaaattatattgtataatgctgaaggaaaacaaaaagtgttcaaataatcataacttctacattacaggttctgtttagatgcagaactagaggggccagggtaaatgtagataaagagatatatagcaccatgcttcttaatgcttcatacttttgcaaacagaaaaaaaaagttttacttttattataaaacttcatctatggtcaaagtaaacactgttacatttaaattgctttttaaaaacaattgcgatctaaaaagtcaaaaatctgaaatttaataatatgagacttacactgaatataatgttcatttagaagttgctgtggtccacttcatttataaggaacaaatatttttacagtacactatagcaacagcaaaagccctctctcaccctgataggaatgggtttgctgggtgtctagaagttagattcctgctgaatagaattagccatccttaaaagattttaatccaatactgaactgtttataaaatgctttctctattgtaatgtactgtaagtagtgaaattctgtatatactgctattttctgtctgttcattgttgtgaacttcttatgtatattagtgaaataaattttcagctttca

SEQ ID NO: 403299 - DNA, 4034 bp, Homo sapiens
ataatgaaaacaaaagtgtataatacactataacacgtactatattgggcttgcgtagtactatgggaatctatagtaggagcatttaaagccagccttgacggggctaatctccggaagagcaattaatcttttcaaaatccgactcttgcaggatacggtcccccactggcctgccactagtttaaaacgaattagtttctgtgaaacatcaggatcgtgccaatagtaggggaccaataagactgaataagtcaaagggctgcgcggacaagtccaattagaacacctctggctaaaagccagaatgaatgaaagggttcatgcctcggcgtagacacacaactgggactgaaaaatctgccccaagcctccacgtcgactttggctccacctgcagcggcggcgccgtagtcacgtgacccgggcccccgcgccctaggcgcctgggccagcctgcgcctgcgcagtactcggagacagcggacccgtgtcagtgacagcttccggtttggtttctccgccttctgcttggctagagctattggggctcggtggcggccgcagtggggtggagggggcagggcgtggtgaggtaaggtgagtgccgtagtggggttccctggagccatggcctgctccattgtccagttctgctacttccaggacctccaggccgcccgggacttcctctttcctcacctgcgggaggagatcctcagcggcgccttgcggagggaccccagtaaatcaacagactgggaagatgatggttggggagcatgggaagaaaatgaaccacaagaacctgaagaagaaggaaatacttgcaaaacacaaaaaacttcctggctccaagattgtgttttatccttatctccaaccaatgatcttatggtgatagctcgagagcaaaaagctgtatttctagtgccaaaatggaaatatagtgataaaggaaaggaagaaatgcaatttgctgttggctggagtggttccttaaatgtcgaagaaggggaatgtgtaaccagtgctctatgtatcccactagcaagccaaaagaggagttccactgggcgtcctgactggacctgcattgtggtgggttttacttcaggttatgtacgcttctacactgagaatggtgtgctcttgcttgcacagcttttgaatgaggacccagtacttcaacttaaatgcagaacctatgaaataccacgacatcccggcgtgactgagcagaatgaagagttgagtatcttatatccagctgccattgtgactattgatggatttagcctttttcaatctcttcgtgcttgtcgaaatcaggtagcaaaagctgcagcatcaggcaatgagaacatacaaccaccaccattagcttataagaaatggggtctacaagatattgacactattattgatcatgctagtgttggtattatgactctgtccccctttgatcaaatgaagactgcctccaatataggtggatttaatgcagcaattaaaaatagtccacctgccatgtctcagtatatcactgtagggtccaatccatttactggcttcttctatgctttagagggaagcacacaaccattattatcccatgttgcactagcagttgcaagtaaactcacttctgctttatttaatgctgccagtggttggcttggttggaaaagtaagcacgaagaagaagctgtccaaaagcaaaagccgaaggttgagccagctaccccattagctgtaagatttggacttccagattctagacgccatggtgaaagcatatgtctgtctccatgtaacacactggcagcagtaacagatgatttcggcagagttattttattggatgtagctagaggaattgcaatacgcatgtggaaagggtaccgcgacgcacaaattggatggattcaaactgtagaggacctccatgaaagagtgccagaaaaggcagatttttccccctttggaaattctcagggtccaagtcgagtagctcaattccttgtgatctatgcgccaagaaggggaattttagaagtgtggagcacacagcagggacctagagtaggagctttcaatgtggggaagcactgcaggctgctgtatcctggctataaaataatgggtttaaataatgttaccagtcagagttggcagccacagacttatcagatctgtctggttgatccagtgtctggaagtgtgaaaacagtgaacgttcccttccatttagcactgagtgataagaagagtgaacgagccaaggatatgcacctagtgaagaaactagcagccttactgaaaacaaaatctcccaatcttgatttggttgaaacagaaataaaggaattaattcttgatattaaataccctgcaaccaaaaaacaagctttggaaagcattttggcaagtgaacgtttaccattttcttgccttagaaacatcactcagactttaatggacactttaaaaagtcaagaacttgagtctgttgatgaaggattgctacagttttgtgccaataaactaaaactgctgcaactctatgagtctgtcagtcaattaaattcccttgattttcatttagacacaccattctctgataatgacttggctctgttactaaggcttgatgaaaaagaactgcttaagctccaggcattactagagaaatataagcaagagaacaccaggacaaatgttcgattttctgatgataaagatggtgtgttgcctgtaaaaacattcttggaatatttagaatatgaaaaggatgtgctcaacataaagaaaataagtgaagaggaatatgtggctttaggtagtttctttttttggaagtgtttgcatggagaaagctccactgaggatatgtgtcacactttggagtcggctggtcttagccctcagctgttgttgtctctgctcctgagtgtttggctttcaaaggaaaaggatattttggataaaccacagtcaatctgctgtcttcataccatgctgtccctcctgagcaagatgaaagtggccatcgatgagacctgggattctcagtctgtgtccccatggtggcagcagatgcgcacagcctgtattcagtctgagaacaatggagccgctctgttgtctgcgcatgttgggcattctgttgctgcacagatatcaaacaacatgacagagaaaaaattttcccaaacagttttgggtgctgattcagaggccctcactgattcctgggaggcactttctcttgacactgagtactggaaactccttctgaaacagctggaggattgtctcatacttcagactctgcttcacagcaaagggaacactcagacctccaaagtgtcatcactgcaggctgagccacttccaaggctttctgttaaaaagttattagaaggaggaaaaggtggcattgcagacagtgtagccaagtggatatttaaacaggacttcagccctgaagtattaaaactggctaatgaagaaagagatgcagaaaacccagatgaacccaaagaaggtgttaacagaagtttccttgaggtatcagagatggagatggacttaggagccataccagacttactgcatttagcctatgagcagtttccttgtagccttgagctcgatgtcttgcatgcacattgctgctgggagtacgttgttcagtggaataaagatccagaggaagcacgtttttttgttaggtcaatagaacacttgaagcaaatatttaatgcacatgttcaaaatggtaagtaaacagatgttagaaacatcactgtttgatctaaaagaggcttcctgatttaacaggatgtgaatttaaagatttacaacctattaaatttttatttgattatcctgcagcctaacatattactgtgtattggctgaggtgcaagggtctcttgagcccagtagttcaaggctgcagtgagctatgatcacaccactgcatccagcctgggtgacagagtgagaccctgtctctaaaaaaaaaa

SEQ ID NO: 403300 - DNA, 2378 bp, Homo sapiens
  misc_feature (1359)..(1359): n is a, c, g, or t
  misc_feature (1523)..(1523): n is a, c, g, or t
ataatgaaaacaaaagtgtataatacactataacacgtactatattgggcttgcgtagtactatgggaatctatagtaggagcatttaaagccagccttgacggggctaatctccggaagagcaattaatcttttcaaaatccgactcttgcaggatacggtcccccactggcctgccactagtttaaaacgaattagtttctgtgaaacatcaggatcgtgccaatagtaggggaccaataagactgaataagtcaaagggctgcgcggacaagtccaattagaacacctctggctaaaagccagaatgaatgaaagggttcatgcctcggcgtagacacacaactgggactgaaaaatctgccccaagcctccacgtcgactttggctccacctgcagcggcggcgccgtagtcacgtgacccgggcccccgcgccctaggcgcctgggccagcctgcgcctgcgcagtactcggagacagcggacccgtgtcagtgacagcttccggtttggtttctccgccttctgcttggctagagctattggggctcggtggcggccgcagtggggtggagggggcagggcgtggtgaggtaaggtgagtgccgtagtggggttccctggagccatggcctgctccattgtccagttctgctacttccaggacctccaggccgcccgggacttcctctttcctcacctgcgggaggagatcctcagcggcgccttgcggagggaccccagtaaatcaacagactgggaagatgatggttggggagcatgggaagaaaatgaaccacaagaacctgaagaagaaggaaatacttgcaaaacacaaaaaacttcctggctccaagattgtgttttatccttatctccaaccaatgatcttatggtgatagctcgagagcaaaaagctgtatttctagtgccaaaatggaaatatagtgataaaggaaaggaagaaatgcaatttgctgttggctggagtggttccttaaatgtcgaagaaggggaatgtgtaaccagtgctctatgtatcccactagcaagccaaaagaggagttccactgggcgtcctgactggacctgcattgtggtgggttttacttcaggttatgtacgcttctacactgagaatggtgtgctcttgcttgcacagcttttgaatgaggacccagtacttcaacttaaatgcagaacctatgaaataccacgacatcccggcgtgactgagcaggtagtgtaaaaaattgtgttccaacagtaacagtggcattattttgaagcagtttctctcctcttttttaggtagaaacttaaaagagatctttgtcttgtggcacagttagttagntctgctatcatagtctagaaatataatctatttgtagctgagtaaagaataccagtcttgcttttacttatttaatgaaatattatatgtttcattctacaacaaagtaaaaccctttagttagaagccaagaaaatttcttatttttagaatttaataatggnaaggcaaaaatatgatattttataaccttatatcttgttttatttggatttaggtgccaaaattacccagagtaaaagaaaaaaaatttggccttgttactagtgatactaccttgtacttaactgtttctcagaaaaggggttactaagcttttgttcatagtggaaaatacatatattcattgaagatttcaactgagaaaataatgctgtttagtatccaaggctctaacttcttaggtgccttgtaacattttggttgtcttagtcaaaaaataattgtagggccatttaaaccaatatgcttttatttgttttgcggagtgcatagtcaaaactatgtaatatgccttccctttgttgtactacttggcctccaaaagatttcaagtgaacagatgtatatactgtatgcatttgttaatttaatttgcatgggagatggactggagctgtgaaagaatcttaactatctcgtaggagagactaggattaaaatctaataatatctatggatgaattaatcagtaatataaagcaatacctaatttattggtaatttatttggacagaatacagtctgtacaagcttagagaaagaggagttcaatttggaccaggaaaataagaaaatttcattgatgaggcgagatttgcattaaaccttgaataatgggtatagaatttaattaggtaatagaaaagaggggaaagtgtttcaggtaatcaggagaagatttgagagaagattcgaatgtagaactatatatgcacgacaggtaccttgtaaaaagccattttctaactataggtctccttgggaccatttataccactccgcgacatacatcacgt

SEQ ID NO: 403301 - DNA, 405 bp, Homo sapiens
ggagtggttccttaaatgtcgaagaagggtaggtgccagttaatttttgtttctctgtgtgttacatgtatgtatgaaattatttgacttgtaggtgaatctattaaaaagtttcattatttgattgggtgcagtggttcacatctgtaatcctagcactttgggaagccaaggcaggaagatcatttgagcccaggagttcgagaccaccctgggcaacatagtaagactctgtctttacaaaaaatttaaaaattagctggatgtgatgcgcacacctgtagtcccagctactcgggaggctgaggcaggaggattgcttgaacccaggagtttgaggctgcagtgagctatgatcatgccctgcattccagccagtgcaacagagtgacaccctgtctctta

SEQ ID NO: 403302 - DNA, 580 bp, Homo sapiens
agagggcatttcctaatctccactataccaatattttcatcaagttatttgtgcttagacttgagacttccctgaaaaatctggcactggagtcacttcagatggactcacactctttattcttggtttgtatttctgcagcccttctggagcaatactgtggcagtgttgtacaggatacattaaagcagagagagagagatatgagaacatcgagggtctagtctttctcatggattctgacccacaggccatttcctcattcttcctcagacccctgattttagaagtgaaggaccagagttcctctgtaaattgtccagggactgtgtgaatgtatgttgctttaaatgtattatctatagtattggcatggttagtgaaaatccacttattctttttagagcttgatttcttttctggaaaaggaggaatttcactcaaatgatccctgtagttccttctgtttctgttaagattgaatcatcctgtcagttggcttcaagaggattatgacatgtgtaagaaggagattgttgatctgtacagacaagcagttctaggatctttgcttacattg

SEQ ID NO: 403303 - DNA, 683 bp, Homo sapiens
gaggggaaagtgtttcaggtaatcaggagaagatttgagagaagattcgaatgtagaactatatatgcaacaacaaagaaacttatgttataaagtaatgagaaactgtcaaataagcagagtggccaaattttgcataaattcaaaagccaagtgaaaaatgagagttgattcaggaaatgagagaaactcctaaagatttatgagaaggaagtgaaataatcaaaggaatattgaagatttctttcttcaggataaactggaattagggaggctagttatctggttttttaagtcatctgtaacagatgtggagtgctgggtgggagccaggactaatatggtgtatgggaagagagaaaggactagtacaaaaattgttttggggccgggcacggtggctgacacctgtaatcccagcactttgggagcccgaggtgggcggattgcctgagctcaggagtttgagaccagcctgggtaacacggtgaaaccctgtctctactaaaatacaaaaaattagccgggcatggcggcatgcgcctgtagtcccagcaacttggaaggctgaggcaggagaattgcttgaacccaggaggcggaggttgcagtgagctaagatcttgccactacactccagcctgggcgacagagcgagactccgtctcaaaaaaaaaaaaaat

SEQ ID NO: 403304 - DNA, 211 bp, Homo sapiens
ggaagtgtttgcatggagaaagctccactgaggatatgtgtcacactttggagtcggctggtcttagccctcagctgttgttggtaaggtttttttggttgctggatgctgttcttccttgtgaatgtcacccagaagtgtcagtcttctttttttttttaactattgtcttttaggatatcacagaatgtccatgaaaactttctaaaaa

SEQ ID NO: 403305 - DNA, 692 bp, Homo sapiens
gcccagaaggtagtgatgttttcttattaaattcttattgaaattagactttgtgtttttttattacaatttgggacagtgtgcaatatgaatttgcactttgctgctaataaactcattgggatatttgtaagctattatttttccattactgaacacagtcctccattctcaaaacccttaggcagatgttagcagggatgaaatacaggtgcctgtgctggatactgaggatgcgtggctctccgtggaaggaccaatctccatagtggaactggcccttgaacagaagcacatccactacccactggtggagcaccactccatcctgtgctccatcttgtatgcagtcatgaggttttctctgaagaccgtgaagccactttcactttttgacagtaaggtaagtacctcacaggatttcagagctattttggagttgcaggcttagcagacacatggattttcatatttaatagaagctgtccagtacttttgtgactggtataatttggtgtgaggttccaactccctcattccctgcttgattccgttctttttatttaccttctgtactgctccccttggagttttgccctctcagctgtctgctcttctcattctccatattattcctggacagactcattttctccctcttatatatctctaggcctgaccaatccctagag

SEQ ID NO: 403306 - DNA, 7799 bp, Homo sapiens
ataatgaaaacaaaagtgtataatacactataacacgtactatattgggcttgcgtagtactatgggaatctatagtaggagcatttaaagccagccttgacggggctaatctccggaagagcaattaatcttttcaaaatccgactcttgcaggatacggtcccccactggcctgccactagtttaaaacgaattagtttctgtgaaacatcaggatcgtgccaatagtaggggaccaataagactgaataagtcaaagggctgcgcggacaagtccaattagaacacctctggctaaaagccagaatgaatgaaagggttcatgcctcggcgtagacacacaactgggactgaaaaatctgccccaagcctccacgtcgactttggctccacctgcagcggcggcgccgtagtcacgtgacccgggcccccgcgccctaggcgcctgggccagcctgcgcctgcgcagtactcggagacagcggacccgtgtcagtgacagcttccggtttggtttctccgccttctgcttggctagagctattggggctcggtggcggccgcagtggggtggagggggcagggcgtggtgaggtaaggtgagtgccgtagtggggttccctggagccatggcctgctccattgtccagttctgctacttccaggacctccaggccgcccgggacttcctctttcctcacctgcgggaggagatcctcagcggcgccttgcggagggaccccagtaaatcaacagactgggaagatgatggttggggagcatgggaagaaaatgaaccacaagaacctgaagaagaaggaaatacttgcaaaacacaaaaaacttcctggctccaagattgtgttttatccttatctccaaccaatgatcttatggtgatagctcgagagcaaaaagctgtatttctagtgccaaaatggaaatatagtgataaaggaaaggaagaaatgcaatttgctgttggctggagtggttccttaaatgtcgaagaaggggaatgtgtaaccagtgctctatgtatcccactagcaagccaaaagaggagttccactgggcgtcctgactggacctgcattgtggtgggttttacttcaggttatgtacgcttctacactgagaatggtgtgctcttgcttgcacagcttttgaatgaggacccagtacttcaacttaaatgcagaacctatgaaataccacgacatcccggcgtgactgagcagaatgaagagttgagtatcttatatccagctgccattgtgactattgatggatttagcctttttcaatctcttcgtgcttgtcgaaatcaggtagcaaaagctgcagcatcaggcaatgagaacatacaaccaccaccattagcttataagaaatggggtctacaagatattgacactattattgatcatgctagtgttggtattatgactctgtccccctttgatcaaatgaagactgcctccaatataggtggatttaatgcagcaattaaaaatagtccacctgccatgtctcagtatatcactgtagggtccaatccatttactggcttcttctatgctttagagggaagcacacaaccattattatcccatgttgcactagcagttgcaagtaaactcacttctgctttatttaatgctgccagtggttggcttggttggaaaagtaagcacgaagaagaagctgtccaaaagcaaaagccgaaggttgagccagctaccccattagctgtaagatttggacttccagattctagacgccatggtgaaagcatatgtctgtctccatgtaacacactggcagcagtaacagatgatttcggcagagttattttattggatgtagctagaggaattgcaatacgcatgtggaaagggtaccgcgacgcacaaattggatggattcaaactgtagaggacctccatgaaagagtgccagaaaaggcagatttttccccctttggaaattctcagggtccaagtcgagtagctcaattccttgtgatctatgcgccaagaaggggaattttagaagtgtggagcacacagcagggacctagagtaggagctttcaatgtggggaagcactgcaggctgctgtatcctggctataaaataatgggtttaaataatgttaccagtcagagttggcagccacagacttatcagatctgtctggttgatccagtgtctggaagtgtgaaaacagtgaacgttcccttccatttagcactgagtgataagaagagtgaacgagccaaggatatgcacctagtgaagaaactagcagccttactgaaaacaaaatctcccaatcttgatttggttgaaacagaaataaaggaattaattcttgatattaaataccctgcaaccaaaaaacaagctttggaaagcattttggcaagtgaacgtttaccattttcttgccttagaaacatcactcagactttaatggacactttaaaaagtcaagaacttgagtctgttgatgaaggattgctacagttttgtgccaataaactaaaactgctgcaactctatgagtctgtcagtcaattaaattcccttgattttcatttagacacaccattctctgataatgacttggctctgttactaaggcttgatgaaaaagaactgcttaagctccaggcattactagagaaatataagcaagagaacaccaggacaaatgttcgattttctgatgataaagatggtgtgttgcctgtaaaaacattcttggaatatttagaatatgaaaaggatgtgctcaacataaagaaaataagtgaagaggaatatgtggctttaggtagtttctttttttggaagtgtttgcatggagaaagctccactgaggatatgtgtcacactttggagtcggctggtcttagccctcagctgttgttgtctctgctcctgagtgtttggctttcaaaggaaaaggatattttggataaaccacagtcaatctgctgtcttcataccatgctgtccctcctgagcaagatgaaagtggccatcgatgagacctgggattctcagtctgtgtccccatggtggcagcagatgcgcacagcctgtattcagtctgagaacaatggagccgctctgttgtctgcgcatgttgggcattctgttgctgcacagatatcaaacaacatgacagagaaaaaattttcccaaacagttttgggtgctgattcagaggccctcactgattcctgggaggcactttctcttgacactgagtactggaaactccttctgaaacagctggaggattgtctcatacttcagactctgcttcacagcaaagggaacactcagacctccaaagtgtcatcactgcaggctgagccacttccaaggctttctgttaaaaagttattagaaggaggaaaaggtggcattgcagacagtgtagccaagtggatatttaaacaggacttcagccctgaagtattaaaactggctaatgaagaaagagatgcagaaaacccagatgaacccaaagaaggtgttaacagaagtttccttgaggtatcagagatggagatggacttaggagccataccagacttactgcatttagcctatgagcagtttccttgtagccttgagctcgatgtcttgcatgcacattgctgctgggagtacgttgttcagtggaataaagatccagaggaagcacgtttttttgttaggtcaatagaacacttgaagcaaatatttaatgcacatgttcaaaatggcattgcactgatgatgtggaatacgttcttagttaaaagattttctgctgctacatacttaatggataaggttggaaaatcaccaaaagataggttatgccgaagggatgtgggaatgagtgacacagcaatgacatctttcctcggctcctgtttggatcttcttcagatcttaatggaggcagatgttagcagggatgaaatacaggtgcctgtgctggatactgaggatgcgtggctctccgtggaaggaccaatctccatagtggaactggcccttgaacagaagcacatccactacccactggtggagcaccactccatcctgtgctccatcttgtatgcagtcatgaggttttctctgaagaccgtgaagccactttcactttttgacagtaagggaaaaaatgcatttttcaaagacctaacttcaattcagttattacctagtggggaaatggatccaaattttatttctgtacgacaacagttcttattgaaagttgtcagtgcagctgtccaggcccaacattcagccacaaaggtcaaagatcccacagaagaggccacacccactccttttgggaaagaccaagattggccagctctagctgtggatttagcccatcaccttcaagttagtgaagatgttgttagaaggcattatgtgggggaactatacaactatggagttgaccacttaggagaagaggccattctacaggttcatgacaaagaggtccttgcctctcagctgctggtgctcacggggcaaaggctggctcatgcgcttctccacacccagacaaaagaaggaatggagctgcttgccagacttccacccacactgtgtacttggctgaaagcaatggacccccaggaccttcaaaacactgaagtgccaattgcaacaacagctaaactagtaaataaagtaattgagcttttaccagaaaaacatgggcaatatggtctagccttacacctcattgaagctgtggaagccatatctcttccttctttatgacacttacctactggaaatagtctaaaattatgattataacatgaagtagtgcatggttattttacatagtaagacctggaattttatgggaaaagtatgtctttttttttccttttgtaaaataaataaaagtatatacaacttttaaaaagtgcaaccctggctaaattccactcctttggttaatactgaagataaaatataaacaaatgtcaactctgttataattaatacagatgttttactgtttatttctaattcaaacacttaagtagctttattgttaaactttgctatttaaaattggttataatttagattatgttcttataagattctatatttcctatctaaaatgttgttgtaattcaatttaaatgtgttcatgtacagtccccatcagtagcgtatagaacaccccactctcctttagtaaatgttgagaaaatgcctttgttgtcatgctccaaatcccacactgggctgccacctgggagttctggataccgaaaggttcctttcccagaggttctgctgttgccatcagaggaggatgaccgtgcttgaggaggaagaatgggttcaagatcatcatattcatcagaaggggacactaaatagaacccttaacctgttgtacttgccaaaattgagaatcagagatgtgtaaaatgcagcaaattaattataatgtaagttaagatttgctttttgccaagttgcaaagttgtatccacatcaggtcactgtaaaaatgtattatcttgtaaaacttatgtaaaaaaaaaaaaaaaaaggcaaagatactaaaaattttaagtccgactttatttttcctacaagtgtttagaaatgcttctgggatttgctaatattatctgtccttgggaacagtattgaaaaaactgcttagtggtattacagctttagcaaacctacctcacagctgggatgagaggataaaatacaactaattttgtaccctatagtgcctagagcagtccaagtgctaaataaatatttactgattaaaaccaaactatagctactcgggaggctggaggaggatcgcttgagcccaggagtttgaggccattctgggcaatatagcaagaccctgtctcgaaaaaaaaaaaaaaaagaaaaaaaccaaactaaccaaaactctgtaaaagagtgctttgagctctacaaataccaagtatttattgtggtatatttttagaatgtagccatacagtgtaattatgggtatctgtcatggatcacaattattattcatagtaagtcattgtgatacagaagtttgtttcttcacttccccttaagaagccaactatagtaatcatgcaaagttgaggagtatgtccttcagggatataaaaagaaaaacaaatctgttttttgagctaaaagagcacatccaaacaagaatttaactggctaaaatttagtaattactgttaagtaactatcaaacttgaaatcttacaagataaatggttaagatgtcttgagtatttgggatgggggcctgtgagtctgattgagacatacattttacagagtagcagcactggaaagggctagtccaacctcccagcctctgcttgggtctccgctgccccagccacacacatcctagaattcttgtaaacatatctggctctgtgttaacagtcacttgttatatgttttctaagagattagttcttcctgtgatttttccaagtacgctgaaagtagtagtatgaacttaaggaggctagtcaaagaaacttggagttataggtatttttaaagaataaatcctcaattccatcatcacttggcggggagggggcacttattaagcattttagataataaaactggttaagcttactctggtagaacagacaatcaaatctggggattgctgagaacaataataagctgaagtatggctcacagaatcctaacacaaatcattaagtctctagttagatttgttatcctaaaatttttcatagaattttaaaatctaattctgacttgtatggttaagaaaagcagttaaatattttactacttatcaagggcttttaaaataaataaatctgattgataggaagaaaggcaaataaatacctatgtagacattctataataacaaagagccatagatgataaaggaattagattttaatgtagaatgggtggtttctgaaacaaaggtatgtggtactttgtagttattgatgagaagccagtaaccagtagtgttttcctagatatatgcccaccctcacacaactttcttcattaacaaacattaaatatgcatttgtatcttattaaattatattgtataatgctgaaggaaaacaaaaagtgttcaaataatcataacttctacattacaggttctgtttagatgcagaactagaggggccagggtaaatgtagataaagagatatatagcaccatgcttcttaatgcttcatacttttgcaaacagaaaaaaaaagttttacttttattataaaacttcatctatggtcaaagtaaacactgttacatttaaattgctttttaaaaacaattgcgatctaaaaagtcaaaaatctgaaatttaataatatgagacttacactgaatataatgttcatttagaagttgctgtggtccacttcatttataaggaacaaatatttttacagtacactatagcaacagcaaaagccctctctcaccctgataggaatgggtttgctgggtgtctagaagttagattcctgctgaatagaattagccatccttaaaagattttaatccaatactgaactgtttataaaatgctttctctattgtaatgtactgtaagtagtgaaattctgtatatactgctattttctgtctgttcattgttgtgaacttcttatgtatattagtgaaataaattttcagctttcatgttgtttcctacattcataagtataactaa

SEQ ID NO: 403307 - DNA, 6773 bp, Homo sapiens
ttattatttttttgagatggggtctcgccctgttgcccaggctggagtgcagttggtgtgacctcagcttactgcaacctccacctcccaggttcaagcaattctcctgccccagcctcccaagtagctaagattacaggcacccaccaccatgcatggctaatttttgtatatttagtagaggcggggtttcaccatgttggccaggctgatttcaaactcttgacctcaagtgatccaactgccttggcctccggagtgctgggattataggagtgagccaccatgcctggcagaatattttctgatgttgactttgtagcttttaaaatgacttttggttattaaataaaactaaacatttagcatcttagaatggaactgaagtaaaaatgtaatgaccgcaataacattgtacattcaaatcacttttttttttttattaggtattatgactctgtccccctttgatcaaatgaagactgcctccaatataggtggatttaatgcagcaattaaaaatagtccacctgccatgtctcagtatatcactgtagggtccaatccatttactggcttcttctatgctttagagggaagcacacaaccattattatcccatgttgcactagcagttgcaagtaaactcacttctgctttatttaatgctgccagtggttggcttggttggaaaagtaagcacgaagaagaagctgtccaaaagcaaaagccgaaggttgagccagctaccccattagctgtaagatttggacttccagattctagacgccatggtgaaagcatatgtctgtctccatgtaacacactggcagcagtaacagatgatttcggcagagttattttattggatgtagctagaggaattgcaatacgcatgtggaaagggtaccgcgacgcacaaattggatggattcaaactgtagaggacctccatgaaagagtgccagaaaaggcagatttttccccctttggaaattctcagggtccaagtcgagtagctcaattccttgtgatctatgcgccaagaaggggaattttagaagtgtggagcacacagcagggacctagagtaggagctttcaatgtggggaagcactgcaggctgctgtatcctggctataaaataatgggtttaaataatgttaccagtcagagttggcagccacagacttatcagatctgtctggttgatccagtgtctggaagtgtgaaaacagtgaacgttcccttccatttagcactgagtgataagaagagtgaacgagccaaggatatgcacctagtgaagaaactagcagccttactgaaaacaaaatctcccaatcttgatttggttgaaacagaaataaaggaattaattcttgatattaaataccctgcaaccaaaaaacaagctttggaaagcattttggcaagtgaacgtttaccattttcttgccttagaaacatcactcagactttaatggacactttaaaaagtcaagaacttgagtctgttgatgaaggattgctacagttttgtgccaataaactaaaactgctgcaactctatgagtctgtcagtcaattaaattcccttgattttcatttagacacaccattctctgataatgacttggctctgttactaaggcttgatgaaaaagaactgcttaagctccaggcattactagagaaatataagcaagagaacaccaggacaaatgttcgattttctgatgataaagatggtgtgttgcctgtaaaaacattcttggaatatttagaatatgaaaaggatgtgctcaacataaagaaaataagtgaagaggaatatgtggctttaggtagtttctttttttggaagtgtttgcatggagaaagctccactgaggatatgtgtcacactttggagtcggctggtcttagccctcagctgttgttgtctctgctcctgagtgtttggctttcaaaggaaaaggatattttggataaaccacagtcaatctgctgtcttcataccatgctgtccctcctgagcaagatgaaagtggccatcgatgagacctgggattctcagtctgtgtccccatggtggcagcagatgcgcacagcctgtattcagtctgagaacaatggagccgctctgttgtctgcgcatgttgggcattctgttgctgcacagatatcaaacaacatgacagagaaaaaattttcccaaacagttttgggtgctgattcagaggccctcactgattcctgggaggcactttctcttgacactgagtactggaaactccttctgaaacagctggaggattgtctcatacttcagactctgcttcacagcaaagggaacactcagacctccaaagtgtcatcactgcaggctgagccacttccaaggctttctgttaaaaagttattagaaggaggaaaaggtggcattgcagacagtgtagccaagtggatatttaaacaggacttcagccctgaagtattaaaactggctaatgaagaaagagatgcagaaaacccagatgaacccaaagaaggtgttaacagaagtttccttgaggtatcagagatggagatggacttaggagccataccagacttactgcatttagcctatgagcagtttccttgtagccttgagctcgatgtcttgcatgcacattgctgctgggagtacgttgttcagtggaataaagatccagaggaagcacgtttttttgttaggtcaatagaacacttgaagcaaatatttaatgcacatgttcaaaatggcattgcactgatgatgtggaatacgttcttagttaaaagattttctgctgctacatacttaatggataaggttggaaaatcaccaaaagataggttatgccgaagggatgtgggaatgagtgacacagcaatgacatctttcctcggctcctgtttggatcttcttcagatcttaatggaggcagatgttagcagggatgaaatacaggtgcctgtgctggatactgaggatgcgtggctctccgtggaaggaccaatctccatagtggaactggcccttgaacagaagcacatccactacccactggtggagcaccactccatcctgtgctccatcttgtatgcagtcatgaggttttctctgaagaccgtgaagccactttcactttttgacagtaagggaaaaaatgcatttttcaaagacctaacttcaattcagttattacctagtggggaaatggatccaaattttatttctgtacgacaacagttcttattgaaagttgtcagtgcagctgtccaggcccaacattcagccacaaaggtcaaagatcccacagaagaggccacacccactccttttgggaaagaccaagattggccagctctagctgtggatttagcccatcaccttcaagttagtgaagatgttgttagaaggcattatgtgggggaactatacaactatggagttgaccacttaggagaagaggccattctacaggttcatgacaaagaggtccttgcctctcagctgctggtgctcacggggcaaaggctggctcatgcgcttctccacacccagacaaaagaaggaatggagctgcttgccagacttccacccacactgtgtacttggctgaaagcaatggacccccaggaccttcaaaacactgaagtgccaattgcaacaacagctaaactagtaaataaagtaattgagcttttaccagaaaaacatgggcaatatggtctagccttacacctcattgaagctgtggaagccatatctcttccttctttatgacacttacctactggaaatagtctaaaattatgattataacatgaagtagtgcatggttattttacatagtaagacctggaattttatgggaaaagtatgtctttttttttccttttgtaaaataaataaaagtatatacaacttttaaaaagtgcaaccctggctaaattccactcctttggttaatactgaagataaaatataaacaaatgtcaactctgttataattaatacagatgttttactgtttatttctaattcaaacacttaagtagctttattgttaaactttgctatttaaaattggttataatttagattatgttcttataagattctatatttcctatctaaaatgttgttgtaattcaatttaaatgtgttcatgtacagtccccatcagtagcgtatagaacaccccactctcctttagtaaatgttgagaaaatgcctttgttgtcatgctccaaatcccacactgggctgccacctgggagttctggataccgaaaggttcctttcccagaggttctgctgttgccatcagaggaggatgaccgtgcttgaggaggaagaatgggttcaagatcatcatattcatcagaaggggacactaaatagaacccttaacctgttgtacttgccaaaattgagaatcagagatgtgtaaaatgcagcaaattaattataatgtaagttaagatttgctttttgccaagttgcaaagttgtatccacatcaggtcactgtaaaaatgtattatcttgtaaaacttatgtaaaaaaaaaaaaaaaaaggcaaagatactaaaaattttaagtccgactttatttttcctacaagtgtttagaaatgcttctgggatttgctaatattatctgtccttgggaacagtattgaaaaaactgcttagtggtattacagctttagcaaacctacctcacagctgggatgagaggataaaatacaactaattttgtaccctatagtgcctagagcagtccaagtgctaaataaatatttactgattaaaaccaaactatagctactcgggaggctggaggaggatcgcttgagcccaggagtttgaggccattctgggcaatatagcaagaccctgtctcgaaaaaaaaaaaaaaaagaaaaaaaccaaactaaccaaaactctgtaaaagagtgctttgagctctacaaataccaagtatttattgtggtatatttttagaatgtagccatacagtgtaattatgggtatctgtcatggatcacaattattattcatagtaagtcattgtgatacagaagtttgtttcttcacttccccttaagaagccaactatagtaatcatgcaaagttgaggagtatgtccttcagggatataaaaagaaaaacaaatctgttttttgagctaaaagagcacatccaaacaagaatttaactggctaaaatttagtaattactgttaagtaactatcaaacttgaaatcttacaagataaatggttaagatgtcttgagtatttgggatgggggcctgtgagtctgattgagacatacattttacagagtagcagcactggaaagggctagtccaacctcccagcctctgcttgggtctccgctgccccagccacacacatcctagaattcttgtaaacatatctggctctgtgttaacagtcacttgttatatgttttctaagagattagttcttcctgtgatttttccaagtacgctgaaagtagtagtatgaacttaaggaggctagtcaaagaaacttggagttataggtatttttaaagaataaatcctcaattccatcatcacttggcggggagggggcacttattaagcattttagataataaaactggttaagcttactctggtagaacagacaatcaaatctggggattgctgagaacaataataagctgaagtatggctcacagaatcctaacacaaatcattaagtctctagttagatttgttatcctaaaatttttcatagaattttaaaatctaattctgacttgtatggttaagaaaagcagttaaatattttactacttatcaagggcttttaaaataaataaatctgattgataggaagaaaggcaaataaatacctatgtagacattctataataacaaagagccatagatgataaaggaattagattttaatgtagaatgggtggtttctgaaacaaaggtatgtggtactttgtagttattgatgagaagccagtaaccagtagtgttttcctagatatatgcccaccctcacacaactttcttcattaacaaacattaaatatgcatttgtatcttattaaattatattgtataatgctgaaggaaaacaaaaagtgttcaaataatcataacttctacattacaggttctgtttagatgcagaactagaggggccagggtaaatgtagataaagagatatatagcaccatgcttcttaatgcttcatacttttgcaaacagaaaaaaaaagttttacttttattataaaacttcatctatggtcaaagtaaacactgttacatttaaattgctttttaaaaacaattgcgatctaaaaagtcaaaaatctgaaatttaataatatgagacttacactgaatataatgttcatttagaagttgctgtggtccacttcatttataaggaacaaatatttttacagtacactatagcaacagcaaaagccctctctcaccctgataggaatgggtttgctgggtgtctagaagttagattcctgctgaatagaattagccatccttaaaagattttaatccaatactgaactgtttataaaatgctttctctattgtaatgtactgtaagtagtgaaattctgtatatactgctattttctgtctgttcattgttgtgaacttcttatgtatattagtgaaataaattttcagctttca

SEQ ID NO: 403308 - DNA, 7452 bp, Homo sapiens
ataatgaaaacaaaagtgtataatacactataacacgtactatattgggcttgcgtagtactatgggaatctatagtaggagcatttaaagccagccttgacggggctaatctccggaagagcaattaatcttttcaaaatccgactcttgcaggatacggtcccccactggcctgccactagtttaaaacgaattagtttctgtgaaacatcaggatcgtgccaatagtaggggaccaataagactgaataagtcaaagggctgcgcggacaagtccaattagaacacctctggctaaaagccagaatgaatgaaagggttcatgcctcggcgtagacacacaactgggactgaaaaatctgccccaagcctccacgtcgactttggctccacctgcagcggcggcgccgtagtcacgtgacccgggcccccgcgccctaggcgcctgggccagcctgcgcctgcgcagtactcggagacagcggacccgtgtcagtgacagcttccggtttggtttctccgccttctgcttggctagagctattggggctcggtggcggccgcagtggggtggagggggcagggcgtggtgaggtaaggtgagtgccgtagtggggttccctggagccatggcctgctccattgtccagttctgctacttccaggacctccaggccgcccgggacttcctctttcctcacctgcgggaggagatcctcagcggcgccttgcggagggaccccagtaaatcaacagactgggaagatgatggttggggagcatgggaagaaaatgaaccacaagaacctgaagaagaaggaaatacttgcaaaacacaaaaaacttcctggctccaagattgtgttttatccttatctccaaccaatgatcttatggtgatagctcgagagcaaaaagctgtatttctagtgccaaaatggaaatatagtgataaaggaaaggaagaaatgcaatttgctgttggctggagtggttccttaaatgtcgaagaaggggaatgtgtaaccagtgctctatgtatcccactagcaagccaaaagaggagttccactgggcgtcctgactggacctgcattgtggtgggttttacttcaggttatgtacgcttctacactgagaatggtgtgctcttgcttgcacagcttttgaatgaggacccagtacttcaacttaaatgcagaacctatgaaataccacgacatcccggcgtgactgagcagaatgaagagttgagtatcttatatccagctgccattgtgactattgatggatttagcctttttcaatctcttcgtgcttgtcgaaatcaggtagcaaaagctgcagcatcaggcaatgagaacatacaaccaccaccattagcttataagaaatggggtctacaagatattgacactattattgatcatgctagtgttggtattatgactctgtccccctttgatcaaatgaagactgcctccaatataggtggatttaatgcagcaattaaaaatagtccacctgccatgtctcagtatatcactgtagggtccaatccatttactggcttcttctatgctttagagggaagcacacaaccattattatcccatgttgcactagcagttgcaagtaaactcacttctgctttatttaatgctgccagtggttggcttggttggaaaagtaagcacgaagaagaagctgtccaaaagcaaaagccgaaggttgagccagctaccccattagctgtaagatttggacttccagattctagacgccatggtgaaagcatatgtctgtctccatgtaacacactggcagcagtaacagatgatttcggcagagttattttattggatgtagctagaggaattgcaatacgcatgtggaaagggtaccgcgacgcacaaattggatggattcaaactgtagaggacctccatgaaagagtgccagaaaaggcagatttttccccctttggaaattctcagggtccaagtcgagtagctcaattccttgtgatctatgcgccaagaaggggaattttagaagtgtggagcacacagcagggacctagagtaggagctttcaatgtggggaagcactgcaggctgctgtatcctggctataaaataatgggtttaaataatgttaccagtcagagttggcagccacagacttatcagatctgtctggttgatccagtgtctggaagtgtgaaaacagtgaacgttcccttccatttagcactgagtgataagaagagtgaacgagccaaggatatgcacctagtgaagaaactagcagccttactgaaaacaaaatctcccaatcttgatttggttgaaacagaaataaaggaattaattcttgatattaaataccctgcaaccaaaaaacaagctttggaaagcattttggcaagtgaacgtttaccattttcttgccttagaaacatcactcagactttaatggacactttaaaaagtcaagaacttgagtctgttgatgaaggattgctacagttttgtgccaataaactaaaactgctgcaactctatgagtctgtcagtcaattaaattcccttgattttcatttagacacaccattctctgataatgacttggctctgttactaaggcttgatgaaaaagaactgcttaagctccaggcattactagagaaatataagcaagagaacaccaggacaaatgttcgattttctgatgataaagatggtgtgttgcctgtaaaaacattcttggaatatttagaatatgaaaaggatgtgctcaacataaagaaaataagtgaagaggaatatgtggctttaggtagtttctttttttggaagtgtttgcatggagaaagctccactgaggatatgtgtcacactttggagtcggctggtcttagccctcagctgttgttgtctctgctcctgagtgtttggctttcaaaggaaaaggatattttggataaaccacagtcaatctgctgtttcagactctgcttcacagcaaagggaacactcagacctccaaagtgtcatcactgcaggctgagccacttccaaggctttctgttaaaaagttattagaaggaggaaaaggtggcattgcagacagtgtagccaagtggatatttaaacaggacttcagccctgaagtattaaaactggctaatgaagaaagagatgcagaaaacccagatgaacccaaagaaggtgttaacagaagtttccttgaggtatcagagatggagatggacttaggagccataccagacttactgcatttagcctatgagcagtttccttgtagccttgagctcgatgtcttgcatgcacattgctgctgggagtacgttgttcagtggaataaagatccagaggaagcacgtttttttgttaggtcaatagaacacttgaagcaaatatttaatgcacatgttcaaaatggcattgcactgatgatgtggaatacgttcttagttaaaagattttctgctgctacatacttaatggataaggttggaaaatcaccaaaagataggttatgccgaagggatgtgggaatgagtgacacagcaatgacatctttcctcggctcctgtttggatcttcttcagatcttaatggaggcagatgttagcagggatgaaatacaggtgcctgtgctggatactgaggatgcgtggctctccgtggaaggaccaatctccatagtggaactggcccttgaacagaagcacatccactacccactggtggagcaccactccatcctgtgctccatcttgtatgcagtcatgaggttttctctgaagaccgtgaagccactttcactttttgacagtaagggaaaaaatgcatttttcaaagacctaacttcaattcagttattacctagtggggaaatggatccaaattttatttctgtacgacaacagttcttattgaaagttgtcagtgcagctgtccaggcccaacattcagccacaaaggtcaaagatcccacagaagaggccacacccactccttttgggaaagaccaagattggccagctctagctgtggatttagcccatcaccttcaagttagtgaagatgttgttagaaggcattatgtgggggaactatacaactatggagttgaccacttaggagaagaggccattctacaggttcatgacaaagaggtccttgcctctcagctgctggtgctcacggggcaaaggctggctcatgcgcttctccacacccagacaaaagaaggaatggagctgcttgccagacttccacccacactgtgtacttggctgaaagcaatggacccccaggaccttcaaaacactgaagtgccaattgcaacaacagctaaactagtaaataaagtaattgagcttttaccagaaaaacatgggcaatatggtctagccttacacctcattgaagctgtggaagccatatctcttccttctttatgacacttacctactggaaatagtctaaaattatgattataacatgaagtagtgcatggttattttacatagtaagacctggaattttatgggaaaagtatgtctttttttttccttttgtaaaataaataaaagtatatacaacttttaaaaagtgcaaccctggctaaattccactcctttggttaatactgaagataaaatataaacaaatgtcaactctgttataattaatacagatgttttactgtttatttctaattcaaacacttaagtagctttattgttaaactttgctatttaaaattggttataatttagattatgttcttataagattctatatttcctatctaaaatgttgttgtaattcaatttaaatgtgttcatgtacagtccccatcagtagcgtatagaacaccccactctcctttagtaaatgttgagaaaatgcctttgttgtcatgctccaaatcccacactgggctgccacctgggagttctggataccgaaaggttcctttcccagaggttctgctgttgccatcagaggaggatgaccgtgcttgaggaggaagaatgggttcaagatcatcatattcatcagaaggggacactaaatagaacccttaacctgttgtacttgccaaaattgagaatcagagatgtgtaaaatgcagcaaattaattataatgtaagttaagatttgctttttgccaagttgcaaagttgtatccacatcaggtcactgtaaaaatgtattatcttgtaaaacttatgtaaaaaaaaaaaaaaaaaggcaaagatactaaaaattttaagtccgactttatttttcctacaagtgtttagaaatgcttctgggatttgctaatattatctgtccttgggaacagtattgaaaaaactgcttagtggtattacagctttagcaaacctacctcacagctgggatgagaggataaaatacaactaattttgtaccctatagtgcctagagcagtccaagtgctaaataaatatttactgattaaaaccaaactatagctactcgggaggctggaggaggatcgcttgagcccaggagtttgaggccattctgggcaatatagcaagaccctgtctcgaaaaaaaaaaaaaaaagaaaaaaaccaaactaaccaaaactctgtaaaagagtgctttgagctctacaaataccaagtatttattgtggtatatttttagaatgtagccatacagtgtaattatgggtatctgtcatggatcacaattattattcatagtaagtcattgtgatacagaagtttgtttcttcacttccccttaagaagccaactatagtaatcatgcaaagttgaggagtatgtccttcagggatataaaaagaaaaacaaatctgttttttgagctaaaagagcacatccaaacaagaatttaactggctaaaatttagtaattactgttaagtaactatcaaacttgaaatcttacaagataaatggttaagatgtcttgagtatttgggatgggggcctgtgagtctgattgagacatacattttacagagtagcagcactggaaagggctagtccaacctcccagcctctgcttgggtctccgctgccccagccacacacatcctagaattcttgtaaacatatctggctctgtgttaacagtcacttgttatatgttttctaagagattagttcttcctgtgatttttccaagtacgctgaaagtagtagtatgaacttaaggaggctagtcaaagaaacttggagttataggtatttttaaagaataaatcctcaattccatcatcacttggcggggagggggcacttattaagcattttagataataaaactggttaagcttactctggtagaacagacaatcaaatctggggattgctgagaacaataataagctgaagtatggctcacagaatcctaacacaaatcattaagtctctagttagatttgttatcctaaaatttttcatagaattttaaaatctaattctgacttgtatggttaagaaaagcagttaaatattttactacttatcaagggcttttaaaataaataaatctgattgataggaagaaaggcaaataaatacctatgtagacattctataataacaaagagccatagatgataaaggaattagattttaatgtagaatgggtggtttctgaaacaaaggtatgtggtactttgtagttattgatgagaagccagtaaccagtagtgttttcctagatatatgcccaccctcacacaactttcttcattaacaaacattaaatatgcatttgtatcttattaaattatattgtataatgctgaaggaaaacaaaaagtgttcaaataatcataacttctacattacaggttctgtttagatgcagaactagaggggccagggtaaatgtagataaagagatatatagcaccatgcttcttaatgcttcatacttttgcaaacagaaaaaaaaagttttacttttattataaaacttcatctatggtcaaagtaaacactgttacatttaaattgctttttaaaaacaattgcgatctaaaaagtcaaaaatctgaaatttaataatatgagacttacactgaatataatgttcatttagaagttgctgtggtccacttcatttataaggaacaaatatttttacagtacactatagcaacagcaaaagccctctctcaccctgataggaatgggtttgctgggtgtctagaagttagattcctgctgaatagaattagccatccttaaaagattttaatccaatactgaactgtttataaaatgctttctctattgtaatgtactgtaagtagtgaaattctgtatatactgctattttctgtctgttcattgttgtgaacttcttatgtatattagtgaaataaattttcagctttca

SEQ ID NO: 403309 - DNA, 7967 bp, Homo sapiens
ataatgaaaacaaaagtgtataatacactataacacgtactatattgggcttgcgtagtactatgggaatctatagtaggagcatttaaagccagccttgacggggctaatctccggaagagcaattaatcttttcaaaatccgactcttgcaggatacggtcccccactggcctgccactagtttaaaacgaattagtttctgtgaaacatcaggatcgtgccaatagtaggggaccaataagactgaataagtcaaagggctgcgcggacaagtccaattagaacacctctggctaaaagccagaatgaatgaaagggttcatgcctcggcgtagacacacaactgggactgaaaaatctgccccaagcctccacgtcgactttggctccacctgcagcggcggcgccgtagtcacgtgacccgggcccccgcgccctaggcgcctgggccagcctgcgcctgcgcagtactcggagacagcggacccgtgtcagtgacagcttccggtttggtttctccgccttctgcttggctagagctattggggctcggtggcggccgcagtggggtggagggggcagggcgtggtgaggtaaggtgagtgccgtagtggggttccctggagccatggcctgctccattgtccagttctgctacttccaggacctccaggccgcccgggacttcctctttcctcacctgcgggaggagatcctcagcggcgccttgcggagggaccccagtaaatcaacagactgggaagatgatggttggggagcatgggaagaaaatgaaccacaagaacctgaagaagaaggaaatacttgcaaaacacaaaaaacttcctggctccaagattgtgttttatccttatctccaaccaatgatcttatggtgatagctcgagagcaaaaagctgtatttctagtgccaaaatggaaatatagtgataaaggaaaggaagaaatgcaatttgctgttggctggagtggttccttaaatgtcgaagaaggggaatgtgtaaccagtgctctatgtatcccactagcaagccaaaagaggagttccactgggcgtcctgactggacctgcattgtggtgggttttacttcaggttatgtacgcttctacactgagaatggtgtgctcttgcttgcacagcttttgaatgaggacccagtacttcaacttaaatgcagaacctatgaaataccacgacatcccggcgtgactgagcagaatgaagagttgagtatcttatatccagctgccattgtgactattgatggatttagcctttttcaatctcttcgtgcttgtcgaaatcaggtagcaaaagctgcagcatcaggcaatgagaacatacaaccaccaccattagcttataagaaatggggtctacaagatattgacactattattgatcatgctagtgttggtattatgactctgtccccctttgatcaaatgaagactgcctccaatataggtggatttaatgcagcaattaaaaatagtccacctgccatgtctcagtatatcactgtagggtccaatccatttactggcttcttctatgctttagagggaagcacacaaccattattatcccatgttgcactagcagttgcaagtaaactcacttctgctttatttaatgctgccagtggttggcttggttggaaaagtaagcacgaagaagaagctgtccaaaagcaaaagccgaaggttgagccagctaccccattagctgtaagatttggacttccagattctagacgccatggtgaaagcatatgtctgtctccatgtaacacactggcagcagtaacagatgatttcggcagagttattttattggatgtagctagaggaattgcaatacgcatgtggaaagggtaccgcgacgcacaaattggatggattcaaactgtagaggacctccatgaaagagtgccagaaaaggcagatttttccccctttggaaattctcagggtccaagtcgagtagctcaattccttgtgatctatgcgccaagaaggggaattttagaagtgtggagcacacagcagggacctagagtaggagctttcaatgtggggaagcactgcaggctgctgtatcctggctataaaataatgggtttaaataatgttaccagtcagagttggcagccacagacttatcagatctgtctggttgatccagtgtctggaagtgtgaaaacagtgaacgttcccttccatttagcactgagtgataagaagagtgaacgagccaaggatatgcacctagtgaagaaactagcagccttactgaaaacaaaatctcccaatcttgatttggttgaaacagaaataaaggaattaattcttgatattaaataccctgcaaccaaaaaacaagctttggaaagcattttggcaagtgaacgtttaccattttcttgccttagaaacatcactcagactttaatggacactttaaaaagtcaagaacttgagtctgttgatgaaggattgctacagttttgtgccaataaactaaaactgctgcaactctatgagtctgtcagtcaattaaattcccttgattttcatttagacacaccattctctgataatgacttggctctgttactaaggcttgatgaaaaagaactgcttaagctccaggcattactagagaaatataagcaagagaacaccaggacaaatgttcgattttctgatgataaagatggtgtgttgcctgtaaaaacattcttggaatatttagaatatgaaaaggatgtgctcaacataaagaaaataagtgaagaggaatatgtggctttaggtagtttctttttttggaagtgtttgcatggagaaagctccactgaggatatgtgtcacactttggagtcggctggtcttagccctcagctgttgttgtctctgctcctgagtgtttggctttcaaaggaaaaggatattttggataaaccacagtcaatctgctgtcttcataccatgctgtccctcctgagcaagatgaaagtggccatcgatgagacctgggattctcagtctgtgtccccatggtggcagcagatgcgcacagcctgtattcagtctgagaacaatggagccgctctgttgtctgcgcatgttgggcattctgttgctgcacagatatcaaacaacatgacagagaaaaaattttcccaaacagttttgggtgctgattcagaggccctcactgattcctgggaggcactttctcttgacactgagtactggaaactccttctgaaacagctggaggattgtctcatacttcagactctgcttcacagcaaagggaacactcagacctccaaagtgtcatcactgcaggctgagccacttccaaggctttctgttaaaaagttattagaaggaggaaaaggtggcattgcagacagtgtagccaagtggatatttaaacaggacttcagccctgaagtattaaaactggctaatgaagaaagagatgcagaaaacccagatgaacccaaagaaggtgttaacagaagtttccttgaggtatcagagatggagatggacttaggagccataccagacttactgcatttagcctatgagcagtttccttgtagccttgagctcgatgtcttgcatgcacattgctgctgggagtacgttgttcagtggaataaagatccagaggaagcacgtttttttgttaggtcaatagaacacttgaagcaaatatttaatgcacatgttcaaaatggcattgcactgatgatgtggaatacgttcttagttaaaagattttctgctgctacatacttaatggataaggttggaaaatcaccaaaagataggttatgccgaagggatgtgggaatgagtgacacagcaatgacatctttcctcggctcctgtttggatcttcttcagatcttaatggaggcagatgttagcagggatgaaatacaggtgcctgtgctggatactgaggatgcgtggctctccgtggaaggaccaatctccatagtggaactggcccttgaacagaagcacatccactacccactggtggagcaccactccatcctgtgctccatcttgtatgcagtcatgaggttttctctgaagaccgtgaagccactttcactttttgacagtaagggaaaaaatgcatttttcaaagacctaacttcaattcagttattacctagtggggaaatggatccaaattttatttctgtacgacaacagttcttattgaaagttgtcagtgcagctgtccaggcccaacattcagccacaaaggtcaaagatcccacagaagaggccacacccactccttttgggaaagaccaagattggccagctctagctgtggatttagcccatcaccttcaagttagtgaagatgttgttagaaggcattatgtgggggaactatacaactatggagttgaccacttaggagaagaggccattctacaggttcatgacaaagaggtccttgcctctcagctgctggtgctcacggggcaaaggctggctcatgcgcttctccacacccagacaaaagaaggaatggagctgcttgccagacttccacccacactgtgtacttggctgaaagcaatggtcagtacaatagaacgagatcaggcaaaaggtcattggatgttttcttgagtgcctggttaataacagttatgaagaaaatttgacaagtttaattcacctagttacaaagaaaagcatttttatgtaataactcttaagtcaataacaattattgtttagttgtctataataggttatttttgtgtcccatttgcaggacccccaggaccttcaaaacactgaagtgccaattgcaacaacagctaaactagtaaataaagtaattgagcttttaccagaaaaacatgggcaatatggtctagccttacacctcattgaagctgtggaagccatatctcttccttctttatgacacttacctactggaaatagtctaaaattatgattataacatgaagtagtgcatggttattttacatagtaagacctggaattttatgggaaaagtatgtctttttttttccttttgtaaaataaataaaagtatatacaacttttaaaaagtgcaaccctggctaaattccactcctttggttaatactgaagataaaatataaacaaatgtcaactctgttataattaatacagatgttttactgtttatttctaattcaaacacttaagtagctttattgttaaactttgctatttaaaattggttataatttagattatgttcttataagattctatatttcctatctaaaatgttgttgtaattcaatttaaatgtgttcatgtacagtccccatcagtagcgtatagaacaccccactctcctttagtaaatgttgagaaaatgcctttgttgtcatgctccaaatcccacactgggctgccacctgggagttctggataccgaaaggttcctttcccagaggttctgctgttgccatcagaggaggatgaccgtgcttgaggaggaagaatgggttcaagatcatcatattcatcagaaggggacactaaatagaacccttaacctgttgtacttgccaaaattgagaatcagagatgtgtaaaatgcagcaaattaattataatgtaagttaagatttgctttttgccaagttgcaaagttgtatccacatcaggtcactgtaaaaatgtattatcttgtaaaacttatgtaaaaaaaaaaaaaaaaaggcaaagatactaaaaattttaagtccgactttatttttcctacaagtgtttagaaatgcttctgggatttgctaatattatctgtccttgggaacagtattgaaaaaactgcttagtggtattacagctttagcaaacctacctcacagctgggatgagaggataaaatacaactaattttgtaccctatagtgcctagagcagtccaagtgctaaataaatatttactgattaaaaccaaactatagctactcgggaggctggaggaggatcgcttgagcccaggagtttgaggccattctgggcaatatagcaagaccctgtctcgaaaaaaaaaaaaaaaagaaaaaaaccaaactaaccaaaactctgtaaaagagtgctttgagctctacaaataccaagtatttattgtggtatatttttagaatgtagccatacagtgtaattatgggtatctgtcatggatcacaattattattcatagtaagtcattgtgatacagaagtttgtttcttcacttccccttaagaagccaactatagtaatcatgcaaagttgaggagtatgtccttcagggatataaaaagaaaaacaaatctgttttttgagctaaaagagcacatccaaacaagaatttaactggctaaaatttagtaattactgttaagtaactatcaaacttgaaatcttacaagataaatggttaagatgtcttgagtatttgggatgggggcctgtgagtctgattgagacatacattttacagagtagcagcactggaaagggctagtccaacctcccagcctctgcttgggtctccgctgccccagccacacacatcctagaattcttgtaaacatatctggctctgtgttaacagtcacttgttatatgttttctaagagattagttcttcctgtgatttttccaagtacgctgaaagtagtagtatgaacttaaggaggctagtcaaagaaacttggagttataggtatttttaaagaataaatcctcaattccatcatcacttggcggggagggggcacttattaagcattttagataataaaactggttaagcttactctggtagaacagacaatcaaatctggggattgctgagaacaataataagctgaagtatggctcacagaatcctaacacaaatcattaagtctctagttagatttgttatcctaaaatttttcatagaattttaaaatctaattctgacttgtatggttaagaaaagcagttaaatattttactacttatcaagggcttttaaaataaataaatctgattgataggaagaaaggcaaataaatacctatgtagacattctataataacaaagagccatagatgataaaggaattagattttaatgtagaatgggtggtttctgaaacaaaggtatgtggtactttgtagttattgatgagaagccagtaaccagtagtgttttcctagatatatgcccaccctcacacaactttcttcattaacaaacattaaatatgcatttgtatcttattaaattatattgtataatgctgaaggaaaacaaaaagtgttcaaataatcataacttctacattacaggttctgtttagatgcagaactagaggggccagggtaaatgtagataaagagatatatagcaccatgcttcttaatgcttcatacttttgcaaacagaaaaaaaaagttttacttttattataaaacttcatctatggtcaaagtaaacactgttacatttaaattgctttttaaaaacaattgcgatctaaaaagtcaaaaatctgaaatttaataatatgagacttacactgaatataatgttcatttagaagttgctgtggtccacttcatttataaggaacaaatatttttacagtacactatagcaacagcaaaagccctctctcaccctgataggaatgggtttgctgggtgtctagaagttagattcctgctgaatagaattagccatccttaaaagattttaatccaatactgaactgtttataaaatgctttctctattgtaatgtactgtaagtagtgaaattctgtatatactgctattttctgtctgttcattgttgtgaacttcttatgtatattagtgaaataaattttcagctttca

SEQ ID NO: 403310 - DNA, 4284 bp, Homo sapiens
gtggttatgtaatgctgtctcactgtgacattgtatttctctcataactaatgatgtgactcttttcttcatgcttagtggcaatttagacatactcttatacagcctagttctgatttttattaaatcagattttaaatgaaattaaagatttcatgaactttataaatattacatgagatataaaaaatgaaatcaaaatagtctatatagtttaataagcttaagaaagagtaatttatgtgtaataaaagtgagactatataagcattctatttactacttttacttgctatctaggcattgcactgatgatgtggaatacgttcttagttaaaagattttctgctgctacatacttaatggataaggttggaaaatcaccaaaagataggttatgccgaagggatgtgggaatgagtgacacagcaatgacatctttcctcggctcctgtttggatcttcttcagatcttaatggaggcagatgttagcagggatgaaatacaggtgcctgtgctggatactgaggatgcgtggctctccgtggaaggaccaatctccatagtggaactggcccttgaacagaagcacatccactacccactggtggagcaccactccatcctgtgctccatcttgtatgcagtcatgaggttttctctgaagaccgtgaagccactttcactttttgacagtaagggaaaaaatgcatttttcaaagacctaacttcaattcagttattacctagtggggaaatggatccaaattttatttctgtacgacaacagttcttattgaaagttgtcagtgcagctgtccaggcccaacattcagccacaaaggtcaaagatcccacagaagaggccacacccactccttttgggaaagaccaagattggccagctctagctgtggatttagcccatcaccttcaagttagtgaagatgttgttagaaggcattatgtgggggaactatacaactatggagttgaccacttaggagaagaggccattctacaggttcatgacaaagaggtccttgcctctcagctgctggtgctcacggggcaaaggctggctcatgcgcttctccacacccagacaaaagaaggaatggagctgcttgccagacttccacccacactgtgtacttggctgaaagcaatggacccccaggaccttcaaaacactgaagtgccaattgcaacaacagctaaactagtaaataaagtaattgagcttttaccagaaaaacatgggcaatatggtctagccttacacctcattgaagctgtggaagccatatctcttccttctttatgacacttacctactggaaatagtctaaaattatgattataacatgaagtagtgcatggttattttacatagtaagacctggaattttatgggaaaagtatgtctttttttttccttttgtaaaataaataaaagtatatacaacttttaaaaagtgcaaccctggctaaattccactcctttggttaatactgaagataaaatataaacaaatgtcaactctgttataattaatacagatgttttactgtttatttctaattcaaacacttaagtagctttattgttaaactttgctatttaaaattggttataatttagattatgttcttataagattctatatttcctatctaaaatgttgttgtaattcaatttaaatgtgttcatgtacagtccccatcagtagcgtatagaacaccccactctcctttagtaaatgttgagaaaatgcctttgttgtcatgctccaaatcccacactgggctgccacctgggagttctggataccgaaaggttcctttcccagaggttctgctgttgccatcagaggaggatgaccgtgcttgaggaggaagaatgggttcaagatcatcatattcatcagaaggggacactaaatagaacccttaacctgttgtacttgccaaaattgagaatcagagatgtgtaaaatgcagcaaattaattataatgtaagttaagatttgctttttgccaagttgcaaagttgtatccacatcaggtcactgtaaaaatgtattatcttgtaaaacttatgtaaaaaaaaaaaaaaaaaggcaaagatactaaaaattttaagtccgactttatttttcctacaagtgtttagaaatgcttctgggatttgctaatattatctgtccttgggaacagtattgaaaaaactgcttagtggtattacagctttagcaaacctacctcacagctgggatgagaggataaaatacaactaattttgtaccctatagtgcctagagcagtccaagtgctaaataaatatttactgattaaaaccaaactatagctactcgggaggctggaggaggatcgcttgagcccaggagtttgaggccattctgggcaatatagcaagaccctgtctcgaaaaaaaaaaaaaaaagaaaaaaaccaaactaaccaaaactctgtaaaagagtgctttgagctctacaaataccaagtatttattgtggtatatttttagaatgtagccatacagtgtaattatgggtatctgtcatggatcacaattattattcatagtaagtcattgtgatacagaagtttgtttcttcacttccccttaagaagccaactatagtaatcatgcaaagttgaggagtatgtccttcagggatataaaaagaaaaacaaatctgttttttgagctaaaagagcacatccaaacaagaatttaactggctaaaatttagtaattactgttaagtaactatcaaacttgaaatcttacaagataaatggttaagatgtcttgagtatttgggatgggggcctgtgagtctgattgagacatacattttacagagtagcagcactggaaagggctagtccaacctcccagcctctgcttgggtctccgctgccccagccacacacatcctagaattcttgtaaacatatctggctctgtgttaacagtcacttgttatatgttttctaagagattagttcttcctgtgatttttccaagtacgctgaaagtagtagtatgaacttaaggaggctagtcaaagaaacttggagttataggtatttttaaagaataaatcctcaattccatcatcacttggcggggagggggcacttattaagcattttagataataaaactggttaagcttactctggtagaacagacaatcaaatctggggattgctgagaacaataataagctgaagtatggctcacagaatcctaacacaaatcattaagtctctagttagatttgttatcctaaaatttttcatagaattttaaaatctaattctgacttgtatggttaagaaaagcagttaaatattttactacttatcaagggcttttaaaataaataaatctgattgataggaagaaaggcaaataaatacctatgtagacattctataataacaaagagccatagatgataaaggaattagattttaatgtagaatgggtggtttctgaaacaaaggtatgtggtactttgtagttattgatgagaagccagtaaccagtagtgttttcctagatatatgcccaccctcacacaactttcttcattaacaaacattaaatatgcatttgtatcttattaaattatattgtataatgctgaaggaaaacaaaaagtgttcaaataatcataacttctacattacaggttctgtttagatgcagaactagaggggccagggtaaatgtagataaagagatatatagcaccatgcttcttaatgcttcatacttttgcaaacagaaaaaaaaagttttacttttattataaaacttcatctatggtcaaagtaaacactgttacatttaaattgctttttaaaaacaattgcgatctaaaaagtcaaaaatctgaaatttaataatatgagacttacactgaatataatgttcatttagaagttgctgtggtccacttcatttataaggaacaaatatttttacagtacactatagcaacagcaaaagccctctctcaccctgataggaatgggtttgctgggtgtctagaagttagattcctgctgaatagaattagccatccttaaaagattttaatccaatactgaactgtttataaaatgctttctctattgtaatgtactgtaagtagtgaaattctgtatatactgctattttctgtctgttcattgttgtgaacttcttatgtatattagtgaaataaattttcagctttca

SEQ ID NO: 403311 - DNA, 4823 bp, Homo sapiens
ataatgaaaacaaaagtgtataatacactataacacgtactatattgggcttgcgtagtactatgggaatctatagtaggagcatttaaagccagccttgacggggctaatctccggaagagcaattaatcttttcaaaatccgactcttgcaggatacggtcccccactggcctgccactagtttaaaacgaattagtttctgtgaaacatcaggatcgtgccaatagtaggggaccaataagactgaataagtcaaagggctgcgcggacaagtccaattagaacacctctggctaaaagccagaatgaatgaaagggttcatgcctcggcgtagacacacaactgggactgaaaaatctgccccaagcctccacgtcgactttggctccacctgcagcggcggcgccgtagtcacgtgacccgggcccccgcgccctaggcgcctgggccagcctgcgcctgcgcagtactcggagacagcggacccgtgtcagtgacagcttccggtttggtttctccgccttctgcttggctagagctattggggctcggtggcggccgcagtggggtggagggggcagggcgtggtgaggtaaggtgagtgccgtagtggggttccctggagccatggcctgctccattgtccagttctgctacttccaggacctccaggccgcccgggacttcctctttcctcacctgcgggaggagatcctcagcggcgccttgcggagggaccccagtaaatcaacagactgggaagatgatggttggggagcatgggaagaaaatgaaccacaagaacctgaagaagaaggaaatacttgcaaaacacaaaaaacttcctggctccaagattgtgttttatccttatctccaaccaatgatcttatggtgatagctcgagagcaaaaagctgtatttctagtgccaaaatggaaatatagtgataaaggaaaggaagaaatgcaatttgctgttggctggagtggttccttaaatgtcgaagaaggggaatgtgtaaccagtgctctatgtatcccactagcaagccaaaagaggagttccactgggcgtcctgactggacctgcattgtggtgggttttacttcaggttatgtacgcttctacactgagaatggtgtgctcttgcttgcacagcttttgaatgaggacccagtacttcaacttaaatgcagaacctatgaaataccacgacatcccggcgtgactgagcagaatgaagagttgagtatcttatatccagctgccattgtgactattgatggatttagcctttttcaatctcttcgtgcttgtcgaaatcaggtagcaaaagctgcagcatcaggcaatgagaacatacaaccaccaccattagcttataagaaatggggtctacaagatattgacactattattgatcatgctagtgttggtattatgactctgtccccctttgatcaaatgaagactgcctccaatataggtggatttaatgcagcaattaaaaatagtccacctgccatgtctcagtatatcactgtagggtccaatccatttactggcttcttctatgctttagagggaagcacacaaccattattatcccatgttgcactagcagttgcaagtaaactcacttctgctttatttaatgctgccagtggttggcttggttggaaaagtaagcacgaagaagaagctgtccaaaagcaaaagccgaaggttgagccagctaccccattagctgtaagatttggacttccagattctagacgccatggtgaaagcatatgtctgtctccatgtaacacactggcagcagtaacagatgatttcggcagagttattttattggatgtagctagaggaattgcaatacgcatgtggaaagggtaccgcgacgcacaaattggatggattcaaactgtagaggacctccatgaaagagtgccagaaaaggcagatttttccccctttggaaattctcagggtccaagtcgagtagctcaattccttgtgatctatgcgccaagaaggggaattttagaagtgtggagcacacagcagggacctagagtaggagctttcaatgtggggaagcactgcaggctgctgtatcctggctataaaataatgggtttaaataatgttaccagtcagagttggcagccacagacttatcagatctgtctggttgatccagtgtctggaagtgtgaaaacagtgaacgttcccttccatttagcactgagtgataagaagagtgaacgagccaaggatatgcacctagtgaagaaactagcagccttactgaaaacaaaatctcccaatcttgatttggttgaaacagaaataaaggaattaattcttgatattaaataccctgcaaccaaaaaacaagctttggaaagcattttggcaagtgaacgtttaccattttcttgccttagaaacatcactcagactttaatggacactttaaaaagtcaagaacttgagtctgttgatgaaggattgctacagttttgtgccaataaactaaaactgctgcaactctatgagtctgtcagtcaattaaattcccttgattttcatttagacacaccattctctgataatgacttggctctgttactaaggcttgatgaaaaagaactgcttaagctccaggcattactagagaaatataagcaagagaacaccaggacaaatgttcgattttctgatgataaagatggtgtgttgcctgtaaaaacattcttggaatatttagaatatgaaaaggatgtgctcaacataaagaaaataagtgaagaggaatatgtggctttaggtagtttctttttttggaagtgtttgcatggagaaagctccactgaggatatgtgtcacactttggagtcggctggtcttagccctcagctgttgttgtctctgctcctgagtgtttggctttcaaaggaaaaggatattttggataaaccacagtcaatctgctgtcttcataccatgctgtccctcctgagcaagatgaaagtggccatcgatgagacctgggattctcagtctgtgtccccatggtggcagcagatgcgcacagcctgtattcagtctgagaacaatggagccgctctgttgtctgcgcatgttgggcattctgttgctgcacagatatcaaacaacatgacagagaaaaaattttcccaaacagttttgggtgctgattcagaggccctcactgattcctgggaggcactttctcttgacactgagtactggaaactccttctgaaacagctggaggattgtctcatacttcagactctgcttcacagcaaagggaacactcagacctccaaagtgtcatcactgcaggctgagccacttccaaggctttctgttaaaaagttattagaaggaggaaaaggtggcattgcagacagtgtagccaagtggatatttaaacaggacttcagccctgaagtattaaaactggctaatgaagaaagagatgcagaaaacccagatgaacccaaagaaggtgttaacagaagtttccttgaggtatcagagatggagatggacttaggagccataccagacttactgcatttagcctatgagcagtttccttgtagccttgagctcgatgtcttgcatgcacattgctgctgggagtacgttgttcagtggaataaagatccagaggaagcacgtttttttgttaggtcaatagaacacttgaagcaaatatttaatgcacatgttcaaaatggcattgcactgatgatgtggaatacgttcttagttaaaagattttctgctgctacatacttaatggataaggttggaaaatcaccaaaagataggttatgccgaaggttaagtgaatctcccatagctagaattatggttgttaattccacacttttatgtagtactttattaactgtataggtgaactttgccttttatcattgtgatgacgtatcagaaggagataagaaaaatgaaaagagaatactgcattaaggaaactggtcatgaactatggccaattttaatttacttttccagattgttagatagcatattaaactaggtttttataagatgttgttcagctttgaactgtgaacaggttaacatgctaccattgctgcatattccgattagacatttataatggaagcatccaacatcaaattgaagcaggttcaaatgaagtagttaatttgatctacctatatatatgatatatataataacataagtataccaaatacaacattagtcttaactaatattctaaacccatggatatggggacttgtatttgaccccaagaaattaatagtactagcttccattgttgaagactttttctgatgtgttcttgagaatggttgtatgactagagtgtgtacgtgtgtgtgcatgcatgtgtgtgtgcatgtacccacaaacactgaattatttgctttggggatgtgaggaaattatagattgttggttttaaaaagattatatggcagggcgcggtggctcacgcctgtaatcctagcactttggaaaggcgaggctggtggatcacctgaggtcaggagtttgagaccagcctgaccaacaaggtgaaaccccatctctactaaaaatagaaaaactagccaggcatggtggtgggcgcctgtaatcccagctactcaggaggctgaggcaggataatcgcttgaacctgggaggtggaggttgcagtgagccgagatcgtgccactgtactccagcctgggcaacaagaatgaaactctgtctca

SEQ ID NO: 403312 - DNA, 3319 bp, Homo sapiens
ataatgaaaacaaaagtgtataatacactataacacgtactatattgggcttgcgtagtactatgggaatctatagtaggagcatttaaagccagccttgacggggctaatctccggaagagcaattaatcttttcaaaatccgactcttgcaggatacggtcccccactggcctgccactagtttaaaacgaattagtttctgtgaaacatcaggatcgtgccaatagtaggggaccaataagactgaataagtcaaagggctgcgcggacaagtccaattagaacacctctggctaaaagccagaatgaatgaaagggttcatgcctcggcgtagacacacaactgggactgaaaaatctgccccaagcctccacgtcgactttggctccacctgcagcggcggcgccgtagtcacgtgacccgggcccccgcgccctaggcgcctgggccagcctgcgcctgcgcagtactcggagacagcggacccgtgtcagtgacagcttccggtttggtttctccgccttctgcttggctagagctattggggctcggtggcggccgcagtggggtggagggggcagggcgtggtgaggtaaggtgagtgccgtagtggggttccctggagccatggcctgctccattgtccagttctgctacttccaggacctccaggccgcccgggacttcctctttcctcacctgcgggaggagatcctcagcggcgccttgcggagggaccccagtaaatcaacagactgggaagatgatggttggggagcatgggaagaaaatgaaccacaagaacctgaagaagaaggaaatacttgcaaaacacaaaaaacttcctggctccaagattgtgttttatccttatctccaaccaatgatcttatggtgatagctcgagagcaaaaagctgtatttctagtgccaaaatggaaatatagtgataaaggaaaggaagaaatgcaatttgctgttggctggagtggttccttaaatgtcgaagaaggggaatgtgtaaccagtgctctatgtatcccactagcaagccaaaagaggagttccactgggcgtcctgactggacctgcattgtggtgggttttacttcaggttatgtacgcttctacactgagaatggtgtgctcttgcttgcacagcttttgaatgaggacccagtacttcaacttaaatgcagaacctatgaaataccacgacatcccggcgtgactgagcagaatgaagagttgagtatcttatatccagctgccattgtgactattgatggatttagcctttttcaatctcttcgtgcttgtcgaaatcaggtagcaaaagctgcagcatcaggcaatgagaacatacaaccaccaccattagcttataagaaatggggtctacaagatattgacactattattgatcatgctagtgttggtattatgactctgtccccctttgatcaaatgaagactgcctccaatataggtggatttaatgcagcaattaaaaatagtccacctgccatgtctcagtatatcactgtagggtccaatccatttactggcttcttctatgctttagagggaagcacacaaccattattatcccatgttgcactagcagttgcaagtaaactcacttctgctttatttaatgctgccagtggttggcttggttggaaaagtaagcacgaagaagaagctgtccaaaagcaaaagccgaaggttgagccagctaccccattagctgtaagatttggacttccagattctagacgccatggtgaaagcatatgtctgtctccatgtaacacactggcagcagtaacagatgatttcggcagagttattttattggatgtagctagaggaattgcaatacgcatgtggaaagggtaccgcgacgcacaaattggatggattcaaactgtagaggacctccatgaaagagtgccagaaaaggcagatttttccccctttggaaattctcagggtccaagtcgagtagctcaattccttgtgatctatgcgccaagaaggggaattttagaagtgtggagcacacagcagggacctagagtaggagctttcaatgtggggaagcactgcaggctgctgtatcctggctataaaataatgggtttaaataatgttaccagtcagagttggcagccacagacttatcagatctgtctggttgatccagtgtctggaagtgtgaaaacagtgaacgttcccttccatttagcactgagtgataagaagagtgaacgagccaaggatatgcacctagtgaagaaactagcagccttactgaaaacaaaatctcccaatcttgatttggttgaaacagaaataaaggaattaattcttgatattaaataccctgcaaccaaaaaacaagctttggaaagcattttggcaagtgaacgtttaccattttcttgccttagaaacatcactcagactttaatggacactttaaaaagtcaagaacttgagtctgttgatgaaggattgctacagttttgtgccaataaactaaaactgctgcaactctatgagtctgtcagtcaattaaattcccttgattttcatttagacacaccattctctgataatgacttggctctgttactaaggcttgatgaaaaagaactgcttaagctccaggcattactagagaaatataagcaagagaacaccaggacaaatgttcgattttctgatgataaagatggtgtgttgcctgtaaaaacattcttggaatatttagaatatgaaaaggatgtgctcaacataaagaaaataagtgaagaggaatatgtggctttaggtagtttctttttttggaagtgtttgcatggagaaagctccactgaggatatgtgtcacactttggagtcggctggtcttagccctcagctgttgttgtctctgctcctgagtgtttggctttcaaaggaaaaggatattttggataaaccacagtcaatctgctgtttcagactctgcttcacagcaaagggaacactcagacctccaaagtgtcatcactgcaggctgagccacttccaaggctttctgttaaaaagttattagaaggaggaaaaggtggcattgcagacagtgtagcctattaaatcagttgcaaaatagtataggagtttctgtccttcttcattgtctcatacccttaaaattattatgtttccaattgcattatttttgactaaaatctagggaaatagaatcatggaattatgtattagctctagaataccacagtatccaagtaggtctaaatgcatca

SEQ ID NO: 403313 - DNA, 2056 bp, Homo sapiens
actgtactctcaagcgcgccgcgaaaggagggagcagcttccgggacctggcgcggcttttgtgttgggcagcgcgaatgtggcgagctcggtgcgtctccgctgctccttccccttatccctgggaggtccaagtggtcccgcggcagcttctgttgctctgggacctgcaggtcccggaaggtccttagggaggaccccagacaccggagactgggaaatggattcagtgtcatttgaagatgtggctgtggcctttactcaggaggagtgggctttgctggatccttctcaaaagaatctctacagagatgtgatgcaagaaatcttcaggaacctggcttctgtaggaaacaaatcagaagaccagaatatccaagatgacttcaaaaatcctgggagaaatctaagcagtcatgtggtagagagactgtttgaaattaaagaaggcagtcaatatggagaaaccttcagccaggattcaaatttgaatctgaataagaaagtttctactggagtaaagccatgtgaatgcagtgtgtgtggaaaagtcttcatatgtcattcagcccttcataggcacatcctgtctcacattggaaacaaactatttgagtgtgaggaatgtccagagaagttatatcattgcaaacaatgtgggaaagcctttatctctctcaccagtgttgacagacacatggtaacacacactagtaatgggccttataagggtccagtgtatgagaagccttttgattttcctagtgtatttcaaatgcctcagagcacttacactggagagaaaacatataaatgtaaacattgtgataaagccttcaattattcaagttatcttcgtgaacatgaaagaactcatactggagagaaaccctatgcatgtaagaaatgtggtaaatcattcactttttccagttctcttcgccaacatgaaagatctcatactggagagaaaccctatgaatgtaaggaatgtggcaaagccttcagtcgttccacttacttgggaatacatgaaagaacgcatactggagaaaaaccctatgaatgtataaaatgtggcaaagcctttagatgttccagagtcctcagagtccatgaaaggactcacagtggagaaaagccctatgaatgtaaacaatgtggtaaagccttcaaatattctagtaacctatgtgagcatgaaagaactcacactggagtgaaaccttatggatgtaaggaatgtggtaagtcgtttacttcttccagtgcccttcgaagccatgaaaggactcatactggagaaaaaccctatgaatgtaagaaatgtggtaaagccttcagttgttccagttcccttcgaaagcatgaaagagcttatatgtggtaaaaaacaacaacaacaaaacacctctgtcaatgtaagaagtgtgttaaagctttcagttattctagtttcattagaacacgtgaaaaaattaaaaactcaaattagagagaaacccaacacatgtaaggaagattagaatgtatgcaattttcctagttcccttctaaaacttagaaggacccgtcctgggaaagaacgtcataaaatacgaaaaatgtgttagaacactttattttcccagccgctttcaaatatatttttatcagtggttcattgttaaagaaggtgtctatactttagattttcagttttttgcagggaatcatggagctgagaatttcacagatactttataagccatagtacatgagcttaataggctgtgttttgtttctcatcagttaacataatttttgtctattcatttaaaaatttgttggatccctagactaagttgaaatgtatttctaatagtaggcaattttaattttcatgtagttgtttaattgttctctaattaatggaccaatgaaaaatgagttcatgtgtgtgtgtgtgtgtgtgtgtgtgtgtgtgtgtattctacctttttatgggaaaactacttttttgttgtaaagattttcttctgttttctttgctaataaagaattgttattaatttgc

SEQ ID NO: 403314 - DNA, 3309 bp, Homo sapiens
actgtactctcaagcgcgccgcgaaaggagggagcagcttccgggacctggcgcggcttttgtgttgggcagcgcgaatgtggcgagctcggtgcgtctccgctgctccttccccttatccctgggaggtccaagtggtcccgcggcagcttctgttgctctgggacctgcaggtcccggaaggtccttagggaggaccccagacaccggagactgggaaatggattcagtgtcatttgaagatgtggctgtggcctttactcaggaggagtgggctttgctggatccttctcaaaagaatctctacagagatgtgatgcaagaaatcttcaggaacctggcttctgtaggaaacaaatcagaagaccagaatatccaagatgacttcaaaaatcctgggagaaatctaagcagtcatgtggtagagagactgtttgaaattaaagaaggcagtcaatatggagaaaccttcagccaggattcaaatttgaatctgaataagaaagtttctactggagtaaagccatgtgaatgcagtgtgtgtggaaaagtcttcatatgtcattcagcccttcataggcacatcctgtctcacattggaaacaaactatttgagtgtgaggaatgtccagagaagttatatcattgcaaacaatgtgggaaagcctttatctctctcaccagtgttgacagacacatggtaacacacactagtaatgggccttataagggtccagtgtatgagaagccttttgattttcctagtgtatttcaaatgcctcagagcacttacactggagagaaaacatataaatgtaaacattgtgataaagccttcaattattcaagttatcttcgtgaacatgaaagaactcatactggagagaaaccctatgcatgtaagaaatgtggtaaatcattcactttttccagttctcttcgccaacatgaaagatctcatactggagagaaaccctatgaatgtaaggaatgtggcaaagccttcagtcgttccacttacttgggaatacatgaaagaacgcatactggagaaaaaccctatgaatgtataaaatgtggcaaagcctttagatgttccagagtcctcagagtccatgaaaggactcacagtggagaaaagccctatgaatgtaaacaatgtggtaaagccttcaaatattctagtaacctatgtgagcatgaaagaactcacactggagtgaaaccttatggatgtaaggaatgtggtaagtcgtttacttcttccagtgcccttcgaagccatgaaaggactcatactggagaaaaaccctatgaatgtaagaaatgtggtaaagccttcagttgttccagttcccttcgaaagcatgaaagagcttatatgtggtaaaaaacaacaacaacaaaacacctctgtcaatgtaagaagtgtgttaaagctttcagttattctagtttcattagaacacgtgaaaaaattaaaaactcaaattagagagaaacccaacacatgtaaggaagattagaatgtatgcaattttcctagttcccttctaaaacttagaaggacccgtcctgggaaagaacgtcataaaatacgaaaaatgtgttagaacactttattttcccagccgctttcaaatatatttttatcagtggttcattgttaaagaaggtgtctatactttagattttcagttttttgcagggaatcatggagctgagaatttcacagatactttataagccatagtacatgagcttaataggctgtgttttgtttctcatcagttaacataatttttgtctattcatttaaaaatttgttggatccctagactaagttgaaatgtatttctaatagtaggcaattttaattttcatgtagttgtttaattgttctctaattaatggaccaatgaaaaatgagttcatgtgtgtgtgtgtgtgtgtgtgtgtgtgtgtgtgtattctacctttttatgggaaaactacttttttgttgtaaagattttcttctgttttctttgctaataaagaattgttattaatttgcatgtatgtgaagtttatatagtctcatgtacattgttattttcattttctttcctttattctgtcatgagttttggctgttacttgcatagttcactttttttaaaaaatgttatgtttttagagagggtctcactttgtcagctaggctgaagtgtagtggtaataatagtcttagctcactgcagcctcaaattcctgggctcaagtgattctcccaccttagcctcctatgtagctggagctacagacacatgccaccatgctcagctaattatataattttaaaaattttttatagagatgggatctcgctgtattgtctaggctggtattgaattcctggcctcaagctatcctcctgcctcagcctgtctacatgttggggttactgacatgagctaccacacctggcccactttttactttgaattaagaagagagaactgtgattggacagtatgcttgtctaatctgcgtgtgaaagcattcagtctcaccatcaagtatattgtggatttttcataaatattctcaaacaggctcaggaagttttcttgtgttttttatttattgtttcatggtaaaggagtgttgaactcttatgacatgtttttttctgcatctattgagatgatttgtggtttttggcattctactgatagtctattacgttaactggctttcagatataaatatattatggttatctgggtgaaatttgtcttcatcatggaatataagtattttatctacaggttgaacatctgtaaaccccagattccaataccaaatctgaaatgctccgaagtcaaaaactgtttgagcaccagtcttatgctcaacagaaatgctcattagaggatttttgatatttggattagggatgctcatccagtaagttttctgcaaatattccaaaatgttaaaagtctgaaatccaaagcacttccgttcccaagtatttcagataagaaacactcaacccatattgataacgttcaattttccagtgtattgttggggccttttgcatttatagtcaaattggtgtgccctagtataccatatagtatagcatcatctgtatatatagcatgtctacatgtatacttatatgtgtataagtagctatataatatgtggtatagtacagttttgtaagttactatgaattatgcataactagtttatattatgtgtaattagcactacaataaattgtatattacaggattatggcattataacata

SEQ ID NO: 403315 - DNA, 196 bp, Homo sapiens
caaagtgactttgagcccttcctgttagaggtgaaatgtatgtttcctcgccctgattctgggcaggtttgtgatgacagtggaagtcatgctaaatgatttctgaagctatatataaagctaatatagcctaagcaagtgttactaaggttttataaagtcatacagcctttgaatttttctttatcttggaact

SEQ ID NO: 403316 - DNA, 773 bp, Homo sapiens
aagcccttctccacctgatgtgagaaagcagacggtcaccacttcagaggactaaaggagaagcaatgtcctcagggaaaactcaggtttttgttggagcaaaaaggtgaaggcatggttgagagaacagagtgatgacataagggagtttgctgaatacaaagcaacggttccagaaggcatgtggaagccctgagcaagagaggaggaacagagggctcatccaggagcagtggggaaaatcaggcaaagagattgatgactgaggtggacttatatttaagcattaactgatttaaaaaaaaaaaaaagtcaatgggaatgggagtgattactggccctactgctgcaaggacttggctcactagacctgatgaaggggtgttcctgcaggagtttctgcacaggccactgcttgggatgttcttgagccagaggttgtagtttcagctcctgtacagcttagcataacattggcttcagaggcttaggcttcaacacctgacacaatgttgactgtctcagaggtgaggtgttaagaataccacagattgaatacatgaggtgttaaggacctcagaggttgggtattagttagttcagtcccagagagtagggcaattggcactcctagaagatgcgtctctatacctgaacagcctgcggtacgctggtcccagcagtctgcaagtgatacatgcgattttccaatctttttgaatcaacagcatgttctcatcagtctgtaattgtagatcagaggatactttatc

SEQ ID NO: 403317 - DNA, 487 bp, Homo sapiens
tgccactttgtgagcctctgtgtcttccacaaaagtgggcgagttgggtcagatgttatccagcgtgactgccagctctaaaagtctttaatgccgagccaatgagccattcttgtagggcttaccagtgtgactcagtaaacatttgatgagtactttatatcagaaacagggcacaaaggttaatataacacctgtgcccacatccagggtggggccatgtcataagcagtcccattgctccaataatcggagaatagctaacttgtaccaggcagtgttctggatactttccattgatttatctattcatgaaatacattagcaaaatgaattagcaggaaaaaaaagtgctagctgggcactactgttctgattagagagaggaggaaactaaggcacggagaggttaagtaatttgccccaggtttcgtagctaacaagtgaaggagccagaatttcaacctagggaacctagctccagaac

SEQ ID NO: 403318 - DNA, 708 bp, Homo sapiens
tcacccaggctggagtgcagtggcacaatttcggctcactgcaagctccgccccccgggttcatgctgttctcctgcctcagcctcccgagtagctgggactacaggcgcccgccaccacacccagctgattttttgtatttttagtagagacggggtttcactgtgttagccaggatggtcttgatctcctgacctcgtgatctgcccgccttggcttcccaaagtgctgggattacaggcgtgagccaccatgcccggcccagtttcttttaatagatgaaaactgatgaaacagtgactagtaggtcaaaacagagtttgcaagaatatacaatatggtacggacaattacctggccacttccttagtttatgatgctttagcataggtaaacagctttaatagatccctcaaagtcaaagcctgacacccaacaaacattaaaaatccctttgcttgttcagtaagagaagtaaaaattaaattaaaataaaatatctcaagaggacctagagaggtcaccagtgggtaatctcaatcaccacacaatctccaaatgaaagactgctagagggcactgctgtctgagacttggaggcttgagtggcagtgttacagaaatgctggcagtacacaaactgaagaacaaacagatcttagggactctggaccgtattactaaattatagatcagatcactttgtaa

SEQ ID NO: 403319 - DNA, 452 bp, Homo sapiens
gcggccgcctgcagggcctggtggagctggtaagcgccactctcccgcagggagcacatggtcttgaggctccacgtgctgagcgcgtcgtcgatggacttggccagggattgcacctgctcggtgaaggagtcctccagctcggctctcggccgtgggtgaccgcaccttgcgcagggagatccgccgtggcaggcggctctccagaagcgagttgcggattttctcgaagttcttgctgagctggtattggcggaaggcggtttggatggtgcaagcggcgcgccgggacaccagttcatgtcagagatgcatacagaagtacttatgggtaaaatgcatgatatcttgaagttgtgttaaaatattctgtcaaaaaatgtggaagagttagatgacacaatattaatgttaataaatattaataaaatggttacagctggatgatagct

SEQ ID NO: 403320 - DNA, 739 bp, Homo sapiens
ctctcccctcctgaacattccagacattccactcaggctgacttaatgccacctggccagaaaaaaacagtgtccattcccccttttctaaaaccttgattttgtgatcgtttgaacctttgagtttagaatcactgtattataacttccttgggatcctacctttgcagctagccacattccaaattataagactctctctggaagcccgttgtagacaaccaaaagccctgatgatgtaagggagctcgccagacacacactttcatactcaccaccttgtcttaagctgcttaccatctgctggccccagtcagctcttctgggaaaagctgcgtttggaaaaggagttccccgaatgtatttaatatcaaatggagcaatggttctcaaagtgtgctccctggagcagcagcagcaccagcatctcctgggaacgctttagacatgcacatcctccagccccacccacccctgctgagttagaagctctgcggtgaggccagtgcactcaagtttgggaactaccaatatagagtaaaagatgggggagaaaaccccttgagtatcaaatttagaaggccacaatagtgaagcgtctgtgcctactgtttgcagaatgtggaaggtttagggtgtttactactgtatgttgaataatgattctcttaaaacttttgtgaattgtaaaagtaaatccctaggaatgctgggcagtgataacctgactctcccattt

SEQ ID NO: 403321 - DNA, 649 bp, Homo sapiens
cttggaattgtcttggcacccttgttgaaaatcaattgactgtaaagatgagggcttatttctggactctcaattctattccgttgatctataggtctattcttatttagtacctcactgtcttgattatgtggctttgtattttaatagcaagtttggaatcaagaaatgtgaattctgcaattttgtttttccttttcaatattgttttgagtattattggcccctttgaatctccatatgaattttaggattggctagtcaatttctgcaaagaaaccagctgagaattttgatagggactgtgttaggtctgtagatcaatttggggtatcttgtcatttcaacaatagtaagtcttttgtttcatgaacatgggctgtctttccacttatttaggtcttctctcatttctttcaaaaaatctagattttaggatataagtttgggactttttaattaaatttattcctaagcattttattatcttgatgatattacaaatataattttttaaaacttccttttgagactgttcattgctaatatagaaatacaatagttttttgtgtgtttttatatattgaccttgtatcctgcaacctcgttgaactattttattagttctaacagttttttttcttttttt

SEQ ID NO: 403322 - DNA, 142 bp, Homo sapiens
atcttaacaatgcttggctcattagcgggcccatatgggggcttctgggctagttgctctgggcaatacaccggcagagcctaacttttcagatggccaggccaggacccagtggaggagcactccttggccagcccctgac

SEQ ID NO: 403323 - DNA, 362 bp, Homo sapiens
ccctttttcctgtctttgctatttgggatttggtgtaatacattcatcaaatatgattttactattgctgtgacatgaagcccagatgagtttcacatttgtttcaaactcgaatgctgaaatttggggaataaaggtagagttattgtgttcgttaattaacaatgtactgttagatctttaaaataaataaataaataagtatcctcaaagaagtgaacctaaccctggccgttaaaaagcctggagactactagatttctttattctatgcagtacacctgggcaggctttggatgccgctgcagccatctatcattctgtaaagacaaacgcccttaatagatttctttgtcattgac

SEQ ID NO: 403324 - DNA, 291 bp, Homo sapiens
aagtttaaaatagaagcaatgcaggagaccaaggaatggatgttttgaaaaccacagactggaaaatttgatttatgttataatgagtgacttttaaaatgtatatgaactcctattcaggaaaatattcaggttctccttaaaccttttaaggacatattgtccagtcgtggattctatttaaaaactttgaaacagaaaataatcctccgtttaataaaagcctccagaataaacaacttctttaagcttttctctaacgtctcccatattctctgtgaaaattaccag

SEQ ID NO: 403325 - DNA, 368 bp, Homo sapiens
aatctttcttctttctccccccggcttctaaacaaccccatctgcctgatagatcgatataaatttaaaggcctagtgtttactcagaatgtttggtttgtgtgtctattgcagtacacgtagtgcaaatatgaaaaaaatatctaattttcttaatagaaagtctataattgattcaatctaatgtatttctgaaagattaataaagctgcttttcctcaagacaataagacaaacattaaacaaaaacttctctcaggagtgaatggtaaccccagtgacctccttctcatgatctgcaagcactttataaataaacacatccaagtgggatgtgatggttggatccacagtcatttctcctgaac

SEQ ID NO: 403326 - DNA, 355 bp, Homo sapiens
cagaccaccacaactgacataataataatgaaaaagtttgaaatactgtgagaattatcaaagtgtaaaatagtgacatggagcaagcacatgctattggaaaaatgtatgacacaggattgccacaagccttcagtttattaaaaaaaagcagtgtctgggaattgcaataaaacgtagcacagcaaaacaagatatggctgtaatttgaaatagaattggtaggatttgccgatggattggattttgtgagtaaagggaggagttaagaatgaatcctaagtgttttgatcatttgggtgaatacagatgccatctgtcgagcagagacactttttgaggagagaggtaggtg

SEQ ID NO: 403327 - DNA, 1232 bp, Homo sapiens
tactcccagttcctaagggaagagtttctaaaccctccaattcagcctcagaagaggaaagtggaaagcctttccagtgtccaatatgtggtttggttattaaaaggaagagttactggaagcggcacatggtgattcacacaggtttaaaaagtcatcagtgtccgctctgtccattccggtgtgctcgcaaggacaatctcaaatcccacatgaaggttcatcagcaccaggatcggggagagacctttcagtgccagctgtgcccttttacttcctcacgccacttcagcctgaaactccacatgcgttgccatcagcacttcctgaggacagaagccaaggtgaaggaggagatcccagacccagatgtcaagggatctccccacctcagtgacagtgcctgcctggggcagcaaagggaaggaggagggacagagctagtggggaccatgatgacgtctaacactccagagaggactagccagggaggggctggcgtctcgcctttgctggtgaaggaggaacccaaggaagataacggcctgcccacctcctttactttgaatgctgccgacaggcccgccaaccacacaaagctgaaagacccctccgagtatgtggccaacagtgcgtcagcattgttcagccaggacatctctgttaagatggcgtctgattttctcatgaagctgtcagctgcaaatcagaaggagcccatgaatcttaattttaaagtgaaagaggagcctaaggaaggggagtccctaagcacgactttgcctcggtccagctatgtgttcagcccggaatctgaagtgtcagccccaggcgtctctgaggacgcactaaagccccaggaagggaagggaagtgtgctaaggcgggatgtgtcagtcaaagcagcctctgaacttctcatgaaactctcagcggaaagctacaaggaaacacagatggtgaagattaaagaggaacccatggaggttgacatccaggactcccatgtctcgatatcacccagccggaatgttggctacagcactttaatcgggcgagagaaaaccgaacccttacagaagatgccagagggcagagtacccccagagagaaacctcttcagtcaggatatctctgtgaaaatggcttccgagctcctctttcaactgtcagaaaaagtgagcaaagagcacaatcatacaaaagaaaacaccatccggaccacgaccagg

SEQ ID NO: 403328 - DNA, 1317 bp, Homo sapiens
ctcctgccagtgtctgcctctctgcccccacgggggtttatttgatctcacattaaccaaggaggagaatgtgagaaaagggggaaaatgcccaggaggaagcaggagcagcccaagcgccttccctcaccctcagaagaggaaagtggaaagcctttccagtgtccaatatgtggtttggttattaaaaggaagagttactggaagcggcacatggtgattcacacaggtttaaaaagtcatcagtgtccgctctgtccattccggtgtgctcgcaaggacaatctcaaatcccacatgaaggttcatcagcaccaggatcggggagagacctttcagtgccagctgtgcccttttacttcctcacgccacttcagcctgaaactccacatgcgttgccatcagcacttcctgaggacagaagccaaggtgaaggaggagatcccagacccagatgtcaagggatctccccacctcagtgacagtgcctgcctggggcagcaaagggaaggaggagggacagagctagtggggaccatgatgacgtctaacactccagagaggactagccagggaggggctggcgtctcgcctttgctggtgaaggaggaacccaaggaagataacggcctgcccacctcctttactttgaatgctgccgacaggcccgccaaccacacaaagctgaaagacccctccgagtatgtggccaacagtgcgtcagcattgttcagccaggacatctctgttaagatggcgtctgattttctcatgaagctgtcagctgcaaatcagaaggagcccatgaatcttaattttaaagtgaaagaggagcctaaggaaggggagtccctaagcacgactttgcctcggtccagctatgtgttcagcccggaatctgaagtgtcagccccaggcgtctctgaggacgcactaaagccccaggaagggaagggaagtgtgctaaggcgggatgtgtcagtcaaagcagcctctgaacttctcatgaaactctcagcggaaagctacaaggaaacacagatggtgaagattaaagaggaacccatggaggttgacatccaggactcccatgtctcgatatcacccagccggaatgttggctacagcactttaatcgggcgagagaaaaccgaacccttacagaagatgccagagggcagagtacccccagagagaaacctcttcagtcaggatatctctgtgaaaatggcttccgagctcctctttcaactgtcagaaaaagtgagcaaagagcacaatcatacaaaagaaaacaccatccggaccacgaccagg

SEQ ID NO: 403329 - DNA, 1154 bp, Homo sapiens
ctcctgccagtgtctgcctctctgcccccacgggggtttatttgatctcacattaaccaaggaggagaatgtgagaaaagggggaaaatgcccaggaggaagcaggagcagcccaagcgccttccctcaccctcagaagaggaaagtggaaagcctttccagtgtccaatatgtggtttggttattaaaaggaagagttactggaagcggcacatggtgattcacacaggtttaaaaagtcatcagtgtccgctctgtccattccggtgtgctcgcaaggacaatctcaaatcccacatgaaggttcatcagcaccaggatcggggagagacctttcagtgccagctgtgcccttttacttcctcacgccacttcagcctgaaactccacatgcgttgccatcagcacttcctgaggacagaagccaaggtgaaggaggagatcccagacccagatgtcaagggatctccccacctcagtgacagtgcctgcctggggcagcaaagggaaggaggagggacagagctagtggggaccatgatgacgtctaacactccagagaggactagccagggaggggctggcgtctcgcctttgctggtgaaggaggaacccaaggaagataacggcctgcccacctcctttactttgaatgctgccgacaggcccgccaaccacacaaagctgaaagacccctccgagtatgtggccaacagtgcgtcagcattgttcagccaggacatctctgttaagatggcgtctgattttctcatgaagctgtcaggatctcctcaattaaagaagagtataagcttttgcttcaaagttgacaacatttggcaactgccctcattccttataataaatggaagataagcagtatccagaactcacaatatgccctaaagccatctgtaattctgtgtcaactacttggttattactcagttaactgttatttgggaaatgtatttaatctctctaggtctgagatctctcatctgcaaaatggggataatactagtgcctacctcaaagggtggctgtgagaattagataaattaatacaggtaaatacttggtgtgttacccagctcatgttatgtgctcaataaatgatagatctagctctatccatatgtatctaaaaaaaa

SEQ ID NO: 403330 - DNA, 482 bp, Homo sapiens
ttttttgttttgttttgtgtgtgtgtgtgtgtgtgtgtgtgtgtgtgtgtgtgtttctaaggtagagctgactttatgaggggctgggggcaacagagggcagctggcagttccatctgcaacacaaatactcagaccggtctgctcttagaggctctgagcccggcccacccagagaatgttctcgcctgtcaccctcccagcatctccacagaagaaccatctactcaccaggaccaagctgtactgctaatgactagctacttgaattccgcatgaaaagaggcagatgagaaactggagatttacatacttcgaatctacatatagtggaaatccctttagactgttgccggatgggataaaaagatctatggagcagagttagaggcctttgtaaaataaatgacacagggaagcgctggatctctgtatgaaggggaattcctaagtttgtgtgtactcattttctgaagaccctg

SEQ ID NO: 403331 - DNA, 563 bp, Homo sapiens
gtgagacttcgtctcaaaaaaaaaaaaaaaaatggttgcagatgactaatgtcaccaaacaccactgaatgggtggacaacactctgtggcagaatttgtgaaggcactgaagtactagttgtggtgcttagggaagagacaccagctcacctaacctgtgggatttgttgcaacagagggcagctggcagttccatctgcaacacaaatactcagaccggtctgctcttagaggctctgagcccggcccacccagagaatgttctcgcctgtcaccctcccagcatctccacagaagaaccatctactcaccaggaccaagctgtactgctaatgactagctacttgaattccgcatgaaaagaggcagatgagaaactggagatttacatacttcgaatctacatatagtggaaatccctttagactgttgccggatgggataaaaagatctatggagcagagttagaggcctttgtaaaataaatgacacagggaagcgctggatctctgtatgaaggggaattcctaagtttgtgtgtactcattttctgaagaccctg

SEQ ID NO: 403332 - DNA, 421 bp, Homo sapiens
tgctgagacttatcctcagattgtcatttaagataagatatcataatacaggaaaacaaacatttattaccacagtagcctctaggcttttattgcacaacactgaggaaaagaataggatcatctccttatttatcattctggtttggctgctccagtccatatccttggtatttttcagtgcctaacctggaagctgatctccaggagctgtctcagtcaaagactggggatgaatgcggagatagtcctgatgtccaggggaagattctgccaaaatcagagcaatttaaaatgccagaaggaggggaagggaaaccacagctttaaacgaagacaaccaaaagaatgcaaactggatttatccgagatatttgacttttaaaaatctcaataaagttttccagttttctccaaagaa

SEQ ID NO: 403333 - DNA, 639 bp, Homo sapiens
tgcttgagaccaggaggtcagagcctgcagtgagctgtcattgtgccactgcactccagcctgggcaacagagggagatcctatctcaaaacaaaacaagtcgttaatataggtaagtttgtaagaatgattgtcatgaattaggaggtgagttcatttgctgcgggtaagtgataggagtggtagcttttatacaggaagtctaaacagaagttgggaatgtctactgaggtgtatgagaagggaaggtgactaaaaatgtgtaaaagaatagttaataaaaatcagaaccctacacaatacagtcatgtgttgcttaatgacggggatatgttctgagaaatgcattgttaggcgatttcatgcttgtgggaacatcagagagtgtatttacacaagcctagatggtatagtctactacacacctaggttatgtgggatagcctattgttcttaggctacaaactcatatagcatgttactttactgagtaccgtaggcagttgtaacacagtattaagtgcttgtgtatctaaaccaggggtgtccaatgttttggcttccctgagccacattggaagaagataaattgtcttgggccacacataaaatacaataacgatagctgataagctgagg

SEQ ID NO: 403334 - DNA, 475 bp, Homo sapiens
agcttaatggttatattacttctcattagttgcataaggatggaggagaagaggcaagtttatattctccatgataggattctgtggtgtttgaatatcttcatgagaagtatattattattaaagtagcccttaacattttaaaataacaggctgattttaaatatccaaaatcagattgtatggagaattattgtatttaaaagtgtaacttttagatgattttattataatagttttaaatggaaaatatttaaatatttccattttcattttggaagaaaaatggaaatatagatgagaaaaaatacttaatgtcaactttaactctgccatgcagaggtaataattttaaatcttttggaatgttttctcttagacgtttatgtgattatgtgtgtgtatttataaaaacaagattttctgctgctctgcctatggggtagccattcttttattcgtttgctttctttaa

SEQ ID NO: 403335 - DNA, 594 bp, Homo sapiens
tttgcttttcacaacacggcgacccctgacatttcaaagatcagttgtactagtgttgacatgcttttatgcctttgtttctctacattttcctatattccatttcttaagcatttcattaaacaagatgcatctagcaagactagatttcctagtcttgctttgtctgtagttaaatctatgaatgtaagtggaagaaagaagaaataaatgaaggaagatgtgtcagatatttgggaacagaggtgtttgacttaaagtggtgaggatttctcttgtatttcaaggggaattcaaagatgtcaaaagaatggaaatattaactttaagaaaaaaaaagacagacatttcgattgaatgaaatgtgtagatcgattttaggaaattgagaccttgacatatgttgattcttctgatctatgatcaccatgtgtctctccatgtatctgaatttcattggctttctctcagcaatgattttggtttggagtgtataatcttgaactaatttggcaaggatattatcttttaagttattttgaatgccattttatcattttgttttgtaatttgaaatgttgatttttttttttt

SEQ ID NO: 403336 - DNA, 514 bp, Homo sapiens
ggtctagccacagtggctcctttagtcctccactcaggacccttcctctgagcctacaaataatgcaggctggcctctcccattctcgaccctcattttcccccatcagcccagcgctccctgttccctctaggatgcttccaggaatatacagcaccgttacagagaggattgaattgcatggcttcttgagcaacctggaacacttgagccagccaaatttctgctttatttcagaccaccaggtataacagcagaattcttcatcctgattagaaaggtgttagtgtgcagtccatagagagagagacatcatggttaagaggcaggttcaagggcctggatacctcaactccatcctggctgtgccacttactttctggtggtggtggggaaagtgcttcatctctattttctcacctctaaaatgaggctgatattaatagttcctacctcaccgggatgttatgaaggttaaatgagatcatccatctgaagcacttagaaaaaaaaa

SEQ ID NO: 403337 - DNA, 310 bp, Homo sapiens
agaagggacaagatgatgttaaagacgaagcctgggcagggcacagtggctcacggttgtaatctcccaaagtgctaggattacaggcatgagccaccgcgcctggccccaaatgttctttattcccctttctctctctcctctccttcttgaattcccattctagatatattggtatgtttgatggtgtcccacagatttcttagacttcgttcattttttcttcgttttttcccatttgtgttactcaggtagtaaccgttattcccattgacctacttcaagttcaataattctctcttctgcctgc

SEQ ID NO: 403338 - DNA, 442 bp, Homo sapiens
tgtaatcccagcactttgggaggccaaggtggccaaccgctactgcatttcccctgcctggacactgttggttggttggatgggtggctctcctgaggtcaggagttcgagaccagcctggccaacgtggtgaaaccccgtctatactaaaaacacaaaaattagccgggcgtggtggcaggcgcctgtaatcccagctactcgggaggctgaggcatgagaatcgctagaacctgggaggcggaggttgcagtgagctgaggttgtaccattgcactccagcctgggcgacaagagcaagactttgtctcaaaaaaaaacaaaaacaccataccaagtgttggttgctcctattaaagcagaattggtggaaccaggcctcagcccaccccgctaaagacaggaaatgtgggaaacattaaaaatactacatcctaagtga

SEQ ID NO: 403339 - DNA, 463 bp, Homo sapiens
ctcaagaagacttacagaaatacaaaattgtcagcaagcaataaggtgaaaattacaatgtttggcatctaatcagattactagatgtggagaggcaggaaaatactcctcaagccataatgaagagaataactaacaaaacaaaaccaattcagaattgacatggatgttagaattagaagagaaggatgttaaaatagttatcatagctgtattacatatctccaaaaagttaagtagagacatagaagatgggaaaaaaattaaacttctagactactacaatgcctgagatgaaacaggaactggatgggattagcagaagattagatattgcagaagataaataaacttgaaagctaccataaaaactacacaaaatagacagaaaaaaagaattttaaaaaaattaagagaaacagtgggctgtgagacaacttcgagctgcctaatatatatgtta

SEQ ID NO: 403340 - DNA, 166 bp, Homo sapiens
tggtgttgtgtgcatgtatgaatatgtgtatatactgtatatgccccattaatgacagaaatatatatcccagccatatctatcacataagtaatagacaattagaagtgcctatgttttgatcaattattaagtttgtaaagatatattccggaaaaagactttc

SEQ ID NO: 403341 - DNA, 1393 bp, Homo sapiens
cttcacaactatatcttgtcaccataaaaattcctgtgataagactttttatagtaatgtatgaacttaacagttttatcaaattcaagatttttatgagttaagcatttctggaaagatgctaaaatcataagcatgacatgaagatctgcataaaattcaaaatggtcttttttaatggtgatgtattcagcattgtcatttatttgtaccatgttttaatatattttttctaatgtagtttcaacgcctttttaagagcatccactttttaaaaaaatcctttgtcatttcctttaattaaagcctggttagtattgtagagtggcctcatgccctcatgcacgaattgtacatgtctgtccctgtatgtcactgtatagtctaaatgtccttgaaaaatgatttatgcttcattttctcttattgctgataaatcttaaattctgtttagtatttttaaaaagagatcacttaacatgctaattggactcaaaatgcacctagaagagttcgtaaaactagtctcagagtttctaaggtcagttgaattggccaataccacattgcttaattaccctgaaaagcatttctgaggattccttgtttcctaatccttgttaactacataaatttggtttaaagagtcctgctgactttgggggttttattttcttcctttagaaggaggatttgttttggttgaccagtgattagaagttcacattttgcacattaaactcaccatgcagccttcccaaactatacattcctggtcccaagcccgagggtgctaatttagacaaaaatatggttggagccggcacttctgcttaagtgttgcaggtaatacgtagacctaacaggttgagccactgttgcaggtacacagtacatgactgatgtttctgtgattatcacagttgaaatatttcagccaagatgcacattacttcaaagctgctcatccttggttttcctaatttgtatactgaccatgactttactaatttcctggaacttctgatggttctgtcttttatgtagttgacagtccttagatttgccacactcgtcacaagagtgtgtttatatttttttgtgtctgtgtgagcatagatgggcatctttagctcacctgcactcccaccactcgtttccctatgggaaaaggtgattttttgccccccttttaccattacatactgagagtgctgatgtcgggtattgggagtcattcttggtcattaaaacaggatttttttttctgccaattacctgaatgttctacatgaaattgttcttggtttcaatagatatataattatttccatattaactgaccagttttttagttttgaattaaagatatgttgctttagttttcgttgta

SEQ ID NO: 403342 - DNA, 353 bp, Homo sapiens
tggagtttcgactggaaatagagggtagtgttgtgtgtaccacctaccatcttcagctagacactttcaaagagtttgttttgttaattatatcttcttacatggctcattatgcttgttgaaatttgcaagatgctttaaaccaatcctgtccaaaccacagcctgtgggccgcatgtagcccaggatagctttgaatgcagcccaacacaaattcataaactttcttaaaacacgaaattttttttgcaattttttttttccttagctcatcagctatcatagtgttagtgtattttatgtgtggctatggcccaagacaattcttcttccagtgtggcccagggaagcca

SEQ ID NO: 403343 - DNA, 383 bp, Homo sapiens
caggtctttctactgaagaagtggtatttctgtatggaatgtcttttgaaaagagagaccatcacaaatggtgttattaagaatgttgaactgccgggcgcggtggctcacgcctgtaatcccagcactttgggaggccgaggtgggcggatcatgaggtcaggagatcgagaccatcctggctaacacggtgaaaacctgtctctactaaaaatacaaaaaattagccaggtgtgctggcgggtgcctgtagtcccagctgctcaggagcctgaggcaggagaatggcgtgaacccgggaggcggagcttgcagtgagctgagatcgcgccactgcactccagcctgggggacagagcgagaccccgtctcagaaaagaaaa

SEQ ID NO: 403344 - DNA, 405 bp, Homo sapiens
atcccctgtctacctccagaaacaccagagtaatgtagatctttgtggtaggtttccctagagttggccaaggggttttgctgatgtatcaaacagaaaacacccttgttcctctcttttcctctaccagtctgctgatgcccatgcccagtaacagttttatcacatgcagcctcctgggaatgttatgatgcccacatttggaatatgtttactttagggaaatagctcttggaatttccataaataaaattatctaccatgttttactgggatagaggaagtctgaggttctatgggactcaaacttaggcctgagagctggagaatggtggctatgggaagtggcatttcaggtgagagttaaaggaagaataggagtttgtgaggtaaagccaagagagg

SEQ ID NO: 403345 - DNA, 225 bp, Homo sapiens
aatctcttgagcctgggaggtggaggttgcaatgagctgagattgtgccactgtactccagcctgggcgacagggcaagactctgtctcgaaacaaacaaaaaaaccccacaaaaaaccacgtcgttaatatggggcacactcattaagaatttttagtaattcagagaggaattagggtgggattaactgttgggggacatcgtatgagatttgtcgagcaaat

SEQ ID NO: 403346 - DNA, 341 bp, Homo sapiens
cacagaatggagtgatgccgctgagagccaaagcatgaccaaggattgacagccatcatcagaagctcggaagaaacaaggaaggattgattctatgcaatctcagagggagcacgaccttgctgacaccttgatttcagacttctgggccccagaactataagagagtacatttctgttgttgaaagccacctgctttctgacattttgttccagcagctgtaggaaactaccttacctttcatatcttgttcaagaaatcttttgcactatcatacagatatcaccatatattttttctaaaaaaattaaagtttagccttcatggtttgataatgtca

SEQ ID NO: 403347 - DNA, 506 bp, Homo sapiens
tgccgcgggcggctggcccagctggaggaagcggcggcggcggccacgatgagtgcgggcgacgcagtgtgcaccggctggctcgttaagtcgccccccgagaggaagctacagcgctacgcctggcgcaagcgctggtttgtcctccggcgaggccgcatgagcggcaaccccgatgtcttggagtactacaggaacaagcactccagcaagcccatccgggtgatagacctcagcgagtgtgcagtgtggaagcatgtgggccccagctttgttcggaaggaatttcagaataatttcgtgttcattgtcaagactacttcccgtacattctacctggtggccaaaactgagcaagaaatgcaggtgtgggtgcacagcatcagtcaggtctgcaaccttggccacctggaggatggtgcagcacagtgaaagtcaaatgtggatgaggatgtcttcccatgatgctgacactcatgaccttctagaaatatcaaatattgcca

SEQ ID NO: 403348 - DNA, 776 bp, Homo sapiens
tgccgcgggcggctggcccagctggaggaagcggcggcggcggccacgatgagtgcgggcgacgcagtgtgcaccggctggctcgttaagtcgccccccgagaggaagctacagcgctacgcctggcgcaagcgctggtttgtcctccggcgaggccgcatgagcggcaaccccgatgtcttggagtactacaggaacaagcactccagcaagcccatccgggtgatagacctcagcgagtgtgcagtgtggaagcatgtgggccccagctttgttcggaaggaatttcagaataatttcgtgttcattgtcaagactacttcccgtacattctacctggtggccaaaactgagcaagaaatgcaggtgtgggtgcacagcatcagtcaggtctgcaaccttggccacctggaggatggtgcaggtaagagcggagttggggctcccatgtgctaaggggtatcccaggactggagggttactgcagaaaaacagttcaagatgccaagcctgcctccttgagggtgttttggcaggctaatttatatcagaactgttcctaccaaatacaatactggaaattgccctcttttacccagtccaaatgtgggaaggcagagtccatgagcacactgagcattgcaggttactttaatggctttaaaaccccttcatgtctttgctctcattcagccacagtgaaagtcaaatgtggatgaggatgtcttcccatgatgctgacactcatgaccttctagaaatatcaaatattgcca

SEQ ID NO: 403349 - DNA, 470 bp, Homo sapiens
aagagagagcatgagggcggaggtgctacacacttttagtcaaccagatcttgtgagaactcaccatcatgagaacagcaccaaagggatggtgccaaccattcatgaagcatctacccccatgatccaatcactttccaccaggttccacctccaactctgaggattacaattgaacatgagatttgggtggggacacagatacaaaccatggggacacagatacaaaccatatcacatgcaccaggctgcatcccaaaacaactaaagaatttctgagggtggaacccaggtatctgtattttcctgagctttcaaaatgcagccaaggttgagaaccgctggtctaattgatcactataatttccctttccatgattaatttaggaaaaggcatgtgacccaatccttaccaagacacaggaagtctcctggaaggctgctgggaaagctttctttacccctttgga

SEQ ID NO: 403350 - DNA, 491 bp, Homo sapiens
gggatacgtatagaatggactcacttgtcctagaagatgaatgtgtagtgtcagcaaatgcatgttaagaaggtgaagcccaaaagctcttaaggagaattgtatttctccagaagctgcagcaagaggtacagctcaacaaaggaaaaccacaggactggatatgcaactagtgctcagaccaaagagttcacacccactctaaaaccatgtcctctgaaaagaaacaaaaatacagtgatcatcaaatgcctaaacagtctttctgttggttagctgtacattcattgaggaactgttgattggcaggcactgattctctagaacactgggcatgaggatgttgcagaaatctagatggtgggtcccacagatgtgagaacatgctgcaagagcctgccagccacagcaatcaggactcacagctcttcaaggagcagtgcagatttcaatttggctaaaacaggatgattgcttttgtctgtttactg

SEQ ID NO: 403351 - DNA, 407 bp, Homo sapiens
gaactcctgacctcaggtgattcacctgcctcggcctcccaaagtgctgggattacaggtgtgagccaccgcacctgtccaaaaatcataaatttaacttggatatggaattaatttggccctttctttatttcagtgaaagacgtataaaaaattgcccccttatcaacacaaagggtttctcctgaccattatttccaggtatgcacagtctcctaactatgacaacagaaatcattctgaactccttccatttcccagggagaaaacagaagcaccttgggcagagtgaaaaagaaaccacctggagaggaggccctgcaacatgaacccatctttaggcccaagggcattctgacatctgaaatcaaagtcatgattgcctccatttctagaaaatgttccag

SEQ ID NO: 403352 - DNA, 1190 bp, Homo sapiens
atttagaactaaagattaataactagagatttataaaggcaaaaatgttaatgaattaggaaacagtaaaccatttgaactaatctaaatactgattgcatgaaaatgccaataaaatcaatacatatttttaaaagccagtcaaggataaaagaaaagagggaaactaaaagtgagacattaagtatgagaaaggagataaaactaaagtgtggaggtgatgttaaaaattatattcaggtctgtgctaatcattttggaaatttcagtgagaagtgggcaattttcagtgaatatatcattgtaaatgctttgaggagagacaaaatctgaatagaccctgcaataatgaaaatgtctaggagccctcaagaaatacctggtttaaattgcatttcaggtggctggttatcacaccttgaagtatcaagtaattatgttatctaaattggaccaggtgttagaaaaatatgtgagacttcacaggtggctgcttatgtagcccttataccttaatctgataaaggtagcatatatttaaaaagagagaaaaccagaaggtacaatttagggaaaattaaatacttctatttggccaaagtaagagtacattcaagggaattgtgagaggtaagagtggaaacagaggttggagctgtatttttatgctgtgattgaattacagtgtgtgataaatattgctcttatttgggtagattaccatttaacattttgaattaattggtaattggattaatcttaacttttaaaaaactaatctgagagtggtataaaggatagattacagaatggataaagggtgataaatcagttggctatggcaaaattgcaggaagaaactgaaataggccacagaaaactgaaactgacattttgagtagtatttcagaatcaagatctggattttggcaactgaatagatgcgtaggaatcaaagatgagtatactaaatgaacttaatctatgatttgtctgtcattttattgtgtaccattagtgtgtatgcatgtatgtatgtgccaggtagttaataggctgactgtgtctcttagctccactctgctgcctgggcctttgccatagtgctggagttccctcacttctcttttctgtaaccctattatattactgctgtctctcagctgtgtttcattcctcaagcagaaaga

SEQ ID NO: 403353 - DNA, 371 bp, Homo sapiens
cagaaaacaacttttttttccccttgctataaagaaattagggcaactggcacaaactaagtaaggtctgtgaatgcaataatagtattttgtcaatgttgacttccgattttgataaccgttgttaagagaatatccttattattaggaatatagagtcaagtatttgggggtaaagggcccgcaactctgtaacttaaaaatcaaatggttcagaagaaaaataataaccttaagtatgtgtgtatggaaagacgaacgtaagcccatatggtaaaatgttaactggggaatccgggtgaagggtatgtaagagttctctgcactattctggctactgttctgtaaatatgaagttacttcaaaataaa

SEQ ID NO: 403354 - DNA, 438 bp, Homo sapiens
acatgtatttcatctaacttgtgaagttcacaactatttcaaaaaacagttaagcttgttccaaaaactcactgccatcccaccaaacacacatatggacttgagaataattaggctttcagaaaccactttagtatccaattaattgtagttttcttcagaaagtggtgtaaatctgattatatatagttgcttcatgtagtataaatctgattatacacagttgtttcatatagtatatatctgatgatatacaattgcttcatgtagttcaacttgttactagataatccatgtgtaattgtcacagaaaatcttacgtgtacatttggacaatgtctctatctctgtttctttctctctgtttctctctctctctctcacacacacacacacagtcctttacaattactttgggaaaaaaatcacaaaaaggaa

SEQ ID NO: 403355 - DNA, 308 bp, Homo sapiens
ctaattcccaacatgggagaatcttaataaccaaaattcccagcataagcaccagctgccctcaccacaccagagaaaatccagtagtttggggaggcatggaagaagactacagtataggcaggagccagaggcagagaacgtaagtgtggcttgagtagctcccaagctgcattcccttacacccaaaggaccttcctttaggatattctccttatccagctcctgggttcccagccctcagtaggcctcattccagtgcctcaaaggcagaccaatgcattaagggagtataggaaagaggagag

SEQ ID NO: 403356 - DNA, 778 bp, Homo sapiens
cagctttcaggaagtcagacggtaagagctggagtcaggatccaccaccttgccacagtgtggcttcagtccttctggccaggttctcgcagccttctcctgccctccgatgctcatctcttgtacttgcctctttatcctgtgagcagctctgagctcaaatgggtccccaatggcagagagccacactgctcctctctgaagggcgtagggcctatttttaaatacctgcgctcctttcattgtcttgtcttacaaattctaacttggcagactctctctccccatcatctccagttcccttgaatcactgtccgtgtttcccttccggtcacaactgagctgagggcagcctttcctcccatgctttcccaacctctgagtctacaatgagcagctgggcaacatggaggccatctctggtgctctcctctgaatgcgattcgggtttcagcagatgtccaataaacaaagctcttgctaaaaatgcaaatgcctctcctaaggatcattgtcatttttaaaccacataaatactcagataattatctaagtggccaagtgtgtatgagccaggctcgcagggcagagaggcatcgccctggatcctaagcccccttacagctttccaaaccaaacactgacacacaggaaaatcagcaggaacttggcattctgtttctgataatttgcagcattagcctatgcaaagcccgagataaaaggtgcctgttttactttgaatagaaatcacacaagatatttccaatcaagcaca

SEQ ID NO: 403357 - DNA, 455 bp, Homo sapiens
cagttttcagtgaccaatgaaagggtcatgacttaatgcctccactcttcatttaagacccttttgtttctgaaaccttaaaaatacattttatgatagagtgttttcatttctactttacctttctatcttaacatatagagtatatctcagtattttggggtttatgctattggagagcagaagtgagtcttaatgagtaatagtattcagaattatattatttgggtaagcatatatgactggaagacaagggacggttttacttttatatgtctttgaattactcttggttttcagaatagatgtttgtttaataaagagttatatttcattatgtaactgtagtgtttttactgtactgtaaaaattccccgaagtaatcaccagataagtcttcttttgatgtacattttaaagtatatcatctgcaggttttgcttttctaataaaaa

SEQ ID NO: 403358 - DNA, 408 bp, Homo sapiens
atacttgtcctatataaatccagactttctataaagctcaagtaactaggataatgtgaaattgggatggtgacagacaaatagactacccagagcccagaaacagattttctgtgactgatttgtgggaaaagaggaactcccatttatggtactggaatgatgggttaaccatgaggaaaaaatgaaattgaatttctatcttacacccaaagatttgggtgtcccctgcagatagatgatcacctaggagtagatacacaaaaaacatttcaagatgatttaaagacttaagggtttcacaccatatacaaaaattaactcacaatggatcaaagacctaaatgtaagacctaaaagtgcctgtaaaactcttagaataaaacttagatgtatcttgtcatgaaa

SEQ ID NO: 403359 - DNA, 301 bp, Homo sapiens
gcacttaagtggggttcttccacatttttccattctgaattttttctaattatttgcaattattgatgacgtcatcatcatttttctattttctccatctagagctctaacggtttggatgttggactttctgaatatcacacattgtattagtccattctcacactgctataaataaccacctgagactgggtaatttacgacgaaaagaggtttaatcgactcacagttcctcatggctgaggaggcctcaggaaagttacaatcctggtggaaggtgaaggggaagcaaggcatgtct

SEQ ID NO: 403360 - DNA, 486 bp, Homo sapiens
tacagagaggtcaaaagtccgtctgactcacctgtgctgagtgacttgaatgccatctaatctaacttcaagatcatcaggatacttgccaacaaggtcacagtggactccatggagcaactgccctcaggaggcaacagatggcttcacttgcttattggctgaaggtctgcaaggactcaattcacatatctgatcatacctggagtccagactttctcctgatgcctgacccctttgccattaggtcggctccgtatgactgagttctagccagtgaggtatgggcagaagtgatgtgtaccaattgcgagctcgacttttgaaatcatcccacgtgatcctcctgccatctaccagccatcctttttgatcttgaaggtcttatgcctcagattgtgtaactacaggatgaaggaaggccactcaacccacacttggacatgatgtaagcaagaaataaacttgtaatgtattaagccacta

SEQ ID NO: 403361 - DNA, 365 bp, Homo sapiens
catgattgatgtttaattataaccatatttctgttcataattcttgttaaccctgtgaagatggcttcacttgcttattggctgaaggtctgcaaggactcaattcacatatctgatcatacctggagtccagactttctcctgatgcctggtaagaaccctaggttcaaggatgcatttactgtgtctctgaaattttcctcctaacctcaggattagttctcactcagagctccagtctctactccatgcatttcttatccacactcttttccaggcatcccatttttttacagttcctaaacttgccacactaatccatgcatccatgcctctgccttaaaatgcccctcttctttcccaca

SEQ ID NO: 403362 - DNA, 917 bp, Homo sapiens
acaaatacctaatgcatacggggcttaaaacctagatgaagggttgatgggtgcagcgaaccaccatggcacatgtatacctatgtaacaaacctgcacgttctgcacatgtatcttggaacttaataataattttaaaaagggcttgcttgcatggttatggttgagactacagatattcttcaacacgctcaaatgaggaagatgagggttgaaaacccattgtaggatgctgtggatctaggattcgccacagttccaggagagcttacgctcttgatctaaaccacagttgttctcaacactgactgtgtatcagagtaatgatagaaagcgttgaaaaatatagatttccaggaactgcacaaagacctgctgaatcagggatagggccagaatctgtatatttcaaaatttccttcagcgtttctttatatagccatggttttcaaactgccgctctaaagctagggaaaattatgatagaaaatataaatggtagtgggcccaggaactaggaaaccttgattcaaagtgtttgttctgccactagttcaatgaatggtcttattcaagtcactcctgcctttgtctttcaaatgagagaataagaccacttggtgtctaaagtctttctatctctgacattaccttgagagaaaggtgcatcaaccacaatggttgattttgagaatatctaaactttttcatagagaccaaagtaaataggattattattgcattgtgtaattgtgctcatggttcaagttttaccatgttttagtccctcccagaaaaggaagtagggcataatgcttagaacaggcgatatcagtcctgaaggagaagggatcctacgggttctttcagaaagtttattccccgggttggtggggatcgcattgtgccgacttgcg

SEQ ID NO: 403363 - DNA, 835 bp, Homo sapiens
acaaatacctaatgcatacggggcttaaaacctagatgaagggttgatgggtgcagcgaaccaccatggcacatgtatacctatgtaacaaacctgcacgttctgcacatgtatcttggaacttaataataattttaaaaagggcttgcttgcatggttatggttgagactacagatattcttcaacacgctcaaatgaggaagatgagggttgaaaacccattgtaggatgctgtggatctaggattcgccacagttccaggagagcttacgctcttgatctaaaccacagttgttctcaacactgactgtgtatcagagtaatgatagaaagcgttgaaaaatatagatttccaggaactgcacaaagacctgctgaatcagggatagggccagaatctgtatatttcaaaatttccttcagcgtttctttatatagccatggttttcaaactgccgctctaaagctagggaaaattatgatagaaaatataaatggtagtgggcccaggaactaggaaaccttgattcaaagtgtttgttctgccactagttcaatgaatggtcttattcaagtcactcctgcctttgtctttcaaatgagagaataagaccacttggtgtctaaagtctttctatctctgacattaccttgagagaaaggtgcatcaaccacaatggttgattttgagaatatctaaactttcctgagacagtaaagatctatgcatgttctggcccggtcgtttaccgttagcgccaaagaatggttagccaggattaactttaaggcacggctccacatgatccgtaatgaaccctgtcttgtcccacg

SEQ ID NO: 403364 - DNA, 488 bp, Homo sapiens
ttatgatagaaaatataaatggtagtgggcccaggaactaggaaaccttgattcaaagtgtttgttctgccactagttcaatgaatggtcttattcaagtcactcctgcctttgtctttcaaatgagagaataagaccacttggtgtctaaagtctttctatctctgacattaccttgagagaaaggtgcatcaaccacaatggttgattttgagaatatctaaactttttcatagagaccaaagtaaataggattattattgcattgtgtaattgtgctcatggttcaagttttaccatgttttagtccctcccagaaaaggaagtagggcataatgccatagaaacaaggcaaatataaacaccaactctctgaaaggaaagagaggcagtacctactgggagtttctttttctatgataattgtttttatttcccctctgggttataggttttgggaaaaataatgcacagatattgtgtgtaaa

SEQ ID NO: 403365 - DNA, 1291 bp, Homo sapiens
gctgggattataggctgaaccactgtgccctgccagaaatccctaactcttaaacattttatctgatggccatggcaagtccagtaagccagatctggaagtttggccagcaatttctggctgggaatgccatgggaacctaaagaaagggggcctcaaattccaagtcacatcctttctggctttcttccggacagatttccacaactgttttcctaaaatgaagatctaactcatcatgattttccttgaaaacctcagaggcattcctcacatccgcatcctagagtgtgaagacaaactctaggcttggcatgaaaggcacgtcgctctgtgacccagaggcactaaccacagccccacgccatggctccggggctctgactgtccctccattctctcctcatgtgcattcttcttcatcctatggtgccatagcatggggccacccctgtgacctcaggcagcctggtcacctgccccgctgtgctttgtctcaaagcactttgggctaaaaagtggtaacaagttcctgggggttcagtgactcattcccaaatctggattatgtgcctgccatgcacctggtgctggagctgcatctctgccctgagggtggtcaggaaaggcctctctgtggaggtgacatctgaaggtgacctaaatgacatgaagggtgagcctgccatgtggagttctggggaagagcatccaggccgaggaaacagcgacagagggagccaaagagggagcgtgtagagaggtgagcagggccctgacaaggtagaacagccatgagaaggttcctgggggcttggagcaggacgtgcaagtgagttttaacagtgacctctgacagctgtgcccagactgcagtgtagggccctgaatggaaatgaggagagccatggggaatccagtgcaactgtccaggaaggagagggaggcgtccacactctgaccacggacagcaccagaagcgattggactggagacgtactttgaagggaaagtttgttggacttgcccgtggattcaaggtgttaaggacaacccctgtgttttggccctggctacataggtggcaggagcttccatcatatacacccccaaagagaaaggaccccctgtctaatttggtgttcaccacgtcattgacttactatgtatactggttctcaccctagctgcattttagaatcacccagaaacttttacaaataacagtgttcaacctccagttgttgagagttaatttaaatggtttgaggcaggtccatgcagatttctt

SEQ ID NO: 403366 - DNA, 396 bp, Homo sapiens
agctgtcatcaactgaaatggcaaagacgtgggtaggacaggtctgtgggaggagattaggggttcgtttttggaaatgttaagcttgagaagtctagtagacatccaaaagaaaatgtacatttatcggcctttaatattgaatgtgtctccagtgttagcagagtaactggccctccaaatatatggttggatgaaagaacaagaaaagttgttcaagtattaagtgaaataagtatgagatgaccccattttgttttatgtatatgcatacacacacacacacacacacacacacacacacacatttgtaactcttcttacatattgccagattgctctacagaaaaactgaaccaatctagaattccagcagtgaaagaatgctagacagtc

SEQ ID NO: 403367 - DNA, 464 bp, Homo sapiens
aaactgaagaagaatactttagaacatttgtgccattacttactgtcaggaacaagggaggtggagaaagagcatttaggagggcatttccctttttcccaattaaagattgtcgttgcagactcttgactccagccctaaccctttaaacacataggaagacctgtggctcctggattacagagtgtattgtatctgtgaactgtccatctgtcactcattagtcattctgtttcctcaactgggaggaaactgagagattatctaggtggggggatgaggtggagtagccgacctgaaatattttcacataatgagggttatatttatcatgactcttatttggagggaaaaaaaatgatcaaacctcaaacctttgaaaatagaattagctgggtatacgaatcccaaacacatcctaaaacaaagaaactactatttatgagttaaagaatggtgaaaat

SEQ ID NO: 403368 - DNA, 571 bp, Homo sapiens
tgataaaagaacgacagtaagaggcaagtacgcattccatgacttagtgtaacagcctccctctgaaccctactccagcagctcaacctgcctagtattctagtctaattcctctaataaacacctaattccgcaatactcatagtggttctatttccctgtctgaaccctgaatttctgctacaggaagtggttcaaagaagtccttaaagatatgaacctgaagttgcttctctgatttgattgaaggtattaatgaccagtttccaatggtaaaggggctactagtagtccacggcatgtagtggcaaaatatttaaaatcatcatctgcagacaaggacctacagaagacaaagccttgggtaactagctagttgatgccatagaagattttagtaaaaataagttgtataatgggttaattagttgtttctaggtacactggataattcttttctcaggaaaagaaaatgatgagctcggagttttaaaagcactactcaaatctgggtaagggggccagaaatctataaatggcttcatagaaagccttatatcatgtgggtaca

SEQ ID NO: 403369 - DNA, 394 bp, Homo sapiens
ggcaggcacctgtaatcccagccatttgagaggctgaggcaggagaatcgcttgaacgcaggaggtggaggttgcaatgagccgagatcgcaccaccgcactccaagcatgggcgacagagcaagactctgcctcaaaaaaaacaaaacaaaactcattcctccaactccaactcatttctcctaaggataacattaattatactgatgaaataaaagagcagtgtaagaatctttccacctaccatgtatatcaccaacttgtcattttcatcctttttcaatttatttttaaaaagtggtttcagctgggcatagtggctcacatctgtaatcctaatactttgggaggctgaggtgggaggatcacttgaagccagaacttgagaccagcc

SEQ ID NO: 403370 - DNA, 396 bp, Homo sapiens
caggcactgtagagggggatacacaggggaggcctttgagaagacaaggccccgggacggagcctttaaaagtccaccattgagtgggtggccggccatagagagacgccgtcagaaaagggggagggccaggcgcagtggctcacacctgtaatcccagtgctttgggacgccaaggcgggaagatcacttgggcccgggagttcaagaccagcctgggcaacatagcaagaccccatctctttaacaaacaaacaaaaaaagaccaggcgcggttgggctcatacctgtaacctcagcactttgggagtcaaggcgttcagatccaggagttcttggatccaggagttcaagaccagcctgggcaacagagcaagaacccacctctttaaaaaa

SEQ ID NO: 403371 - DNA, 292 bp, Homo sapiens
aagaggagttacatcatcaaaaaaggaatgcttaattttgggacatagaaaaatggagttaggcagaattgccatgctatttaaaaactttctaggtgcaaaggtaccttgtcccaaggactcgattacctggccctcatgcaggcatggccttgctctaaagatgaattcagaccaggtacagtggcttgcacctgtaatcctagcactttttgaggctgaggcgggaggattgcttgagcccaggagtttgagaccggcctgggaaacacagggacatcccatctctaca

SEQ ID NO: 403372 - DNA, 507 bp, Homo sapiens
gcttttttttaagagactgagtcttgctctgttgccaaggttgtggaatgcagtggtatgatcatagctcactgtaacctctaactcctgggctcaagtgatcctccagcctcagccccctgagtagctgggactacaggcacatgcccaccatacccacctatgtataatttttgtatatgatgtgcagtaggactcaaattttattttttacccccaagtggatatccagttgtccccgtggcatttattgaaaagttcatctttccccattatctgcattgcttacttctgttgtaaattaaatcaagtaaatatttatatatttatttttaaaattaaaacaatttttttttgagatggagtcttgctctgttgcccaggctggagtgcagtggtgcgatcctggctcactgcaacctctgcctcccaggttcaagtgattctcctgcctcagcctcctgagtagctgggattacaggcacctgccaccacgcccagctaaat

SEQ ID NO: 403373 - DNA, 177 bp, Homo sapiens
ggtattgtacaaagcatatagtaagtaccaaataactgttagctgctattaataatccattatcataatcctaataatatgaacactcagggctgccttagaggaaaagaggtttacagaagaacaacttgctgcctgaggtgcttgtgtagagggatgattgttaccatgagtttc

SEQ ID NO: 403374 - DNA, 450 bp, Homo sapiens
atgatttcatgtaattcatgattacctaacacataattcctttattcccgtttgccaatataaatgacttgtctgagatctgacagctagcaagttagggaaataaagattgaattttgatcccttgaacatatttctttattggtcatccctttacttagccaatattgagtgcctgctatgtgccagccactgttccagtgctggacacatacagatatataggacttggtgcttcttcctgtggagctccctctctaaaagaaaagatgggccagcaactagctgctgcaatgccatctggtcagagctgcagctggcagcctctagtcccagccattggggaggctgaagtgggaagattgcttgagcccgggaggtggaagttgcagtgagccatgatcaaactactgcactccagcctgggcaacagaatgagacccagtctcc

SEQ ID NO: 403375 - DNA, 434 bp, Homo sapiens
ctcccagtctttaccaagatgctctgtgtgtatgttgggggcaactttgccttagcacttcacttgtacagagcttgaagttcagccataggtgagaactttggcctttcttaggtgttttctgagcatgtgcacagccttgggaatgcctatcatcctgtgcatatgcatagccttttagattcccaggtatttgttggaggttttctaagctccatatggacatctcattccccagcatttacttttaagctttttggttagcttaatgttcaccacaactgttacctattaccataggcagctgtaaagttaatcatttgtctctaattatttttgacaaataccccaaggaaaaagtttttcacactgagcacactcttgaatcatgcctaataaaaaaagccttgcaagtggggtctttcaaggaacca

SEQ ID NO: 403376 - DNA, 460 bp, Homo sapiens
tagaaaacatccatgtgttcccttgagctgtgatgaactttgttttctggaagagagaaacagtggggaagtgaagtttctggtgcaggtaactcacaggtcccgttggggctgttaagaggcctcggagaaggcattttttgttttgtttgctttgctttttagcttggattaatgcaatgttgagagaaggagcaaattgcagagttatgatttaagtcatttaagtgcatttaaaaaacacaacatacacataagtagcaaaagtgaaaacagtgaaacaccgatggctgtgtaccaacttccctgtaattgttgtctggggagagggaagaaggacagtgccctcggaggagcacggagcaggtctcttgtagccgtgttttattccttataataaaaagatctctcctctgagaggctggagacaaaaataaaacataaaatacaataaaaagtt

SEQ ID NO: 403377 - DNA, 363 bp, Homo sapiens
cctatattctttccagcagtgttgaaagaggctcagtgtctctcttatcttgaaaaccctcccctcctctaagatctctcagactactgccccttctacttgtctcatcaaagctaacttgctttctccagtttaactcccaggtgttcccagccctctggcttcatgctcactgaaattgctcacctccttaaaactaaccccaacactggctgggtgaagtggctcacgcctgtaatccgagcactttgggaggcagaggcagatggatcacttgaggtcgggagttcgagaccagcctgaccaacatggtgaaaccctgtctctactaaaaataaaaaattatccggacgtggtggtgca

SEQ ID NO: 403378 - DNA, 246 bp, Homo sapiens
ttaaataaactttttcacatttagaagcaatttatgctcacttagaaaaatttgaaatacacaagatggcaaagaagatcatgaaaatgttccctaattcaactgtctcatggcaatgcttactccagaagtttacatatagaagtggttgaatgtaaagtttcttttaaggcaacttatgttgtttcactttgggagaccacgagttcaagaccaatctgggcaacatagtgagaccttgtctcc

SEQ ID NO: 403379 - DNA, 766 bp, Homo sapiens
  misc_feature (532)..(532): n is a, c, g, or t
gggatagagacttttacctccattttacagaggaagaaactgagccaccaagaggttaggcaacttgctcaaagtcacatggcttgaacccaggcacaactcagttctcccagcttgggccccactgttccctcagcccgccctgcacagacttgccagcacagaacatgttgtcagtgatgcggatccgggtggagtccttgcagaccggccgctccacaatgggcaggttcaccacctgcaggacactgggctgccccttaccaacgttggctgtccacgtctccttcaggttgccccagcctgtcacccgccccttgtatccagcctggagcaagctttggggaaggaagaagggcctagtgagagccaacccccacaggagccgcctggccccaacgccatttcttagagaccagaatctaaaacgccagagctggctgggcacagacgttcacgcctgtggtctcggcactttgggaggccgaggcgggtgaatcacttgaggtcaggggttcgagaccaacctggnccgacacggtgaaacccagccctagatctctactttttatatttactttttatccctattaacaactacagtgcctggcatatagaagtcactcagtgaacagtggtaactgattatatgggtatttagctacaaccagactgcaaaaatactttctttttttaaggcagtatcagtttggttcaaaggaagatagttgttctgctgctgcactatttctccaacttttatcat

SEQ ID NO: 403380 - DNA, 269 bp, Homo sapiens
cccaccccagcctcccaaagtgctgggattacagatatgagccatcacacccagccctagatctctactttttatatttactttttatccctattaacaactacagtgcctggcatatagaagtcactcagtgaacagtggtaactgattatatgggtatttagctacaaccagactgcaaaaatactttctttttttaaggcagtatcagtttggttcaaaggaagatagttgttctgctgctgcactatttctccaacttttatcat

SEQ ID NO: 403381 - DNA, 353 bp, Homo sapiens
cccagcccagtggctcatatctgtaaccccagttctttgggaagttgaggcaggaggattgcttgaggcctgggaaacaaagtgaggactcatctctacaaaaaatttaaaaattagtccagggaaagcagagtggtggcacacacctatagtcccagctacttggaaggctgaggcaggaggacaggagtttgagcttacaatgagctatgatcacaccactgcactccagcctcggtgacagagtgagattctgtctcaaaaaaaagaattctattttgattttccaattaaatgtaaagatacacttgaatgtactggcttgtcagtagttataatgtatgtagtagccc

SEQ ID NO: 403382 - DNA, 298 bp, Homo sapiens
ccccattcagttcctctctaggcaccagctaggaatgtggctccagaaactaggaataagccgccttccactgacgtcctcagaaacaccctttatgtgatcacttatgttttattggtcatcaccaggcatggtgaccagcacagggaacacccatgaggagtaaaaaccacctttcatagcctttcataggattgtggtgaagattaaacaaggtaccactccgaaaggcccttaagtccctgtgcttcctacaaaaggatgtctcaataaatttttgtctcaattaattctggca

SEQ ID NO: 403383 - DNA, 562 bp, Homo sapiens
gaacagtagggaaaaaggtgcttctgatgatctagatgacttgaacttctttaatcaaaagaaaagaaaagaaaaaaacaaaaaagatgtttgatactgatgaagctgaagaaggtgtaaaggatcttaagattgaaaaaatattcaagaaccagctgaaccagagtatgaccttaatattatgcttggcaataaaaagaagaaaaagaagaatgtcaagttcccagatgaggatgaaatactagagaaagacaaagttctagaagatgaagacagcaaaaaagatgacagtatctcattcaataatcatacaggccctgctagggcagtctcaaatacacataaggagctactgaagcgagtgtgcaacatcacgagggaaaagaatccagatgtggttgctgaaaaggaaatctgtcatcaaacctctacaggtcatttgagtaggaaccaagaaaacttattttgtcaactttacagatatttgtaaactattacatcatcagcccaaacatcttgcatttttgttggctgaactgggtacaagtggttctatagatgg

SEQ ID NO: 403384 - DNA, 158 bp, Homo sapiens
cgaggttacaaaaaattttataaactgatagcaccccacctgccatcccattccctagaagcccagttacttgtcataacccagtgaacacattttagctaagtgttcattttcataaatttggaagaattcacttctgtcccttctgtcgtcttctc

SEQ ID NO: 403385 - DNA, 325 bp, Homo sapiens
ggaaccggggatgtcggggggtgcccgggtcccgcggcttagaatgctctagggcggcctggtgctctgggaggggataggagggttcctcagggcccctggggaactgcagctactcccaactgctaaggtgtgcgtgaagataaacttggctgaactttcctaacctggaggactggtgacagtgacctaccgcaatacctttgggagcaaagctcgagatgcaggcttgtatcaaacgaagcgggttggattaaaacatatttaaatggaatctgacaactttaattgtatatgcttgttttctgctcttgcctactaagaa

SEQ ID NO: 403386 - DNA, 351 bp, Homo sapiens
tatgagaaatatcatttcaggggccctagaggatgctggttgctggtgtgatgatttaagcacatcatttgtaattcccctctgtggtcagcctagtctgagaatgtgctgttgggagactagggtgcttattaggatctcttttctgtgccctgccatgactctggcaactcagatggctcagagaggggtttactttattactgattattaaattacattcacagtttattattgttacaggggcttgacagtagtgagtcagcttttggagcgaagtgtgggctcttagcaagatggcatttcgagcactcttggatgcccttgtcaggctttccccttggaactcac

SEQ ID NO: 403387 - DNA, 483 bp, Homo sapiens
agacacaggagcttgggcctttctggccctggttggccattccgaaaggacaaagtagactgtcggccattctctgcccaccagtgtgccataatgaggttgggcagctcagccctagagagatgtttgcctgtatgcatgaattcattaagaatgcccatcacaaggctgagtgcatgcagtggctcacacctatgatcccagcactctgggaggccaaagtgggaggatcacttgaggcccaaagttcaagaccagcctgggcaacatagtaagacccttgtctctacaaaaataacaaatagaactagccagggactgtggcacatacctgtagtcctaactactcgggaggctgaggcaggaggatttcttgagcacagggcccctgggtttgaggcttcagtgaacgcagtgctatgtgatcacgccactgtactctagcctggacaacagagtgagaccctgcctcttcaaaaaaaa

SEQ ID NO: 403388 - DNA, 712 bp, Homo sapiens
ggagagccaataaagatacgacagatctggcaggagaacaagatccagcccaggtgatggggtgtgaggcttggtcttagctacaggagacgctggtctgaaaagaaggcaacgcaaggaagagaacagagccaaggcacctgcagcgagccagagccagagccctgacatcacaaatgctttaattggttccatttattgtttaatccacttgaaattgaatttctgtcatccccgactggaagtgtactgacctgcatactacctgtgtttcctcacagcaggctgaaaagctgtgccaatattgagctcatccagaattagacgaagtttgtattctttttattacttcctttaaccctgaatcagggtccagaagcattttgttgaccattaactcttctctgtgaataaagcagcatgaggaacaacctcttttattcacagagcaaagctcttcgctgctcagccacagcggcttcaactctggcacgggtcctgaagtgccatttctagcacatgactcacaaagtaaataatctgtaaatgaaaagcctcttatcatactttggcacgaaaaacaaagcgacaagccaggcagcatttttccctcatatttgaaccccacatgcaccaagggctgttttatgccttgcacatgaggagtttggtttgctcaaaagcaaagtattggctaacatgtgtgtgcact

SEQ ID NO: 403389 - DNA, 657 bp, Homo sapiens
ggagagccaataaagatacgacagatctggcaggagaacaagatccagcccaggtgatggggtgtgaggcttggtcttagctacaggagacgctggtctgaaaagaaggcaacgcaaggaagagaacagagccaaggcacctgcagcgagccagagccagagccctgacatcacaaatgctttaattggttccatttattgtttaatccacttgaaattgaatttctgtcatccccgactggaagtgtactgacctgcatactacctgtgtttcctcacagcaggctgaaaagctgtgccaatattgagctcatccagaattagacgaagtttgtattctttttattacttcctttaaccctgaatcagggtccagaagcattttgttgaccattaactcttctctgtgaataaagcagcatgaggaacaacctcttttattcacagagcaaagctcttcgctgctcagccacagcggcttcaactctggcacgggtcctgaagtgccatttctagcacatgactcacaaagtaaataatctgtaaatgaaaagcctcttatcatactttggcacgaaccaagggctgttttatgccttgcacatgaggagtttggtttgctcaaaagcaaagtattggctaacatgtgtgtgcact

SEQ ID NO: 403390 - DNA, 805 bp, Homo sapiens
gaattttcaaatctctttaattgtgcttccttgtttcttaacagttcctttttcacttaatgtctctcctctcacattttactacaagcactaaggggacccaagctgcaccttcagtgctttgcttagaaatctcctaaataaacagtttcatcactctcaagttctgcctttcagaaaacactagaacagttcagagaagttctttgccactttataacaagaaccaccttttttttttccagttctaataacatgtacctcattgccatctgagaccttgccagagtggcctttaatatccatatctctagcatgtacctcaaaactcttttagcctctacccatcacccagttccaaagctgccttcacattttgaggtatttgttacagcagcatcccccttctgggtaccaaaatctcaatctgcttggtctgccataacaaaaatccgtagactgggcagctcaaacaacagaaatttatttctcacagtcctggaagctgtaagtctaaaatcagggtccaacagcgttcagttcctggcttgtagatggttgccctctcactgtgttctcacatgaccttttctcagtgcataggtgtggagagaaattggattgggaccccacctttaaggtctcttttaaccttaattacttcctcagaacctatctccaaatatagtcacattgagggttagggtgtcaacaatgaattggggtcgtggggacatagttcataacagttttctctcttcagattgagcattttcttttttttgtttgtttgtttgagagggag

SEQ ID NO: 403391 - DNA, 546 bp, Homo sapiens
atcctttttacatagaggctttttttttccaactaccttttttgttaatagtcttacagataggttttagttctgcattgttcaagtgtacagaagtttcatttcttttaaatgatggtatgatattacagtttttcctaaatttatttaactgtggaaccctttttgtctactccttttaacaccaaaggcatggttatatgtagcactatttaaaaaattctagtctagattaatggacagaataacagaccagttggaaggggctgcttgctgatatgaaaggaaagaacttttgctactttgtgttattttcctgattgaaatggtaaaacatttctcaaatacacaggtttaataaattggattcaaattagtcacttctgtgacttcttaatcatcagctttaaatagatttgattttggtagccatcttttggttttgttttggctaaaataactcattaaaaatcagtgatcagtgtatagaacactgccctccaattgaactttctttagtattggaaatgttctatatttgtgttg

SEQ ID NO: 403392 - DNA, 361 bp, Homo sapiens
ttctgttaatattgtgtattagactaatagattttctgttcccaaaccaacattgctttcttgggataattcttatttggtaatgatttatttttttcatattgcagattcatttgccagccagtgtcttgttaaggatttttctgtctatgtttatgaggaatatttgtcagtagttttctgcttttgtgatgtcttctacattttgtatcagaataatgctggactgatataatgagctgtaaagtgtctcttcttcctgaatgaatctgtaaagaattcatattatttctcctttcagtatataatggaaattgccaataaagtcatctgctcttgggcatttttttaaatttaatta

SEQ ID NO: 403393 - DNA, 596 bp, Homo sapiens
atatatacatatatatatatatagagagagagagagactatatatatgtgtgtgtgtatatatatatatatagagagagagagacagagagagagtaaagatctcatttcctccacaaatgttaaaaacattattctgattttaaaaaaagaatgaatttttaaaatttacaaatttctgaaatggacaaaaatatcctaggccttcttcctcaaaaaataataaataagaataataagaaattgcactggtatctgaaaaagcaacttaaagctataaaaattaaaatagcatgttatgccatgaaagagacaaatgagatagattcaagtttcaaaataacaattgttattattatgatacaattatattaattttgtacctataatttaaataaaataataataaataagaaaaatcactgaataaaggtaataatttaaataatttaaaatcttaaaataatgattatatgtataataaaactgtaaatttacaattatagagctataaacaattttatagttgtaatattttgtaactaatgaaacattatattttaatgattttattattgttgtaattaatataaagaa

SEQ ID NO: 403394 - DNA, 546 bp, Homo sapiens
cttgaaaacttcattctaaatttctaatccacccacacacgcactctgtaccctggctaactatgtcaaagctatttagtcaatgccctaaccaatgtggtctagtttatgaccagctttctgtcctccagacagacagatgctacaataaaatgtgtcacttaacgtaccttcctagttggctcactacaaattcatgtcatcaaacttcagttagacctccactggttctcaaacatctggtgactcagttctgtctgatttctccccacagagactcctgcaaaactacctatttcttcagatccaaacccaattcctgtctcctcaccctctgcaaatgcatttcattttaaaatggtcaaagccatctgaattaagtccccaaaacacctctcgcttaaaaaaatattctatatatccccttttactgaagattaaaagtagcctctcctatttaggaatagtcactcaacttgcacactgaatcacctttcttccatctctcactcccaaccccctctatgcagtgttcccctaactacc

SEQ ID NO: 403395 - DNA, 345 bp, Homo sapiens
cagattgcagaagaaggtgacggattcagttccattttagactggttggctttgaagtgactgagggatatctatgtggaattgagtgcacacacccagagcccaggatagagacaagtggtggggctggggattttgaaattagggcaagtagggggcacaggggctttaatgagctccccttgaaagaatgtttaacgcgaccaaagagaagctgatgacggagcgctgagaaccgtgcacgctggggcctgagtccacaaaagagatcaggagaaacagccacgggtagcacagccaggagagaggttgctcagaaacccaggtagaatgggggatagtcca

SEQ ID NO: 403396 - DNA, 562 bp, Homo sapiens
tcagtcactgtgcctgaagcagaaaatcctagagacagtcttgtgctgcctccaacccagtcctcttcagattcctcacccccggaggtgtctggcccttcctcatcccaaatgagcatgaaaactcgccgactcagctctgcctcaacaggaaagcccccactctctgtggaggatgattttgagaaactaacatgggagatttcaggaggcaaattggaagctgagattgacctggatcctgggaaagatgaagatgaccttccgcttgagctatgagaaatgattgatagctgaaggtggtagtgaggacactttaaaaaaaaatcgccaaaaaactggacttagtttcatctattgtaacatttacctgagatgatcatttctttagtctagaatttgccccaaatcagaagtatacctctgaattatctgtatgtgtcctggattccttggggtcagatttttaaagttactttataaccattttgtccatttgatgccattgtttatcatcttttgagaaaaaagttctgtcatacccttctctccacaaaaaaga

SEQ ID NO: 403397 - DNA, 508 bp, Homo sapiens
aggcagtcttgtcccattctgacaaattgttatagaagagtggtgggggtgaagaggtgacggggtaaggggcagccttagctccaggactatttctgtcacctgtaggctgaagatacaaggccagtgcctttgggagctcagtttcccatctataaagcagatatcagattttgcacccataagtgcatgtgggaaagtgcttgctgctgctgaatatttgcttgactagcctgagtcagacctcatagcctgcccacggatgagctcagccctccgtttgtttgtttccaaggagcctctcatggcaccagcctttggttcccattcatccccattcccgggtgtgatccggctcccctggcaagagttgtggtcttaccatgctgcccaggctggtctaaaactcctgggctcaagcgatccgcccatcccagcctcgccaagggctgggattataggcaggaggcagtattacaaggcaactgagagcaatgtcattggagta

SEQ ID NO: 403398 - DNA, 917 bp, Homo sapiens
aggcagtcttgtcccattctgacaaattgttatagaagagtggtgggggtgaagaggtgacggggtaaggggcagccttagctccaggactatttctgtcacctgtaggctgaagatacaaggccagtgcctttgggagctcagtttcccatctataaagcagatatcagattttgcacccataagtgcatgtgggaaagtgcttgctgctgctgaatatttgcttgactagcctgagtcagacctcatagcctgcccacggatgagctcagccctccgtttgtttgtttccaaggagcctctcatggcaccagcctttggttcccattcatccccattcccgggtgtgatccggctcccctggcaagagttgtgtcagggactggggctcaagccagcctcttcacgtccccgaatcacagcagaaagttgggaaggaaactctggagtcctggcctttgccctagtcacccagggtcatggtgagcgtcagggggttgtgcttcacagatgccatgtgagcagcggacaggatgctgagctgaggaacacaagccctgccccactctgctgtgaatttccttggacaagctgcttcagtattgtgggtctctatggcctatcacctcctctacccacaaacagggactggagagggtgacatgcaggacacttctactggaaggtctagaacaaataaatcatgccttctcactgcctttgtaaaagtggaatcttaggaggtcatattcttactatattaaatttttttgatagagatgtggtcttaccatgctgcccaggctggtctaaaactcctgggctcaagcgatccgcccatcccagcctcgccaagggctgggattataggcaggaggcagtattacaaggcaactgagagcaatgtcattggagta

SEQ ID NO: 403399 - DNA, 159 bp, Homo sapiens
tttaatagcaatagccaaaaaagtagaaacaacccaaatgcccatcaacaggcgaatgcatacataaataatggaatactttaagaatgaaatactcaactacaaaaaggaacaaactattgttgcaggccaaccacgtggatgaatctccaaaccatt

SEQ ID NO: 403400 - DNA, 523 bp, Homo sapiens
tgcccagccctgcgctccagcgggtgctgtctcatagaggacacacggtgccctctccttcacctgcaactcttggcaatttggccctagccagattttgaatgtttgagagcaggagctatgagtaaaggaataagtgaataaataaattgagcagggatctgctcatttggccacaaaaagtgctgttagagggagtagtgtccattgtcagtgcccagcactgagtaggcaccttacaaatgtagacatccttccctttttgacacggggaaacctaaagctaaatgtaacattcagttgcagtaattccaggaatcattacaccctctgcacccagtttcctttttattagcttttacttatttctcttttgatgatcttattggatatgtgcaatttaagataaaatgccccccagatttccttggaagtagacatgctataagaatctagtgaagaataataaattgtggtaatatgtgttgtgctattttttcaactattaaaacaatttaaaaac

SEQ ID NO: 403401 - DNA, 486 bp, Homo sapiens
cacaagttgtaggctcgaagcacggttcactcacatagaaacggaattccatatgtatgtcttgtatgtgaagtctattatcctcgttcgtgggggtatagggtgagatttgtttgtgagtgaaggggggtaatctcataacttactcaagagaaaatggaaagtaactgttgtttattttagaattttgatctgcactgagtgctgtgtttttgaacacggatattataacagctaattattgaaaaagtttagtattcaagtaacaaacctatgatggaatctgtttttttccatctattactattcattgtacctattttatgcatttttatgcatttcaaatgatttttatttggggtcctaaacttttggaggttttatttcttagttatttccatcttttttgtttactctgcaaattagagtcttcaaaacaaaagtgattcttttaggccatggaagtggtaaaaaaaaaaaaaaaag

SEQ ID NO: 403402 - DNA, 425 bp, Homo sapiens
tccccgcccggggcggggcaccggggtggcgcagggggcgggggagggagcccggggccgcgggaggcgggctccaaggagggaggacggttgccctggctgtttacgtgcaggtgaattcctaccgggcgcgggatggccaagggcctgggaaaagtgggctgtgggggcggggtggcggatgagaccgcgcgtggtggggacagccgccactgacggggagggagatccggacagaccggtgtggttggaggcctgcgtgtagagcgagacccaagatcaaggaaattgaggaggatatcgatgaaagcgttgggtcaatccgcttaacactttgtctttttgcccctttcctttcctgttctctcatccctcctttgttttctctattcgctgacgcaaaataaaatattctaaaacgtgta

SEQ ID NO: 403403 - DNA, 814 bp, Homo sapiens
tctcccagtgcatagatttttctttcaccctcttaacaggcatcttttccagaagaaaagtattaattttgatgagacccaatttctgaatttttacctttattgttcatgcttttggtgtaaagtctaagaactccttgcctgaagttcaatcctaaagattttcttgtttttttcttaagaaaaaaggtatagttttaagttttacatttaaatatgattcattttgagtttaatttttgtattaggagtgaaatgtggattgaatttaattcttttccctgtgattgtccaattattccactatcatttgttgaaaaaaattattctttccttattgaattgatttttttacctttgtcaaaaattatttgggcatatttatgtgagtctgttcctagattctctattcttttccattgatctgtatatctgtttctctgccaatatcatactctcttgattactgtagctatatagtaatctttaatattgggtagagtgattcatttcactttattctctttttcaaagttattttagctaatctagtggctgtgcctttccataaaacttaaaaataagcctgtctatatctacagaaaatccttgttgggattttgagagttatgttaagcctatagagcaaattgtgggagaaccgatatcttttctatgttaagtccattcatgaacatggtatgattctccatttgttagaggctttttaaaatttatttcatcagcattttctaatgttcagccttcaaatcctggtgttttattacatttatacctgattatttcatttaat

SEQ ID NO: 403404 - DNA, 597 bp, Homo sapiens
ccactgcgcctggcccatttgtcttgttcttgaagcttccagtccagcaggccccaccgcatatccagtgctgcagagtgcagggtttgctctgcctgtcagaggagccagggcacagcaagggcactgcagttgggagtccactgggcgtcagtcactgcccccacccccacatcagccaaggtcggtctccgctggccttgcaccacgcacagagcactggctcatgccaagaagcagaattcaaactttgatgttgccgccaactagttttgtgatcctgggtaagtaagtggctttgaatctccaaatcctagaagaatgaccagagagtctgccacgggccagtccctgggctgcatgttgtaatggtatcattgtgtttcatgctccctcaagcctgttgctttgttttaaaggtgaggaactgaggcttgcagtttttgtgcagtcatggcaagttcagtggcaaagccaacgtcaagtttcagggccgcagagcctcttctgtactgcctgggtggcagtgctgcagggacccactctatcgctgctttcacattgcttttccctttgtaagcagcacaacccaactgt

SEQ ID NO: 403405 - DNA, 611 bp, Homo sapiens
cagtttaaggaattccttgacagaatgctagatacgaaatgtgacatttgaatttttaaaacgcttttctggttattatcacttcgtttgtgttctcaattagcagggagaacaaccttttagctgcagaatctaaggtggtgttctaggctatcagactgtaaaatagttaattcttaagttgttgagaagttgaaaataaattcatgtcttcttcttgttaagtttgctttaatgtgtttctggcacctaataggatttgatttgcttttagttctataactttgtgctactatacaattaataaaaaatggcatgattgttgtagaatttgggtatttacttttttgcatgccatattcattctacctggtttgaaaaagttacagaatgccgtatacgtcacagttaaagtgtttgatgtaaaagtaaaaattaagaaccaagaaagaatcttctaggttgcattattaacgcttaaggcaaaaatgactatgacaaatggaaacctatttcaaattttgaaaggattttcaacttttgaaaacattggtagcagtgttatattccagcaatacttccttgcgatttttacgttgaacctgaacctt

SEQ ID NO: 403406 - DNA, 391 bp, Homo sapiens
gtcgctgagggtggagctgaggcttggatcctggaccacctccctgcacccctttccaggtggaagagtggggatcccaggcagggatggagggtgaggatccgtgaggagctatggggtgctgaacagaggacctgaatttaagtgaacacgcaggcttccaggcaaggtcaggcaccgtgcacacagtggcgaggagtgtagccaccacctctccgaaatcagctccaaacaggccctccaggtagacagcagtcctggggccatgtcaccaaagccagtgggaactgttccacctgctcactctgggtttcttatcccagatctcaaaatctccagcacaaccccaaaggtccagtgtttccattaaaatgtgggtctcaatgtgatt

SEQ ID NO: 403407 - DNA, 510 bp, Homo sapiens
taaaacttccagaagaaaacattggataaaaactgtgtggtcttgggttaggcaaaagtgtcacagatacacaccaaaattataatccataaacaaaaagtggtaagttgtacttcatcaaaatttaaaatgtctgcttttcaaaaaacattattaggacaatgaaaagacaagtcacatacttgaattgggtattaaaaatacaaagcaaataaaggacttacccagaatatataataaatttttataactcaataataagacaaattaatacaaaaattgggcaaagaaatgttcaagaatcaattcttatgaatgaccaccacctatcttcacctgtcagtgtcaatatcatcatttctaaattaattattgtggttttcttgtggcaactgcttctggggaggcctcaggaagcttcctatcatggtggaaggcaccaaccaaccaactaaacaagcaaaattccaaacaaaaagatccacctcaaacccatgtcttgtatcttac

SEQ ID NO: 403408 - DNA, 327 bp, Homo sapiens
ctctgggcagcgtctgctctggtccttgtaaaaacagccaaccaatggccagcgaccacaagagaaaatacatatcctatctcctacttcttccataataagctctggggtcaaaaagctcagagttcaaatcctcactccgccactccctctgagtgggatccccagctagtttcttggacttgtcaagctttagtgtctgtaaaacgtggagaaacgcagacttcgcaagcttgctgtaaagattcaatggggagatagaacggggacgagcacaggttgaccagcattccgagccgtctggccaggcatcgccagcaccttctc

SEQ ID NO: 403409 - DNA, 383 bp, Homo sapiens
agtgatgtctgatacaaagaagataacaggacaataaatacacgaacttaaatctttttgcctatttcaggcaaaaaagtttaatgggtatataggtatacaaaaaaaaaaaccattttttgtaacattttaagaaataagagtttggaaatctttggaaatccaaggtcctaggtctccaatttctttaaggggggaaaaactcacgattaggactaaatggagacgtcactctcttgcactgatagtgaaatattaactgccagaaagtacctccagtccccattcatgttgtatgacagcagcctttgtactgaggcctaatgaaaaatctcaacagaggaagtgactgtatatacctacaacgtactattttcaaagtc

SEQ ID NO: 403410 - DNA, 491 bp, Homo sapiens
gcacgagctggcttccaggctgttgaactattctgcatgtagctatgctgacaagtaatttcatttgacaggacctgcgagcccatgtctgttctgctaagaaaggattgttaacctttccttgactgcaatagtggtttgcaactgcttgtttggccctcatctccctatctaccaagccttgattgctcctgtatttaaaagcacattaaacacaccatggcccgggggcagtggctcatggctgtaatctcagcactttgggaggctgaggcgggtggatcacttgaggtcaggagttcaacaccagcctggccaacatggtgaaaccccatctctactaaaaatatgaaaaaaaattagccaggtgtggacatgcctgtggtcccagctactcaggaggctgaggcagaagaatcgcttgaacctgggaggcggaggttgcagtgagctgagatcgtggcactgtactccagcctgggcaacagagt

SEQ ID NO: 403411 - DNA, 449 bp, Homo sapiens
aagagagagagaactgagaagatgatttgttcagcctcagggatgaattatgattcaaggctctcctcttcctctttgccagtcttgggttgggcttttgaccagttctggccagtgagatagaaagggatgtctgctgcttggagctttgcagaaagattttcctccctgataggggagatgtacataaggaagaaggtattttttccctctatctgcttccttcttgcttgtgactatcttgagagatcattaacttgaacacatgacagttatcttgcacctaggtggggagacattgctaatacatccagagtatgtctgacagaaaggcagacatagcttgggtccctaatgatgtactgaactgctgaaccaacactggaatcagcttaattcagagctcctgttagaattgacaattaaatgtctttgttatttaagccaaa

SEQ ID NO: 403412 - DNA, 384 bp, Homo sapiens
actttgcaaagccaaagccagcagatcccttgagcccaggagttcaagaccagccagttcaaaaccctatctcttgaaaaaatacaaaattagcaggtgtggtggcacacacctgtagtcctagctagttggtaggttgaggtgggtgcaacacttaagcctaggagatggaggttgcagtgagccaagattgcgccactgcactccagcctgggtgacagagtgagactccatcacacacacacacacacacacacacacacacaaaagagacatactctttctagcttcaacttggatctactgctactgccagcattcccgagttaatcttggatcattgactgcttttgggctcttttggcaaccctaaacaaaaaaagc

SEQ ID NO: 403413 - DNA, 381 bp, Homo sapiens
ttccaggttgagttcagtattaattttttatttttagagacagggtctgaccatgttgcccacactggagtacagtgggtatttggctgttcacaggtgcaattgtagtgcattacagccttgaattcctgggctcaagcaagcctccttagtaggtgggactattggcatgcgccactgtgcctaggcatttatatcactacatttaagatgcgggttaccacttagccatgcctacagtggtatttctgaatcttagtaaaccttagttttgaaagaagttttagatagcatttaccattttaaaataaatgatacagttcctgctgattttgcccaggctaaactcagatgtggggagtaagtatttttagaaaatga

SEQ ID NO: 403414 - DNA, 478 bp, Homo sapiens
agcctcttgatggagttccattgtttaccctcttactttcatcccgttgcctttgttgcatgcctctgaagaacatttgaccagtcaccaaaaacagtgcccgaggccaattacctttctccctgggaatcatctggccagtgggatgcaaaaagtccacctagtcagacagattttgtgctttgtgaattttgtgaagggaacttttgatttttaaaaacagtgctgagttctttgttgacttgttcccttttatgtctttttcaagaatttatagacctaacacaaaggaatgttttagaacagtattttttctattgtaaaatagaaggattcatgccttctcttgcctcatcagatacttgaagccttttgattatgaagcagtagtaaaccatatgcttgcacatttctagtgatggggaactcactacctcccaagcccacgtagtctatcatctttggacagctctggctc

SEQ ID NO: 403415 - DNA, 396 bp, Homo sapiens
tttttcaattattaatatagttttgtgctcttaaatttttaatgcaatttatattttggtagtatctaaagtatcaatcattttattattcattcaccttaaaatgtggctatggtttggacatttggattaagtgatgacattgtaattcagccagaactggcagtaatcatcagtgtttggcatgttttgagaacaaaagtcccagttcctggaagggtggccctttatgtgaacacagagtgcacactctgtatggtgtaatccaagacagttgaacggtctgcctgccaaaaatatgccttccaccaggtttttataaagactagtattaccagcttgaaggccattttctgatttagggcattaaaacctaaggaccatgttaaaagactg

SEQ ID NO: 403416 - DNA, 422 bp, Homo sapiens
tgctgcaagagtatgatttgctgcattcaaacattccaagacagcttaacatctacatacagtagtatgttcctggtcttcccagtgcaggttagaagacagacagaagaatgggtggggtttgcacattggtctcaaagtcaggacagacctgggaactacgttccaaatcagttatgaccacatttcctgggttagaaaacaccttctcctatctcgttcctcaaagtgcccaatcccaatcccaaaattattattttgggtcccaggaacttcctcaaacaatactgataaaaaggtcactttacctctaacagtcattaacctaaaataagccatctaccaagatcttgttcctccagaccacttggcgtggttagctgttttttctaaaataaacatttcaagaacaagatgtcaaa

SEQ ID NO: 403417 - DNA, 408 bp, Homo sapiens
gtgctgggattacaggcgtgagcccggctagttaaatgacttaaaattccagatagaataagttcagtgagacttcaaactaaacttgtagacaccattaccatgacccctctccatactcccaaatttgtggagctgatcttttaagcaaggtcagtgatttcccacacatctaggtctggattaggtaccccaagtatttcaaggctcaagatattgtaagtaccatgttatctataacataggtttgatcatcataactttttgtctccttaaaagtaggattggaaacacgatggtggccacagaagttggaatccactgagtgtgtaacaactcacctgccaaaataagaaaaaaaagaaaagtagggtggctccaagatttttgataaaacaaaaaaactgt

SEQ ID NO: 403418 - DNA, 444 bp, Homo sapiens
tggcctcccaaagtgctgggattacaggcgtgagccaccgcaccttgccttgagtaaatatcttaatgtatgtatgcaagtatttcaatagaatagttacctaataatggaattacatattttaagtttgacagattctaccaaattaccctccaaaagagtctaccaatttatccattctcttacagtatataaagtggcccatttccctatccagcagcatttaaacaagctcaagtctccctttaaaagaaaaaaaaaaatccggagccacgcacagtggctcatgcctgtaatcccagcacttttgtaggccaaggcaggaggaccatttgagcccagaagtttgaggttacagtgggctatgagggcactgctgcactccagcctgggcaacagagtgagaccctgtctctgaaaaaaataaaatcctcccttgatccc

SEQ ID NO: 403419 - DNA, 378 bp, Homo sapiens
aaaaaagagtatgacttgctgaaagtctcagatgatcatttgcatttttagcaataaagtatttttcaaattaagatatgaacattatttccacataatgctgttgcacatttaaaaggctacagtataatgtaaatataacttttatatatactgagatacgaaaaagtttgtgtgactcattttgttgcaatatttgctttatggaggtagtctgtaaccaggcccataatatctctgagatatgcctgtttttaaagaagtaatgtctagaaatttttcagatttgttaaacagctgtaaattcacagattccaacatttgatggaacccagcaggataaatataaagaaacatgacgtctgaaaatctgtgact

SEQ ID NO: 403420 - DNA, 752 bp, Homo sapiens
gcttaaagatgatctttccaataagagattatagtctttctcacttggaaaattggtttgttgatctggaggggaatggggggctatttcatggtttctgaaggccaagattccctctgagtggatttatcgtttgagccacctgtgtacttagactcccactcactttcttcaaggagaatcctgctgtctatggatttagccaggtttaaaatatatttatagtaggaactaccaaacattatctcaagctgagctataagaaagcccatcaaagttaacttccaaggcattctgatagttatgccttgattctggatcttgattttcccacacttctgttttcctttttatgtggaaaaaaaaatcagaggaaaactcagtattcagaaagaaaaaatgtacaggaaaataccagcctggacaatgataggtaaaggaatgccaggaactctgccgactgctaccaggatgacagaatctagcttcagaatccagttgctggaggctttctcttaaaagagcttaatagaaccttcatgcattatcaacgctcatttcccaatgtctcctcaaatgaggaattaatgttaacagatcagagggacacccaaaactgactagatgagcttactgtgactgtcctccctttgtagctcatttataaactgtaaaactcgcagtaatatagctcctgaggttatatgcagcaatttacctcattttcttttctcactcataatatagtatta

SEQ ID NO: 403421 - DNA, 544 bp, Homo sapiens
aggtgtacatcctgataggacttatagaggcaagtctaggggcagtacagaggcaagacagatgatgcagtgaagagagaaagggatttcagaagttcttgaacaaccaaagggactacgatctagtacagaagtgaatatgggtaagctttaggcacacagttcatttattttagcaggctggaacacaaagcaagattatttatttgagaataagaccaggaatcaggtattggaagtttaacgtgcagtctgcgagttggtatagagaaggcagagctgcaatccggatggtctggactttctgtggtgacaggctaaaagggatttaggatctaaaaatagtcctcatgatatgtttgggggatgcttaggggagcttggtaccaagtggataatcacttaaatttagtcatctacacgtgactggttttcaccaatttgtagaagggagtgctaggaggggaggaaaggtcaaaaaactggtagtctcatcaagaatttcaaaggctctttggggcacctcccttaaatcctgtaatta

SEQ ID NO: 403422 - DNA, 512 bp, Homo sapiens
agctgggcggggaggagggggcctcagggggctgttatgataagcaagagctcagtctaaagacatgttcccaagctgaaggtttcatttcctgccaggcaactcacccgtttgaatcaaacacagaatttagtattcaccatagaacaatcatatgacaaaaactttgcagagtttacccagatgtaggttttccttaaggtaaaagaggagtcatattaccgaagcctcatcttctcacgagttcaaaacctctccaacctctcaggagaaaccaagggccggaaaggttaaaggcctcaccctcaaggtcccaccaaagaatcgaagctggtgccagctctccgactcctacccagcaacccgccccaggtggccagcagctgcctctgagaatgcagaaggccgaggggggctgagagtgtttctaaatcacagcacacttgctccatcccgatggccttgtgatgcctgaggcatgagggcaggccaggacaggagccaaaaagcgg

SEQ ID NO: 403423 - DNA, 472 bp, Homo sapiens
aaaggctgaagaaccctaagcccaccagccctcagtgtgcaggatttagacacacaatcaacagaaatacagaaatgcccgttttagcacctcatgtaaaccctacacttttacatttcatgtcaatcctctagataatctttttgttgttattgaggcggagtcttgctctgttgcccaggctggcatggagtggtgtgatcttggctcactgcaccctctgcctcctgggttctggtgattctcctgactcagcctgggattacaggtgcatgccactacacctggctaatttttgtatttttagtagagacagggtttcaacatattggccaggctggtctcgaactcctgacctcaagagatccatctgccttggcctcttaaagtgctgggattataggtgtgagccaccatgcctggcctctaggtaaccttttatttgaagttgagatttgccttgattagtaca

SEQ ID NO: 403424 - DNA, 906 bp, Homo sapiens
cgggcccggccggggcccgggcgcgaggagcggggcgggggcgtggggaccaggagtcggcggaccgcggcgcgggcgaactccccagaggaggaggtagtgcgaggcgctgaggggggcgccgagttgctgcccttcccccgggaccgcgggccctgcaccctggcccagatggcgatgcgcagcgcgctggcccgcgtggtggactcgacttcggagctggtcagcgtggagcagacgctgctggggcccctccagcaggagcggtcctttcccattcacctgaaggatagtgttgagtttagaaacatctgcagtcatttggctctacagattgaaggacagcagtttgacagagacttgaatgctgcccaccagtgtttgaagacaatagtcaagaagctgattcagtcacttgctaattttccttcagatgcccacatggtagcctgtgcttccttgagacagatcttacagaatctcccagacatatgagtgttaaaggcatcgggagtaaaaccacagccagcactgttaagagaaccagataccttaccttcctaattgagtcagcagacaatggatatttttatatccaaaggggaaagacttgatggtacgtggagcagtctgaccagtggcatctgtagccttcgggattatagcatgttaatgaaatttttttaaagcagtagttcatatttttaagtatattgacctatttgctgactttctgattgaaatacattctactttgtgaagctgatttgattatgtatgtatatatttattcatattattagtttttattgaatgataccttaatttgtattcatattaatgtaggtctaaagggtttaatgtggttatttatataattaaagttccatggttcttaaaattacc

SEQ ID NO: 403425 - DNA, 609 bp, Homo sapiens
agaagcctaggattcagtgtgatttgtccccttcatgtcccccagactccagaaaggtgctcaggttaaatggtgtctcatctgtgtatgccgcacttgcactacacctgagggtccctggaagacatctctctctgggttttatattccatggtgatatgacttgctggctaaagcattacagtgtactgtttctggtcgggactggaacagaacttgagctgttttggtcagtcccttcctatcttaagatgttgtgttgtacaattattcttaagaactacaagtgaaaaaaggaggagaactgggtggtccaaggccaccagagcactgtcctgcagatcccaaggagccaatttaaactaagaaaggtattggctgagatagtgaaagaagtctttcctccttctgatcagaggagtaaaaagaaaaaaaaaaatcaatagcatcttcaaatctgctggcttaggcagataatcagtgggataatgaccagtgaatatactaatagaaggactgagagtcaggtgagctaggaaggcaatgaagttgaacagctcttgaagaagtaagcctgagaaaggagggaaataagtctcatgatatgct

SEQ ID NO: 403426 - DNA, 741 bp, Homo sapiens
gtaggattgtattagttcttcagatgtttggtagacttcagcaatgaagccattgggtccaaggcttttctttactgggagactttctgttacggctttggtctcattacttactattggtctgttcaggttttggatttcttcctggttcagtcttggtaagttatatgtgtctaggaatttgtcccttcttctagattttccaatttattggcatacagttgctcatagtagccactaatgatcctttggatttctgcagtatcagtagtaatttagtctcctttttaatttctgattttatttttaaatgtgcatactttttaagaaagaatttctaaagaaaagatacatatgccaaaatagaagtataatattattcatcactttatgtataacaacaaaaaaattaggaagtaacttaaaagactaaatagtagcctgttgactaaatacctttgatttgcagtgtggcagttcatcagatgtttattgtgttttgtgtttacgtctgtgtatgatagccctaaatagaaatataagatacagttagtttgaggagcattgtattatggagagttgggtacacatgtgaaaagtggaatagtataaaacagtagatgagagaaagagccttgcctcttctttaatatcttttcttagaattgaaggtaatgccttatgggaatagggccttattaaatgttaatgattaacattttgaagattattaaggttttt

SEQ ID NO: 403427 - DNA, 713 bp, Homo sapiens
gtaggattgtattagttcttcagatgtttggtagacttcagcaatgaagccattgggtccaaggcttttctttactgggagactttctgttacggctttggtctcattacttactattggtctgttcaggttttggatttcttcctggttcagtcttggtaagttatatgtgtctaggaatttgtcccttcttctagattttccaatttattggcatacagttgctcatagtagccactaatgatcctttggatttctgcagtatcagtagtaatttagtctcctttttaatttctgattttatttttaaatgtgcatactttttaagaaagaatttctaaagaaaagatacatatgccaaaatagaagtataatattattcatcactttatgtataacaacaaaaaaattaggaagtaacttaaaagactaaatagtagcctgttgactaaatacctttgatttgcagtgtggcagttcatcagatgtttattgtgttttgtgtttacgtctgtgtatgatagccctaaatagaaatataagatacagttagtttgaggagcattgtattatggagagttgggtacacatgtgtctttctagaattgaggtatgcctatgggaataggcctattaatgttatgataacatttgagatattaaggttttgcgatccctgtttatagcattcttccttacacgggccattttgc

SEQ ID NO: 403428 - DNA, 563 bp, Homo sapiens
tactaatttgttttcatggtattctgttttttaccttttctttattgtattgattcatttaggagactgagtctcactctgtcacccagcctggagtgcagtggcatgatctcagctcactgcaacctccacctcccaggttcaagctattcttctgccccagcctcctgagtagctggaactacagacgcatgctgccacacctggctaattttttgtattttggtaaagacagggtttcactgtgttgcccaggctggtcttgtactcctgagctcaagtgatccaccagcctcagccttccaaagtgctaggattacaagcgtgagccactgtgagccaccatgcctggcctattgtatttatttatatttatctaatatttaaagagctttaaactctccatagcaggtacttttattttatttacttatttttatttagttagttatttattaggtaatacttaagaaatatacaaatgtaaaagcatagttcagtaaatattcatgcttgaataaaacatgctctccccctcctcgttacaggcagcctccatgctg

SEQ ID NO: 403429 - DNA, 789 bp, Homo sapiens
tgtacctcattttgggcttttctgatttctttcctcatgattaaactcaagttatacacttttggcaggaacaccacagaagtgttctcagtgcatcatatcagcaggtttgtgataattggatgtcctattaattactagtgatgttaactttgaccacttggttaaggtgatgtctgctaggtttctccatgtaattaatatgtccaggatatctttttagcatgaacactaaattcttttttttttcccctgagtcttgttctgccaggcaagactctgcctcctaggttcaagcaattctcgtgtctcagcctcccgggtagctgggatcataggcctgagccaccatgctctctaattttgtattttaagtagagaccggttttaccatgttggccaggctggtctctaactcctggcctcacgtgattcgcctggcctcctaaagtgctgagattacaggtgtgagccaccgcccctggccttattctgcttttggtatgtcagaaaatttccataaaaaaaaagttagagatgtattaactgaattactacattttccaaaattaagaactaatttctcagaagttgaaaaacagtaagctgtagtcaactgaatatgtaaactaacaaaaacagacagcaagtgtatcttttcttagattcttttgtgggggaaggggagtggctaaaatttatgtctgagaaggttgacagtggttcaaatgtgaagaggcattaaggaaagacaactaggattcaataaagacaggctactaaaattaa

SEQ ID NO: 403430 - DNA, 377 bp, Homo sapiens
tggtggtgcatgcctgtagtcccagctactcaaacacctgtagtctcagccaccctgaggcaggaggatcgcttgggccagggaggtcaaggcagcagtgagccagaattgcaccactccagcccaggcaacagagtgggaccctgtctcaaaaaaacccaaataaacaacaacaacaaaaaaaactataatattttcctatttgttcatcaatagttcaagaggatataaaaaatttttcactaagcgtggtggctggatccttcctcacttgagcccaggaagtcgaggctgcattgagctatgatcacaccattgcactttagcctgggtgacagagtgagataccatctctaaaaaaaagaatttttcagtaa

SEQ ID NO: 403431 - DNA, 585 bp, Homo sapiens
ttttgcagtgtgtatgtgtgtgtacggaactatatagatgttgattgtccctaaatgatcttcttccaaactcatccaaaccatttaatttgtagcaggaatcccaaattgggaagtgagtgtttgcctgttcctttttccactctgtttcctcattggctttgccatttacccaactgcccccattctaagattggtgtttactgatcaagagcaaagctctactgccttaggagtagttcataaaatgattcctagatgtaatattcactctcttccctgcctagtccccttagcaaggacctctctaacattttatgtttgaattgttttcttccagagacaaaggtaagttagatcaagagtaaacagatggagatgttcattcttggaagcagcaagcattttgttatcattgttattgtctgagcaagtgaaaaccagatgagaagagccttgacctgcctccttcactagcagaagtgaagtaggtcgtatctttcttgcagcattcctgtgagcgttagaacaactccggagcccatgagtaaggctactgtgtgttagaattgtgattctgcctgt

SEQ ID NO: 403432 - DNA, 861 bp, Homo sapiens
  misc_feature (800)..(800): n is a, c, g, or t
agctttggacgtgacaccaggaatggctgggcctggacaatggccttcctggcactgcccagccagtcctctgtgcttgttgccagatgcacctgatccctgagtccccagcatgggtctctttctcccaggcagatggggaactcaccttcttctcagatgccccttcccaacataagctgcttctgccctctggccccgagatggccaaggtgagctgtgtagacatagagtctggaggcatggggctggctaacgtggaggcaattctatgaacagacatggccaggccaggaatgcggcatggcctcaggtctcatccttgaaggcctgggctcctggtctgcctgcagacttcctgagaccacgtcttgttctcatctgccagcagatgcctggctcatgggtgagccgggcttaggtggaaacacaggagcccagaggggaaaggatcctcccccagcttgggctggagtcccaacttccaatcatcaatctttgcaaccctggggctggacctggctagttccatggtaaggatccttctccgtcacccagtcagtcccaggctgtgtgggaaactggctgtggtgggcaggtctgaggtctcaagtctgacaggggccactggagcctccaactcaccaatcaaccaagtgtgagaggttgctttggttgaatggccatgtgctggggtctgactggcccagccacagggaggctggcatcccctagctgagtcctggacccagaccctccagggcatggagcccattgtgaggtgtctggtgctgaagtgngtggggaggcccgtgcaggcctacagctttgtcatctgcaacattcctctccccactttct

SEQ ID NO: 403433 - DNA, 448 bp, Homo sapiens
cagacaccaaacggcacatactgattgtatgagtacatttagatatgaaatatctaaaataggtaaatccattgccagtggctgaaatggggagtgattgcttaatgggtatagggttttcctttgggggtgatgaaatgttctggaatcagacagtggtggggttgcacaaccttgaaaactactgaaaaccctgtgaaatgtacagtttaaaatggttaaaatgatacattttatgttgcataaaagaacatttaaaaaaattaatccagtggggtctgatggcaaattgacatgagggaacttttttgagggtgatggaagtgttatcaatctagattagagtgatggttgcacaactgtataaatttataaaaactcatcaaactgtactcttaaaatgtgggtgtattttatggtatgcaattatacctcaataaagctgttt

SEQ ID NO: 403434 - DNA, 430 bp, Homo sapiens
ctgtgatttttctaagcatttatatacatatatatataattcatcataacttcatgaggtgttaagatttccacattaaagataaagaatttggagcactgagaagtaatattactcaaatttattcatggtcacacaggtaggaattgggagtcaggttcaaatccaagcctggtttgcttcataagcttgcctcttaatcacctcatgtgtacttcattaaagagataatgtatatataatatttattattgtgcctatcacttggtgctctctcaataaattttagtattgttttgcttctttctcttcccctattctatataaaaatatgcagttggatgtgtttgcatttactgatgtctaatgtataatttgcactgagttcaaaaaaatattttttatataattattgaaaagacaattggtg

SEQ ID NO: 403435 - DNA, 506 bp, Homo sapiens
gcacgagatgcaaccagttttataatgtaaagcaggcttttatttttatactttcaaaaatgtatgagggttaataaaaatgtttgaagaaaagacaaaattaaaagaaaaaaagtggatataaatccctctgtcacgaatgataaaattgaagtagttggtaacatttggccccgtttcctaagctccccagccttgtagaaagctttgcattttggccgggtgcggtggctcacgcctgtaatcccagcactttgggaggctgaggcgggtggatcacctgaggtcaggagttcgagaccagcctggtcaacatggcaaaaccctgcctttactaaaaatacaaaaattagctgggtctggtggtgcatgcctgtagtgccagctacttgggaggctgagacaggcaaagcacttgaatccagaaggcagaggttgcagtgaaccgagatccggccattacactccagcctgggcaacagagcaagagtccgtctcacaaaaaa

SEQ ID NO: 403436 - DNA, 445 bp, Homo sapiens
gtgggggaaaatttattgtttcctcattttcccccagcattatttgagtgtctgcaaatgcatattggtagtttttctagtaggacctggtttgtggttgttaatggtaaatgtgaaaattagatgtagtccaggctcaaaaggagtttaaaatctgatagaaataagactttccacaaccactagtgtggcaaaatctctgtgggtaaatgtaacttcaagcataatgtacccatctctcacattttgctcaagttgaatttcttccgttctgaggcagccactccctctgtaccatatgattacatggcttgcttacttgctgtactgcctttagcattgtcggttgggtgttttaaacctgcacgttttatttctcaagtagaccggaggatccttaaaaggtagccaaagaatagaattatataatattttaaaaagtaaa

SEQ ID NO: 403437 - DNA, 457 bp, Homo sapiens
taagagttgtctctaaatcctgggaaaggaaaggggactggggaggtataaacatgaataagtgacccatctataaatgtattttgctaagcatgaatttgattctttcttagaaattgaagagatttagagattggttttctctgaactttgggaaacccatggttagcagagcccgtgataaagttagaagaatgacaaaatgataaaattggatagagtctgctgcatttgaatatgtaatgtgcatttgaatatgtataaagatatagctctgtactgagtatgtatgaaaacattaacctaatatttttacatcctactaatttacagtagacgatgaagtattttgtagaatcttgtggtttttttggttgttttttttgtttgtttgtttttttgagacagggtctcactgtgtcccccaggctagagtgcagtggtatgatcatggctc

SEQ ID NO: 403438 - DNA, 590 bp, Homo sapiens
cattcatttcaaaaggtcatatggtttcgggagacagggcacaggagagggcttggataatatgaggtcactacctagaccacagttcattggcagtgagctcgtggccaatccgtgaatgcatagtctctgagcccacctttcttcatgcattaattttggaaataacttttgtactgcaaattactccgggttcttcaaagaatgagatgagttaatggatgcagctccactgtgcaaaataaaaagattatgcaaatttgaggagtcattatgagaggaaaattggagtaaggtcaagggaatttttccttcactgtttgtggtcgaaaaagtatgtgtcagggtttttaaatgatgcagaagtgatccgtggacatgagaactttccccatttctgacattttctattttcgtttctgctttttctgaacttaaataagacactgtgttctgctgacaagaaaaaaaaatactaaaccccttcatttctctgaatacacagatagatggttagaacctgagaatgacccagcccctggcaagatcatttcatactgttcagaatccactctgccccctgcagggca

SEQ ID NO: 403439 - DNA, 895 bp, Homo sapiens
cttcctgacagcacacaaccttgattaggaggggctgggagggaggatcgatgagcccctgacccctgggttctgaggctgccagggtcgcttgcagctcggccgcgtggaggtgaccgggcggaactccgagggggcgcggggagagctgggcgggcccaccgctccagcggctgctgtcaggggccgcgaggctttccctgaagatgcagcgtagcatattttgcacatgagttcagaggaagaggaagtgtagccggcggacgcgcggcggcggcggcgggggcgcgtcggggctggagccggagcgcgccgggcgctgggcgcagcgagcgagagcgcggcggccgcgggctccggcgagggacagacgcaccgatcgccggagggacagacacacgaccacgcggcgccaccgcccacgcctccacccaccggcgcccaagtcctccccgcgccgcctcctctgtatggcacaaactttcctcccgggacggaacacgctgcctcagggagcccgcgaccgcgccttctcctccgccggtcccatacggtaggcggcggggggggcgcgacagggcttggggtgtcgaccggcacaggcccctccgtttggccccatggaccgggtctctggcgggtagtgggaaccgcgcgtggcgcctccctgcaggttgctctttgccggggctccggagctgccagagcagcaccccctggcccgcgtcggatggggacctgggctgatccttgggacgcctggatcttgggccaacttttttttgcggggaacgggtgtaggggagtcattcctggagcgatgtagggagaggcacttcggagcagcctgttgggggtcgtaggctctgcaggctcagaagcgcctaggaaggac

SEQ ID NO: 403440 - DNA, 853 bp, Homo sapiens
cttcctgacagcacacaaccttgattaggaggggctgggagggaggatcgatgagcccctgacccctgggttctgaggctgccagggtcgcttgcagctcggccgcgtggaggtgaccgggcggaactccgagggggcgcggggagagctgggcgggcccaccgctccagcggctgctgtcaggggccgcgaggctttccctgaagatgcagcgtagcatattttgcacatgagttcagaggaagaggaagtgtagccggcggacgcgcggcggcggcggcgggggcgcgtcggggctggagccggagcgcgccgggcgctgggcgcagcgagcgagagcgcggcggccgcgggctccggcgagggacagacgcaccgatcgccggagggacagacacacgaccacgcggcgccaccgcccacgcctccacccaccggcgcccaagtcctccccgcgccgcctcctctgtatggcacaaactttcctcccgggacggaacacgctgcctcagggagcccgcgaccgcgccttctcctccgccggtcccatacgctgctgaaatgggttgcggattgaacaagttagagaaacgtgatgaaaaacggcctgggaatatttattcaactttgaagaggcctcaggtggaaaccaagatagatgtgtcctatgaataccgcttcctggagttcacgactctgagtgctgcttcaggcgtcactcctgtgtaatgaagagaccagaatgtcagcctgtgaagatcatcatgtgttgggacaaagccctcctccatttcgaacaggaagtcacgttctcctggagtgggaaacataactgagaatcgtttctgccttg

SEQ ID NO: 403441 - DNA, 340 bp, Homo sapiens
cagatattttctatgttaatgaagtagtaacactgttttgggcttggtgtagtggaaaagcccagctgggctttggaatcagacagagctggtgaggatgctaactagacccagtctacatgtgtaacctcctcagtttcttcacagctctgagcatcaatcgcctcaagtgtgaaatggggtgaaatggcacccacctctttggatttttgtgaggattaataagatgtgaataaagtgcttggtccatggtaagtactctgtgggtagcagttaatcacatgctgataggtaatcaatgtggcagatactgttagtgcccacccaatatccatggaag

SEQ ID NO: 403442 - DNA, 486 bp, Homo sapiens
taagtatgtgaggtgatggatttgttaagtagcctgatttaatcagtccacattgtaaacatatatcaaaacatcacactctaccccataaatatacaattattatttgtaaattaaaaataaaatacaaaatcatcagaagggtggaagcaggggaaaaaaaaaacagtgatcttctttacaatacttctatcatctttagaggcagctccaggtcctgccttcctgggaagagagaattcactgtattgtaagatacgagtcgcccctccctcgcatgtgagccagagctggttaacaggcactgccttgcagggcccgcctggtgctgtgcagtctttggtgtgcctgcaggagccatgcatggctgagaccctggatgcagccatgacctctgtccactgtcctgtagcagctggagggctgagctcatcacccaggtccttatctacctgcccatcattaccagagacagatttggaaaag

SEQ ID NO: 403443 - DNA, 447 bp, Homo sapiens
  misc_feature (16)..(16): n is a, c, g, or t
  misc_feature (260)..(260): n is a, c, g, or t
ctttcaccacaggggntgagcaagacactggatggaccagaaactcatcccagagttcattaagaagatccaggaggctgcaagccagggcctgaaattcgttggtgttatacctcagtaccattcctctgtgaactcggcaggcagcagtgctccggtgtctactgccaacagcaccgaggatgccagagatgcaaaaaacgcacgtggggatcacgcgtcactggagaatgagaaaccggggactggggatgtgtgcntgtaccagcagggcttctcgctggcggccctgcaccccttcgtgcagcccacccatgagcgggagaagacgcccctggagcacatctttagagccatcctgatcaagaaaaccgacagatctcagaaaactgatcttcacaatgaaggctacatcttggaattagattgctgttcctccttagacca

SEQ ID NO: 403444 - DNA, 2784 bp, Homo sapiens
cttcctgacagcacacaaccttgattaggaggggctgggagggaggatcgatgagcccctgacccctgggttctgaggctgccagggtcgcttgcagctcggccgcgtggaggtgaccgggcggaactccgagggggcgcggggagagctgggcgggcccaccgctccagcggctgctgtcaggggccgcgaggctttccctgaagatgcagcgtagcatattttgcacatgagttcagaggaagaggaagtgtagccggcggacgcgcggcggcggcggcgggggcgcgtcggggctggagccggagcgcgccgggcgctgggcgcagcgagcgagagcgcggcggccgcgggctccggcgagggacagacgcaccgatcgccggagggacagacacacgaccacgcggcgccaccgcccacgcctccacccaccggcgcccaagtcctccccgcgccgcctcctctgtatggcacaaactttcctcccgggacggaacacgctgcctcagggagcccgcgaccgcgccttctcctccgccggtcccatacgctgctgaaatgggttgcggattgaacaagttagagaaacgtgatgaaaaacggcctgggaatatttattcaactttgaagaggcctcaggtggaaaccaagatagatgtgtcctatgaataccgcttcctggagttcacgactctgagtgctgagtgctccggctgggagaaaccaaagcccagagcccagctcaggccccagaggggaggtgcccctcgccaagcagcccagctcaccctccggagagggagatggtggagaactttcaccacagggggtgagcaagacactggatggaccggagagcaaccccttggaggtgcatgaagagccactctcagggaaaatggagatcttcacccttttcaacaaaccgaagagccatcagaagtgccggcaatactaccctgtcaccattcctctccatgtctccaagaatggccagacagtgagcggtttggacgccaactggttagagcacatgagcgaccacttccggaaaggaggcatgctggtgaacgcagtcttctaccttggaatagtgaatgattccttacatggcttgacagatggagtattcatctttgaagctgtttccacagaagatagcaaaaccatacagggctatgatgctattgtggttgaacaatggacagtcctggaaggtgtcgaagtgcagacagactacgtgcccctgctgaactcgctggcggcctatggctggcagctcacctgtgtgctaccaactcccgtcgtcaagactaccagcgaggggagtgtatccaccaagcagattgtctttcttcagagaccgtgtctacctcagaaaatcaagaagaaggaatcgaagtttcagtggcgattctccagagaagaaatgcacaacaggcagatgaggaaatcaaaaggtaaactcagtgccagagacaaacaacaagcagaagaaaatgagaagaacttagaagaccagtcttccaaagctggagacatgggaaactgtgtttcgggacagcagcaggagggtggagtctccgaggagatgaagggccctgtccaagaggacaagggagaacagctgtcccctggtggcctgctgtgtggggtgggtgtggagggtgaggctgtgcagaatggtcctgccagccacagcagggccctggtggggatttgcactgggcactccaatcctggagaggatgccagggacggggatgctgaggaagtcagagagcttggtacggttgaagaaaactgagtcttgggcaatttgtgctaaaactaggtgagttgccaaacccaaggcatcttaccaacagctggtttgggggctggtttccctggtgttgtgtgttacctaccctttggcttggcttgacctctccttgtgagctcacctgagccctcccagggccaggttcctgacagtgttggtttttgcacatccactggaaaggtgtcattaatgacccagtgttagaatgcaagaggtcaggttattctagccctcatggctgaaggcccagtcctggctccaccactcctccagccagagggtctggaccatccagtgcctgtcctcgccacagggcctccagggagcattcgggtcaaatccatggacaccctgggctacaaaccaaggctgctgttcatcccacatcgtgtggggcagtgtccatcccctgcagctacttggtgacttaacaactccaggagccctgtcagctgccctcctccacctaaaccccttcgactcttctgctttgacaaagaaaatgacattggggagggggaggtgctccgcctcccagcttttctcaaaatagtcctatagatactggtaatctggaaatgaagaagtaattctgtctctgcacctacttttgcagaatgttcaaggaagtattctgtgttagtattaatgccaaaaagttgtttttaaaggttttgtactcagcacatcatacaaaccacattacttctgtcacttcagggcatcgggactggctggcgcccttgttatgtgctattttaatcagtgtaacattggtcaagttgttacccatgtatgctgtgtttatcatgtgtatatcgtccagaaagtattaaggctttaggtagatgcaactggcgaaccttggagagggaatgctgattgtcttgaccaaacccacagcctgtctcttctcttgtttagttacttacggcaataaatcatctatgagttag

SEQ ID NO: 403445 - DNA, 3808 bp, Homo sapiens
cttcctgacagcacacaaccttgattaggaggggctgggagggaggatcgatgagcccctgacccctgggttctgaggctgccagggtcgcttgcagctcggccgcgtggaggtgaccgggcggaactccgagggggcgcggggagagctgggcgggcccaccgctccagcggctgctgtcaggggccgcgaggctttccctgaagatgcagcgtagcatattttgcacatgagttcagaggaagaggaagtgtagccggcggacgcgcggcggcggcggcgggggcgcgtcggggctggagccggagcgcgccgggcgctgggcgcagcgagcgagagcgcggcggccgcgggctccggcgagggacagacgcaccgatcgccggagggacagacacacgaccacgcggcgccaccgcccacgcctccacccaccggcgcccaagtcctccccgcgccgcctcctctgtatggcacaaactttcctcccgggacggaacacgctgcctcagggagcccgcgaccgcgccttctcctccgccggtcccatacgctgctgaaatgggttgcggattgaacaagttagagaaacgtgatgaaaaacggcctgggaatatttattcaactttgaagaggcctcaggtggaaaccaagatagatgtgtcctatgaataccgcttcctggagttcacgactctgagtgctgcggagctccctgggtcctcagcagtgaggctggcctccctgcgtgacctgcccgcccagctcctggagctgtaccagcagggcttctcgctggcggccctgcaccccttcgtgcagcccacccatgagcgggagaagacgcccctggagcacatctttagagccatcctgatcaagaaaaccgacagatctcagaaaactgatcttcacaatgaaggctacatcttggaattagattgctgttcctccttagaccacccgacagaccagaaactcatcccagagttcattaagaagatccaggaggctgcaagccagggcctgaaattcgttggtgttatacctcagtaccattcctctgtgaactcggcaggcagcagtgctccggtgtctactgccaacagcaccgaggatgccagagatgcaaaaaacgcacgtggggatcacgcgtcactggagaatgagaaaccggggactggggatgtgtgcagtgctccggctgggagaaaccaaagcccagagcccagctcaggccccagaggggaggtgcccctcgccaagcagcccagctcaccctccggagagggagatggtggagaactttcaccacagggggtgagcaagacactggatggaccggagagcaaccccttggaggtgcatgaagagccactctcagggaaaatggagatcttcacccttttcaacaaaccgaagagccatcagaagtgccggcaatactaccctgtcaccattcctctccatgtctccaagaatggccagacagtgagcggtttggacgccaactggttagagcacatgagcgaccacttccggaaaggaggcatgctggtgaacgcagtcttctaccttggaatagtgaatgattccttacatggcttgacagatggagtattcatctttgaagctgtttccacagaagatagcaaaaccatacagggctatgatgctattgtggttgaacaatggacagtcctggaaggtgtcgaagtgcagacagactacgtgcccctgctgaactcgctggcggcctatggctggcagctcacctgtgtgctaccaactcccgtcgtcaagactaccagcgaggggagtgtatccaccaagcagattgtctttcttcagagaccgtgtctacctcagaaaatcaagaagaaggaatcgaagtttcagtggcgattctccagagaagaaatgcacaacaggcagatgaggaaatcaaaaggtaaactcagtgccagagacaaacaacaagcagaagaaaatgagaagaacttagaagaccagtcttccaaagctggagacatgggaaactgtgtttcgggacagcagcaggagggtggagtctccgaggagatgaagggccctgtccaagaggacaagggagaacagctgtcccctggtggcctgctgtgtggggtgggtgtggagggtgaggctgtgcagaatggtcctgccagccacagcagggccctggtggggatttgcactgggcactccaatcctggagaggatgccagggacggggatgctgaggaagtcagagagcttggtacggttgaagaaaactgagtcttgggcaatttgtgctaaaactaggtgagttgccaaacccaaggcatcttaccaacagctggtttgggggctggtttccctggtgttgtgtgttacctaccctttggcttggcttgacctctccttgtgagctcacctgagccctcccagggccaggttcctgacagtgttggtttttgcacatccactggaaaggtgtcattaatgacccagtgttagaatgcaagaggtcaggttattctagccctcatggctgaaggcccagtcctggctccaccactcctccagccagagggtctggaccatccagtgcctgtcctcgccacagggcctccagggagcattcgggtcaaatccatggacaccctgggctacaaaccaaggctgctgttcatcccacatcgtgtggggcagtgtccatcccctgcagctacttggtgacttaacaactccaggagccctgtcagctgccctcctccacctaaaccccttcgactcttctgctttgacaaagaaaatgacattggggagggggaggtgctccgcctcccagcttttctcaaaatagtcctatagatactggtaatctggaaatgaagaagtaattctgtctctgcacctacttttgcagaatgttcaaggaagtattctgtgttagtattaatgccaaaaagttgtttttaaaggttttgtactcagcacatcatacaaaccacattacttctgtcacttcagggcatcgggactggctggcgcccttgttatgtgctattttaatcagtgtaacattggtcaagttgttacccatgtatgctgtgtttatcatgtgtatatcgtccagaaagtattaaggctttaggtagatgcaactggcgaaccttggagagggaatgctgattgtcttgaccaaacccacagcctgtctcttctcttgtttagttacttacggcaataaatcatctatgagttagtgcaccgtgaaaaaaaacgtcgtttatcgtgtcactaggaacagtcctggcctcatgtccaaaggattccagcccacaccccccattcactataagtttctaactcctggcagcatgatgacgtggtggaggaagacaaagttcccatggaaagctgcagagccagctaggcttgctgtgctttctcgtcatttgtagaaagagatggcaagtggaactcagatgccaccaggtaagtaaggggtacagccacctcccatttctgggatggtggagacaaatacctttttaaaataagcaaaaaaccttacatcagtgtctaacaaacattgtttccaagcttttaagtaaattagtgaggcaagttatttctgaataactttttaaattagtgaggcaagtcttttccctttgcaagtttattaaaataaaacatttgtaggccaggcatggtggctcatgcctgtaatcccagcactttgggaggctgaggcaggctgatcacctgaggtcaggagttcgagaccagcctggcc

SEQ ID NO: 403446 - DNA, 3307 bp, Homo sapiens
cttcctgacagcacacaaccttgattaggaggggctgggagggaggatcgatgagcccctgacccctgggttctgaggctgccagggtcgcttgcagctcggccgcgtggaggtgaccgggcggaactccgagggggcgcggggagagctgggcgggcccaccgctccagcggctgctgtcaggggccgcgaggctttccctgaagatgcagcgtagcatattttgcacatgagttcagaggaagaggaagtgtagccggcggacgcgcggcggcggcggcgggggcgcgtcggggctggagccggagcgcgccgggcgctgggcgcagcgagcgagagcgcggcggccgcgggctccggcgagggacagacgcaccgatcgccggagggacagacacacgaccacgcggcgccaccgcccacgcctccacccaccggcgcccaagtcctccccgcgccgcctcctctgtatggcacaaactttcctcccgggacggaacacgctgcctcagggagcccgcgaccgcgccttctcctccgccggtcccatacgctgctgaaatgggttgcggattgaacaagttagagaaacgtgatgaaaaacggcctgggaatatttattcaactttgaagaggcctcaggtggaaaccaagatagatgtgtcctatgaataccgcttcctggagttcacgactctgagtgctgcggagctccctgggtcctcagcagtgaggctggcctccctgcgtgacctgcccgcccagctcctggagctgtaccagcagggcttctcgctggcggccctgcaccccttcgtgcagcccacccatgagcgggagaagacgcccctggagcacatctttagagccatcctgatcaagaaaaccgacagatctcagaaaactgatcttcacaatgaaggctacatcttggaattagattgctgttcctccttagaccacccgacagaccagaaactcatcccagagttcattaagaagatccaggaggctgcaagccagggcctgaaattcgttggtgttatacctcagtaccattcctctgtgaactcggcaggcagcagtgctccggtgtctactgccaacagcaccgaggatgccagagatgcaaaaaacgcacgtggggatcacgcgtcactggagaatgagaaaccggggactggggatgtgtgcagtgctccggctgggagaaaccaaagcccagagcccagctcaggccccagaggggaggtgcccctcgccaagcagcccagctcaccctccggagagggagatggtggagaactttcaccacagggggtgagcaagacactggatggaccggagagcaaccccttggaggtgcatgaagagccactctcagggaaaatggagatcttcacccttttcaacaaaccgaagagccatcagaagtgccggcaatactaccctgtcaccattcctctccatgtctccaagaatggccagacagtgagcggtttggacgccaactggttagagcacatgagcgaccacttccggaaaggaggcatgctggtgaacgcagtcttctaccttggaatagtgaatgattccttacatggcttgacagatggagtattcatctttgaagctgtttccacagaagatagcaaaaccatacagggctatgatgctattgtggttgaacaatggacagtcctggaaggtgtcgaagtgcagacagactacgtgcccctgctgaactcgctggcggcctatggctggcagctcacctgtgtgctaccaactcccgtcgtcaagactaccagcgaggggagtgtatccaccaagcagattgtctttcttcagagaccgtgtctacctcagaaaatcaagaagaaggaatcgaagtttcagtggcgattctccagagaagaaatgcacaacaggcagatgaggaaatcaaaaggtaaactcagtgccagagacaaacaacaagcagaagaaaatgagaagaacttagaagaccagtcttccaaagctggagacatgggaaactgtgtttcgggacagcagcaggagggtggagtctccgaggagatgaagggccctgtccaagaggacaagggagaacagctgtcccctggtggcctgctgtgtggggtgggtgtggagggtgaggctgtgcagaatggtcctgccagccacagcagggccctggtggggatttgcactgggcactccaatcctggagaggatgccagggacggggatgctgaggaagtcagagagcttggtacggttgaagaaaactgagtcttgggcaatttgtgctaaaactaggtgagttgccaaacccaaggcatcttaccaacagctggtttgggggctggtttccctggtgttgtgtgttacctaccctttggcttggcttgacctctccttgtgagctcacctgagccctcccagggccaggttcctgacagtgttggtttttgcacatccactggaaaggtgtcattaatgacccagtgttagaatgcaagaggtcaggttattctagccctcatggctgaaggcccagtcctggctccaccactcctccagccagagggtctggaccatccagtgcctgtcctcgccacagggcctccagggagcattcgggtcaaatccatggacaccctgggctacaaaccaaggctgctgttcatcccacatcgtgtggggcagtgtccatcccctgcagctacttggtgacttaacaactccaggagccctgtcagctgccctcctccacctaaaccccttcgactcttctgctttgacaaagaaaatgacattggggagggggaggtgctccgcctcccagcttttctcaaaatagtcctatagatactggtaatctggaaatgaagaagtaattctgtctctgcacctacttttgcagaatgttcaaggaagtattctgtgttagtattaatgccaaaaagttgtttttaaaggttttgtactcagcacatcatacaaaccacattacttctgtcacttcagggcatcgggactggctggcgcccttgttatgtgctattttaatcagtgtaacattggtcaagttgttacccatgtatgctgtgtttatcatgtgtatatcgtccagaaagtattaaggctttaggtagatgcaactggcgaaccttggagagggaatgctgattgtcttgaccaaacccacagcctgtctcttctcttgtttagttacttacggcaataaatcatctatgagttagaaaaaaaaaaaccggggatttttcggggcgaaaac

SEQ ID NO: 403447 - DNA, 2712 bp, Homo sapiens
cttcctgacagcacacaaccttgattaggaggggctgggagggaggatcgatgagcccctgacccctgggttctgaggctgccagggtcgcttgcagctcggccgcgtggaggtgaccgggcggaactccgagggggcgcggggagagctgggcgggcccaccgctccagcggctgctgtcaggggccgcgaggctttccctgaagatgcagcgtagcatattttgcacatgagttcagaggaagaggaagtgtagccggcggacgcgcggcggcggcggcgggggcgcgtcggggctggagccggagcgcgccgggcgctgggcgcagcgagcgagagcgcggcggccgcgggctccggcgagggacagacgcaccgatcgccggagggacagacacacgaccacgcggcgccaccgcccacgcctccacccaccggcgcccaagtcctccccgcgccgcctcctctgtatggcacaaactttcctcccgggacggaacacgctgcctcagggagcccgcgaccgcgccttctcctccgccggtcccatacgctgctgaaatgggttgcggattgaacaagttagagaaacgtgatgaaaaacggcctgggaatatttattcaactttgaagaggcctcaggtggaaaccaagatagatgtgtcctatgaataccgcttcctggagttcacgactctgagtgctgcggagctccctgggtcctcagcagtgaggctggcctccctgcgtgacctgcccgcccagctcctggagctgtaccagcagggcttctcgctggcggccctgcaccccttcgtgcagcccacccatgagcgggagaagacgcccctggagcacatctttagagccatcctgatcaagaaaaccgacagatctcagaaaactgatcttcacaatgaaggctacatcttggaattagattgctgttcctccttagaccacccgacagaccagaaactcatcccagagttcattaagaagatccaggaggctgcaagccagggcctgaaattcgttggtgttatacctcagtaccattcctctgtgaactcggcaggcagcagtgctccggtgtctactgccaacagcaccgaggatgccagagatgcaaaaaacgcacgtggggatcacgcgtcactggagaatgagaaaccggggactggggatgtgtgcagtgctccggctgggagaaaccaaagcccagagcccagctcaggccccagaggggaggtgcccctcgccaagcagcccagctcaccctccggagagggagatggtggagaactttcaccacagggggtgagcaagacactggatggaccggagagcaaccccttggaggtgcatgaagagccactctcagggaaaatggagatcttcacccttttcaacaaaccgaagagccatcagaagtgccggcaatactaccctgtcaccattcctctccatgtctccaagaatggccagacagtgagcggtttggacgccaactggttagagcacatgagcgaccacttccggaaaggaggcatgctggtgaacgcagtcttctaccttggaatagtgaatgattccttacatggcttgacagatggagtattcatctttgaagctgtttccacagaagatagcaaaaccatacagggctatgatgctattgtggttgaacaatggacagtcctggaaggtgtcgaagtgcagacagactacgtgcccctgctgaactcgctggcggcctatggctggcagctcacctgtgtgctaccaactcccgtcgtcaagactaccagcgaggggagtgtatccaccaagcagattgtctttcttcagagaccgtgtctacctcagaaaatcaagaagaaggaatcgaagtttcagtggcgattctccagagaagaaatgcacaacaggcagatgaggaaatcaaaaggtaaactcagtgccagagacaaacaacaagcagaagaaaatgagaagaacttagaagaccagtcttccaaagctggagacatgggaaactgtgtttcgggacagcagcaggagggtggagtctccgaggagcattcgggtcaaatccatggacaccctgggctacaaaccaaggctgctgttcatcccacatcgtgtggggcagtgtccatcccctgcagctacttggtgacttaacaactccaggagccctgtcagctgccctcctccacctaaaccccttcgactcttctgctttgacaaagaaaatgacattggggagggggaggtgctccgcctcccagcttttctcaaaatagtcctatagatactggtaatctggaaatgaagaagtaattctgtctctgcacctacttttgcagaatgttcaaggaagtattctgtgttagtattaatgccaaaaagttgtttttaaaggttttgtactcagcacatcatacaaaccacattacttctgtcacttcagggcatcgggactggctggcgcccttgttatgtgctattttaatcagtgtaacattggtcaagttgttacccatgtatgctgtgtttatcatgtgtatatcgtccagaaagtattaaggctttaggtagatgcaactggcgaaccttggagagggaatgctgattgtcttgaccaaacccacagcctgtctcttctcttgtttagttacttacggcaataaatcatctatgagttag

SEQ ID NO: 403448 - DNA, 857 bp, Homo sapiens
tgcagggcccgcctggtgctgtgcagtctttggtgtgcctgcaggagccatgcatggctgagaccctggatgcagccatgacctctgtccactgtcctgtagcagctggagggctgagctcatcacccaggtccttatctacctgcccatcattaccagagacagatttggaaaaggcccctgcccctttgagatccactgaagcagccagtgtgtccacatttggccaagatgctgttacttcccattaagggaatgggcgtgtccagctaggaagctgactttgtagggatacccaaaaagcttttgttgggcatctgagatagcccctcggaagcaaggttggatggcctgggagcggaagagtagagcaggcgtctcttctaacctgtcataatcctgtgggtggtctgctttgatgaaattagggatggcaacatctgtgtcaggttttgggttcctctaaggcataaagtggctcattctcagctccgtgtgttacagcgaggggagtgtatccaccaagcagattgtctttcttcagagaccgtgtctacctcagaaaatcaagaagaaggaatcgaaggtaagagactttgatggccttcctaggttttcctcagcagggcttcatcttcagtggattttctgcagcatttgagggggcagcctgctccagcttccaagggctcgcagagcccaaggaacacctgagcccctggcaacccgaatcacatctcaggctgctaaaacgggacagctgaggggactggagggccttgtctgccatcgtcctgctgggccggccagaaggatggaggagagaggctcttctggaggcttcagcctgctagata

SEQ ID NO: 403449 - DNA, 387 bp, Homo sapiens
tttcagcattcatcatatcatttattcaggctcctgagagattccacttaagccgatgaaacagatttttatcatcagttgacctcttctctctccactccctttacaaatcccaacagaaatggagatcttcacccttttcaacaaaccgaagagccatcagaagtgccggcaatactaccctgtcaccattcctctccatgtctccaagaatggccagacagtgagcggtttggacgccaactggttagagcacatgagcgaccacttccggaaaggaggcatgctggtgaacgcagtcttctaccttggaatagtgaatggtatgtttggaattcacagtccttgggtggccctttgtgaactctgcttctaactcttgaaatc

SEQ ID NO: 403450 - DNA, 435 bp, Homo sapiens
agcattcatcatatcatttattcaggctcctgagagattccacttaagccgatgaaacagatttttatcatcagttgacctcttctctctccactccctttacaaatcccaacagaaatggagatcttcacccttttcaacaaaccgaagagccatcagaagtgccggcaatactaccctgtcaccattcctctccatgtctccaagaatggccagacagtgagcggtttggacgccaactggttagagcacatgagcgaccacttccggaaaggaggcatgctggtgaacgcagtcttctaccttggaatagtgaatggtatgtttggaattcacagtccttgggtggccctttgtgaactctgcttctaactcttgaaatcttagtccctcttcagagtctgcttcattcagaaagctctgcagccgataacc

SEQ ID NO: 403451 - DNA, 3272 bp, Homo sapiens
cttcctgacagcacacaaccttgattaggaggggctgggagggaggatcgatgagcccctgacccctgggttctgaggctgccagggtcgcttgcagctcggccgcgtggaggtgaccgggcggaactccgagggggcgcggggagagctgggcgggcccaccgctccagcggctgctgtcaggggccgcgaggctttccctgaagatgcagcgtagcatattttgcacatgagttcagaggaagaggaagtgtagccggcggacgcgcggcggcggcggcgggggcgcgtcggggctggagccggagcgcgccgggcgctgggcgcagcgagcgagagcgcggcggccgcgggctccggcgagggacagacgcaccgatcgccggagggacagacacacgaccacgcggcgccaccgcccacgcctccacccaccggcgcccaagtcctccccgcgccgcctcctctgtatggcacaaactttcctcccgggacggaacacgctgcctcagggagcccgcgaccgcgccttctcctccgccggtcccatacgctgctgaaatgggttgcggattgaacaagttagagaaacgtgatgaaaaacggcctgggaatatttattcaactttgaagaggcctcaggtggaaaccaagatagatgtgtcctatgaataccgcttcctggagttcacgactctgagtgctgcggagctccctgggtcctcagcagtgaggctggcctccctgcgtgacctgcccgcccagctcctggagctgtaccagcagggcttctcgctggcggccctgcaccccttcgtgcagcccacccatgagcgggagaagacgcccctggagcacatctttagagccatcctgatcaagaaaaccgacagatctcagaaaactgatcttcacaatgaaggctacatcttggaattagattgctgttcctccttagaccacccgacagaccagaaactcatcccagagttcattaagaagatccaggaggctgcaagccagggcctgaaattcgttggtgttatacctcagtaccattcctctgtgaactcggcaggcagcagtgctccggtgtctactgccaacagcaccgaggatgccagagatgcaaaaaacgcacgtggggatcacgcgtcactggagaatgagaaaccggggactggggatgtgtgcagtgctccggctgggagaaaccaaagcccagagcccagctcaggccccagaggggaggtgcccctcgccaagcagcccagctcaccctccggagagggagatggtggagaactttcaccacagggggtgagcaagacactggatggaccggagagcaaccccttggaggtgcatgaagagccactctcagggaaaatggagatcttcacccttttcaacaaaccgaagagccatcagaagtgccggcaatactaccctgtcaccattcctctccatgtctccaagaatggccagacagtgagcggtttggacgccaactggttagagcacatgagcgaccacttccggaaaggaggcatgctggtgaacgcagtcttctaccttggaatagtgaatgattccttacatggcttgacagatggagtattcatctttgaagctgtttccacagaagatagcaaaaccatacagggctatgatgctattgtggttgaacaatggacagtcctggaaggtgtcgaagtgcagacagactacgtgcccctgctgaactcgctggcggcctatggctggcagctcacctgtgtgctaccaactcccgtcgtcaagactaccagcgaggggagtgtatccaccaagcagattgtctttcttcagagaccgtgtctacctcagaaaatcaagaagaaggaatcgaagtttcagtggcgattctccagagaagaaatgcacaacaggcagatgaggaaatcaaaaggtaaactcagtgccagagacaaacaacaagcagaagaaaatgagaagaacttagaagaccagtcttccaaagctggagacatgggaaactgtgtttcgggacagcagcaggagggtggagtctccgaggagatgaagggccctgtccaagaggacaagggagaacagctgtcccctggtggcctgctgtgtggggtgggtgtggagggtgaggctgtgcagaatggtcctgccagccacagcagggccctggtggggatttgcactgggcactccaatcctggagaggatgccagggacggggatgctgaggaagtcagagagcttggtacggttgaagaaaactgagtcttgggcaatttgtgctaaaactaggtgagttgccaaacccaaggcatcttaccaacagctggtttgggggctggtttccctggtgttgtgtgttacctaccctttggcttggcttgacctctccttgtgagctcacctgagccctcccagggccaggttcctgacagtgttggtttttgcacatccactggaaaggtgtcattaatgacccagtgttagaatgcaagaggtcaggttattctagccctcatggctgaaggcccagtcctggctccaccactcctccagccagagggtctggaccatccagtgcctgtcctcgccacagggcctccagggagcattcgggtcaaatccatggacaccctgggctacaaaccaaggctgctgttcatcccacatcgtgtggggcagtgtccatcccctgcagctacttggtgacttaacaactccaggagccctgtcagctgccctcctccacctaaaccccttcgactcttctgctttgacaaagaaaatgacattggggagggggaggtgctccgcctcccagcttttctcaaaatagtcctatagatactggtaatctggaaatgaagaagtaattctgtctctgcacctacttttgcagaatgttcaaggaagtattctgtgttagtattaatgccaaaaagttgtttttaaaggttttgtactcagcacatcatacaaaccacattacttctgtcacttcagggcatcgggactggctggcgcccttgttatgtgctattttaatcagtgtaacattggtcaagttgttacccatgtatgctgtgtttatcatgtgtatatcgtccagaaagtattaaggctttaggtagatgcaactggcgaaccttggagagggaatgctgattgtcttgaccaaacccacagcctgtctcttctcttgtttagttacttacggcaataaatcatctatgagttag

SEQ ID NO: 403452 - DNA, 2666 bp, Homo sapiens
catggcagaaaggctgttctgcccctgcgccctccctggcctctctggggatccctgcagctgatgtattgtgatggagcagtggacttggatgctgctgcggagctccctgggtcctcagcagtgaggctggcctccctgcgtgacctgcccgcccagctcctggagctgtaccagcagggcttctcgctggcggccctgcaccccttcgtgcagcccacccatgagcgggagaagacgcccctggagcacatctttagagccatcctgatcaagaaaaccgacagatctcagaaaactgatcttcacaatgaaggctacatcttggaattagattgctgttcctccttagaccacccgacagaccagaaactcatcccagagttcattaagaagatccaggaggctgcaagccagggcctgaaattcgttggtgttatacctcagtaccattcctctgtgaactcggcaggcagcagtgctccggtgtctactgccaacagcaccgaggatgccagagatgcaaaaaacgcacgtggggatcacgcgtcactggagaatgagaaaccggggactggggatgtgtgcagtgctccggctgggagaaaccaaagcccagagcccagctcaggccccagaggggaggtgcccctcgccaagcagcccagctcaccctccggagagggagatggtggagaactttcaccacagggggtgagcaagacactggatggaccggagagcaaccccttggaggtgcatgaagagccactctcagggaaaatggagatcttcacccttttcaacaaaccgaagagccatcagaagtgccggcaatactaccctgtcaccattcctctccatgtctccaagaatggccagacagtgagcggtttggacgccaactggttagagcacatgagcgaccacttccggaaaggaggcatgctggtgaacgcagtcttctaccttggaatagtgaatgattccttacatggcttgacagatggagtattcatctttgaagctgtttccacagaagatagcaaaaccatacagggctatgatgctattgtggttgaacaatggacagtcctggaaggtgtcgaagtgcagacagactacgtgcccctgctgaactcgctggcggcctatggctggcagctcacctgtgtgctaccaactcccgtcgtcaagactaccagcgaggggagtgtatccaccaagcagattgtctttcttcagagaccgtgtctacctcagaaaatcaagaagaaggaatcgaagtttcagtggcgattctccagagaagaaatgcacaacaggcagatgaggaaatcaaaaggtaaactcagtgccagagacaaacaacaagcagaagaaaatgagaagaacttagaagaccagtcttccaaagctggagacatgggaaactgtgtttcgggacagcagcaggagggtggagtctccgaggagatgaagggccctgtccaagaggacaagggagaacagctgtcccctggtggcctgctgtgtggggtgggtgtggagggtgaggctgtgcagaatggtcctgccagccacagcagggccctggtggggatttgcactgggcactccaatcctggagaggatgccagggacggggatgctgaggaagtcagagagcttggtacggttgaagaaaactgagtcttgggcaatttgtgctaaaactaggtgagttgccaaacccaaggcatcttaccaacagctggtttgggggctggtttccctggtgttgtgtgttacctaccctttggcttggcttgacctctccttgtgagctcacctgagccctcccagggccaggttcctgacagtgttggtttttgcacatccactggaaaggtgtcattaatgacccagtgttagaatgcaagaggtcaggttattctagccctcatggctgaaggcccagtcctggctccaccactcctccagccagagggtctggaccatccagtgcctgtcctcgccacagggcctccagggagcattcgggtcaaatccatggacaccctgggctacaaaccaaggctgctgttcatcccacatcgtgtggggcagtgtccatcccctgcagctacttggtgacttaacaactccaggagccctgtcagctgccctcctccacctaaaccccttcgactcttctgctttgacaaagaaaatgacattggggagggggaggtgctccgcctcccagcttttctcaaaatagtcctatagatactggtaatctggaaatgaagaagtaattctgtctctgcacctacttttgcagaatgttcaaggaagtattctgtgttagtattaatgccaaaaagttgtttttaaaggttttgtactcagcacatcatacaaaccacattacttctgtcacttcagggcatcgggactggctggcgcccttgttatgtgctattttaatcagtgtaacattggtcaagttgttacccatgtatgctgtgtttatcatgtgtatatcgtccagaaagtattaaggctttaggtagatgcaactggcgaaccttggagagggaatgctgattgtcttgaccaaacccacagcctgtctcttctcttgtttagttacttacggcaataaatcatctatgagttag

SEQ ID NO: 403453 - DNA, 3156 bp, Homo sapiens
cttcctgacagcacacaaccttgattaggaggggctgggagggaggatcgatgagcccctgacccctgggttctgaggctgccagggtcgcttgcagctcggccgcgtggaggtgaccgggcggaactccgagggggcgcggggagagctgggcgggcccaccgctccagcggctgctgtcaggggccgcgaggctttccctgaagatgcagcgtagcatattttgcacatgagttcagaggaagaggaagtgtagccggcggacgcgcggcggcggcggcgggggcgcgtcggggctggagccggagcgcgccgggcgctgggcgcagcgagcgagagcgcggcggccgcgggctccggcgagggacagacgcaccgatcgccggagggacagacacacgaccacgcggcgccaccgcccacgcctccacccaccggcgcccaagtcctccccgcgccgcctcctctgtatggcacaaactttcctcccgggacggaacacgctgcctcagggagcccgcgaccgcgccttctcctccgccggtcccatacgctgctgaaatgggttgcggattgaacaagttagagaaacgtgatgaaaaacggcctgggaatatttattcaactttgaagaggcctcaggtggaaaccaagatagatgtgtcctatgaataccgcttcctggagttcacgactctgagtgctgcggagctccctgggtcctcagcagtgaggctggcctccctgcgtgacctgcccgcccagctcctggagctgtaccagcagggcttctcgctggcggccctgcaccccttcgtgcagcccacccatgagcgggagaagacgcccctggagcacatctttagagccatcctgatcaagaaaaccgacagatctcagaaaactgatcttcacaatgaaggctacatcttggaattagattgctgttcctccttagaccacccgacagaccagaaactcatcccagagttcattaagaagatccaggaggctgcaagccagggcctgaaattcgttggtgttatacctcagtaccattcctctgtgaactcggcaggcagcagtgctccggtgtctactgccaacagcaccgaggatgccagagatgcaaaaaacgcacgtggggatcacgcgtcactggagaatgagaaaccggggactggggatgtgtgcagtgctccggctgggagaaaccaaagcccagagcccagctcaggccccagaggggaggtgcccctcgccaagcagcccagctcaccctccggagagggagatggtggagaactttcaccacagggggtgagcaagacactggatggaccggagagcaaccccttggaggtgcatgaagagccactctcagggaaaatggagatcttcacccttttcaacaaaccgaagagccatcagaagtgccggcaatactaccctgtcaccattcctctccatgtctccaagaatggccagacagtgagcggtttggacgccaactggttagagcacatgagcgaccacttccggaaaggaggcatgctggtgaacgcagtcttctaccttggaatagtgaatgggtgtcgaagtgcagacagactacgtgcccctgctgaactcgctggcggcctatggctggcagctcacctgtgtgctaccaactcccgtcgtcaagactaccagcgaggggagtgtatccaccaagcagattgtctttcttcagagaccgtgtctacctcagaaaatcaagaagaaggaatcgaagtttcagtggcgattctccagagaagaaatgcacaacaggcagatgaggaaatcaaaaggtaaactcagtgccagagacaaacaacaagcagaagaaaatgagaagaacttagaagaccagtcttccaaagctggagacatgggaaactgtgtttcgggacagcagcaggagggtggagtctccgaggagatgaagggccctgtccaagaggacaagggagaacagctgtcccctggtggcctgctgtgtggggtgggtgtggagggtgaggctgtgcagaatggtcctgccagccacagcagggccctggtggggatttgcactgggcactccaatcctggagaggatgccagggacggggatgctgaggaagtcagagagcttggtacggttgaagaaaactgagtcttgggcaatttgtgctaaaactaggtgagttgccaaacccaaggcatcttaccaacagctggtttgggggctggtttccctggtgttgtgtgttacctaccctttggcttggcttgacctctccttgtgagctcacctgagccctcccagggccaggttcctgacagtgttggtttttgcacatccactggaaaggtgtcattaatgacccagtgttagaatgcaagaggtcaggttattctagccctcatggctgaaggcccagtcctggctccaccactcctccagccagagggtctggaccatccagtgcctgtcctcgccacagggcctccagggagcattcgggtcaaatccatggacaccctgggctacaaaccaaggctgctgttcatcccacatcgtgtggggcagtgtccatcccctgcagctacttggtgacttaacaactccaggagccctgtcagctgccctcctccacctaaaccccttcgactcttctgctttgacaaagaaaatgacattggggagggggaggtgctccgcctcccagcttttctcaaaatagtcctatagatactggtaatctggaaatgaagaagtaattctgtctctgcacctacttttgcagaatgttcaaggaagtattctgtgttagtattaatgccaaaaagttgtttttaaaggttttgtactcagcacatcatacaaaccacattacttctgtcacttcagggcatcgggactggctggcgcccttgttatgtgctattttaatcagtgtaacattggtcaagttgttacccatgtatgctgtgtttatcatgtgtatatcgtccagaaagtattaaggctttaggtagatgcaactggcgaaccttggagagggaatgctgattgtcttgaccaaacccacagcctgtctcttctcttgtttagttacttacggcaataaatcatctatgagttag

SEQ ID NO: 403454 - DNA, 3218 bp, Homo sapiens
cttcctgacagcacacaaccttgattaggaggggctgggagggaggatcgatgagcccctgacccctgggttctgaggctgccagggtcgcttgcagctcggccgcgtggaggtgaccgggcggaactccgagggggcgcggggagagctgggcgggcccaccgctccagcggctgctgtcaggggccgcgaggctttccctgaagatgcagcgtagcatattttgcacatgagttcagaggaagaggaagtgtagccggcggacgcgcggcggcggcggcgggggcgcgtcggggctggagccggagcgcgccgggcgctgggcgcagcgagcgagagcgcggcggccgcgggctccggcgagggacagacgcaccgatcgccggagggacagacacacgaccacgcggcgccaccgcccacgcctccacccaccggcgcccaagtcctccccgcgccgcctcctctgtatggcacaaactttcctcccgggacggaacacgctgcctcagggagcccgcgaccgcgccttctcctccgccggtcccatacgctgctgaaatgggttgcggattgaacaagttagagaaacgtgatgaaaaacggcctgggaatatttattcaactttgaagaggcctcaggtggaaaccaagatagatgtgtcctatgaataccgcttcctggagttcacgactctgagtgctgcggagctccctgggtcctcagcagtgaggctggcctccctgcgtgacctgcccgcccagctcctggagctgtaccagcagggcttctcgctggcggccctgcaccccttcgtgcagcccacccatgagcgggagaagacgcccctggagcacatctttagagccatcctgatcaagaaaaccgacagatctcagaaaactgatcttcacaatgaaggctacatcttggaattagattgctgttcctccttagaccacccgacagaccagaaactcatcccagagttcattaagaagatccaggaggctgcaagccagggcctgaaattcgttggtgttatacctcagtaccattcctctgtgaactcggcaggcagcagtgctccggtgtctactgccaacagcaccgaggatgccagagatgcaaaaaacgcacgtggggatcacgcgtcactggagaatgagaaaccggggactggggatgtgtgcagtgctccggctgggagaaaccaaagcccagagcccagctcaggccccagaggggaggtgcccctcgccaagcagcccagctcaccctccggagagggagatggtggagaactttcaccacagggggtgagcaagacactggatggaccggagagcaaccccttggaggtgcatgaagagccactctcagggaaaatggagatcttcacccttttcaacaaaccgaagagccatcagaagtgccggcaatactaccctgtcaccattcctctccatgtctccaagaatggccagacagtgagcggtttggacgccaactggttagagcacatgagcgaccacttccggaaaggaggcatgctggtgaacgcagtcttctaccttggaatagtgaatgattccttacatggcttgacagatggagtattcatctttgaagctgtttccacagaagatagcaaaaccatacagggctatgatgctattgtggttgaacaatggacagtcctggaaggtgtcgaagtgcagacagactacgtgcccctgctgaactcgctggcggcctatggctggcagctcacctgtgtgctaccaactcccgtcgtcaagactaccagcgaggggagtgtatccaccaagcagattgtctttcttcagagaccgtgtctacctcagaaaatcaagaagaaggaatcgaagtttcagtggcgattctccagagaagaaatgcacaacaggcagatgaggaaatcaaaaggtaaactcagtgccagagacaaacaacaagcagaagaaaatgagaagaacttagaagaccagtcttccaaagctggagacatgggaaactgtgtttcgggacagcagcaggagggtggagtctccgaggagatgaagggccctgtccaagaggacaagggagaacagctgtcccctggtggcctgctgtgtggggtgggtgtggagggtgaggctgtgcagaatggtcctgccagccacagcagggccctggtggggatttgcactgggcactccaatcctggagaggatgccagggacggggatgctgaggaagtcagagagcttggtacggttgaagaaaactgagtcttgggcaatttgtgctctggtttccctggtgttgtgtgttacctaccctttggcttggcttgacctctccttgtgagctcacctgagccctcccagggccaggttcctgacagtgttggtttttgcacatccactggaaaggtgtcattaatgacccagtgttagaatgcaagaggtcaggttattctagccctcatggctgaaggcccagtcctggctccaccactcctccagccagagggtctggaccatccagtgcctgtcctcgccacagggcctccagggagcattcgggtcaaatccatggacaccctgggctacaaaccaaggctgctgttcatcccacatcgtgtggggcagtgtccatcccctgcagctacttggtgacttaacaactccaggagccctgtcagctgccctcctccacctaaaccccttcgactcttctgctttgacaaagaaaatgacattggggagggggaggtgctccgcctcccagcttttctcaaaatagtcctatagatactggtaatctggaaatgaagaagtaattctgtctctgcacctacttttgcagaatgttcaaggaagtattctgtgttagtattaatgccaaaaagttgtttttaaaggttttgtactcagcacatcatacaaaccacattacttctgtcacttcagggcatcgggactggctggcgcccttgttatgtgctattttaatcagtgtaacattggtcaagttgttacccatgtatgctgtgtttatcatgtgtatatcgtccagaaagtattaaggctttaggtagatgcaactggcgaaccttggagagggaatgctgattgtcttgaccaaacccacagcctgtctcttctcttgtttagttacttacggcaataaatcatctatgagttag

SEQ ID NO: 403455 - DNA, 2419 bp, Homo sapiens
cttcctgacagcacacaaccttgattaggaggggctgggagggaggatcgatgagcccctgacccctgggttctgaggctgccagggtcgcttgcagctcggccgcgtggaggtgaccgggcggaactccgagggggcgcggggagagctgggcgggcccaccgctccagcggctgctgtcaggggccgcgaggctttccctgaagatgcagcgtagcatattttgcacatgagttcagaggaagaggaagtgtagccggcggacgcgcggcggcggcggcgggggcgcgtcggggctggagccggagcgcgccgggcgctgggcgcagcgagcgagagcgcggcggccgcgggctccggcgagggacagacgcaccgatcgccggagggacagacacacgaccacgcggcgccaccgcccacgcctccacccaccggcgcccaagtcctccccgcgccgcctcctctgtatggcacaaactttcctcccgggacggaacacgctgcctcagggagcccgcgaccgcgccttctcctccgccggtcccatacgctgctgaaatgggttgcggattgaacaagttagagaaacgtgatgaaaaacggcctgggaatatttattcaactttgaagaggcctcaggtggaaaccaagatagatgtgtcctatgaataccgcttcctggagttcacgactctgagtgctgcggagctccctgggtcctcagcagtgaggctggcctccctgcgtgacctgcccgcccagctcctggagctgtaccagcagggcttctcgctggcggccctgcaccccttcgtgcagcccacccatgagcgggagaagacgcccctggagcacatctttagagccatcctgatcaagaaaaccgacagatctcagaaaactgatcttcacaatgaaggctacatcttggaattagattgctgttcctccttagaccacccgacagaccagaaactcatcccagagttcattaagaagatccaggaggctgcaagccagggcctgaaattcgttggtgttatacctcagtaccattcctctgtgaactcggcaggcagcagtgctccggtgtctactgccaacagcaccgaggatgccagagatgcaaaaaacgcacgtggggatcacgcgtcactggagaatgagaaaccggggactggggatgtgtgcagtgctccggctgggagaaaccaaagcccagagcccagctcaggccccagaggggaggtgcccctcgccaagcagcccagctcaccctccggagagggagatggtggagaactttcaccacagggggtgagcaagacactggatggaccggagagcaaccccttggaggtgcatgaagagccactctcagggaaaatggagatcttcacccttttcaacaaaccgaagagccatcagaagtgccggcaatactaccctgtcaccattcctctccatgtctccaagaatggccagacagtgagcggtttggacgccaactggttagagcacatgagcgaccacttccggaaaggaggcatgctggtgaacgcagtcttctaccttggaatagtgaatgattccttacatggcttgacagatggagtattcatctttgaagctgtttccacagaagatagcaaaaccatacagggctatgatgctattgtggttgaacaatggacagtcctggaaggtgtcgaagtgcagacagactacgtgcccctgctgaactcgctggcggcctatggctggcagctcacctgtgtgctaccaactcccgtcgtcaagactaccagcgaggggagtgtatccaccaagcagattgtctttcttcagagaccgtgtctacctcagaaaatcaagaagaaggaatcgaagtttcagtggcgattctccagagaagaaatgcacaacaggcagatgaggaaatcaaaagttacttacggcaataaatcatctatgagttagtgcaccgtgaaaaaaaacgtcgtttatcgtgtcactaggaacagtcctggcctcatgtccaaaggattccagcccacaccccccattcactataagtttctaactcctggcagcatgatgacgtggtggaggaagacaaagttcccatggaaagctgcagagccagctaggcttgctgtgctttctcgtcatttgtagaaagagatggcaagtggaactcagatgccaccagtttcttcacagctctgagcatcaatcgcctcaagtgtgaaatggggtgaaatggcacccacctctttggatttttgtgaggattaataagatgtgaataaagtgcttggtccatggtaagtactctgtgggtagcagttaatcacatgctgataggtaatcaatgtggcagatactgttagtgcccacccaatatccatggaag

SEQ ID NO: 403456 - DNA, 399 bp, Homo sapiens
aatgtttagaactcagatttcctctgatcttgtttctctgatctgattccacatgctttctttcctttgagaaatcctcaaaatctgtgatctgcttagcactcttccttgctttcactgaaaatttgaatttattcttttaagtatttcattttactggatttaggatggaaaggggttcagttatgtgcataaagtctatcatctcaacccagtcttagtttttattattttacatatatgtatctgtagtttcatataatatcatccctatgtatgattgactcaaaatgttattaaagatctgaacattatttctagttttctttactgtaaagaaacgcatttccagctgaagtatacttaaaactatagaatatgttaagtttattttgcaag

SEQ ID NO: 403457 - DNA, 324 bp, Homo sapiens
aagggaatttgctgggagtcaggaagaataatttccagttctggagaattcttggtcttcctctctggcttccatatgaagtacctccctcctgtttcctgggtgcatcatcacaacccatcagcttcagggttcatccagagcagcctcagcggattcatgtccccatgttgctgagactgcttaactgtgggtctcactccttacatgctaacttcacctcggaaggcgcagggagcttcgctgtggctctgcacactcagtaggatgtgcttctcgccaacagaatcaaccaaaggacacgttccccttctgtcactagag

SEQ ID NO: 403458 - DNA, 490 bp, Homo sapiens
tagtctatggtggtaatcagtgttaacagtttagtttgtgttcttacccttccaggggttttttttctctatgtatacagatatatgcatttttaaaaacatagttaacacttaaaaacaatatgggatcgtattaggaatacaatctgtattccttcccaacagtatatacagtttttttccatttcactatgtatctatttataaattttttatttctaataatttctcttgaataggtgagacatcatatagtataaaattcagtagaaaatcagtttttcagaggtacaaaattggctgactttgcacagactcctttcatttcacaggtagggatgcacagccacctcttccaccgacgagaggaaaggatatgtgtgcctgtgggctcttcaactctgttgattagttatgatttattttctggtcagtttgagaggaaacagtgataaaatactgggcaactcagtgagacgccatctctaca

SEQ ID NO: 403459 - DNA, 447 bp, Homo sapiens
taggatcttgcaggtatgatgaaggtaaggattttaagatgagatcatcataaatttagagtgggtcctacacctgatgactcgtgtgcttctaagggaagcaaaagggagttataacacagggacacctggaaggccatgtgaaggcaaaggctaacattggatttatgttgccacaagccaaggaatgacaggggtgctggcaactgcaagaactgagaagacaggcatggaacgaattcttcctcagaacctccagaaggaactcaccctgctgacactttgatttcagactctggcctccagaactgtgaaagaacaagtgtctcttgttttaagccacccagtttgtggtaatttgtcacaacaatccaaggaaactaatagaaaccccacacattgggtatgagcatagaagtaaattggaaatgacttacattgccttga

SEQ ID NO: 403460 - DNA, 443 bp, Homo sapiens
aggtttggggtcaccagagccattctggcagcatccagagagcagggccttggttgtagggtcagtgcctggcgtctgagatgggacaggtgcacatgtacctaccccaccaccccagagaggcagagtgatgtgaggattaagggctgactctgggaccagctgcctgggccaaatcctgataaccaagtgtatgacgttggccaggatacttattcagaaaccgctgtccacatgtgagatgtgataacgttatcatgcttgtaattccagtgctttgggaggctgaggcgggaggatctcttgaggccaggagttcaagaccagcccatagcaacatagcaagaccccacccctataaaaggggaggcgaaggcaggtagattgtttgagcccaggggttcgagaccagcatgagcaagcgggtgaaaccccatctctac

SEQ ID NO: 403461 - DNA, 132 bp, Homo sapiens
gatgtttttctcaaaaagataccagaagagagggagtggtcttacattaagttcttaaagtgttctgtattagggatcctcttttgattattttgattaacaaagaattctttggagaaaacatatgagctt

SEQ ID NO: 403462 - DNA, 313 bp, Homo sapiens
atgactcatctataaatcctcccaatatttcccccgtgttgcccctaaattcggcagtggctttaggagtgccacagcactggaggtggggttaggggtttgcttcttcacatcatcttgaccacatgtgagtgtgggatattctggtttcctgctgcctcggggtccttgctgttccccactgtgccttctcctgccagccttgcccatatggctctgccatgcggggacagtgctacttctgtgccaatctttattgcctgagtcccccagcacccagactgctgaaattaaaagatgagcaccgacaatt

SEQ ID NO: 403463 - DNA, 422 bp, Homo sapiens
gtgccagactctttaacaaccggatcttgcacaaactaatgaagtgaagacttactcattacttggggaggacactaagtcattcacgagggatccactcccctgacccaaacatctcccaccagatcccacctccaacactggggtcacatttcaacgtgagattcagagggaacaaatattcaaactctatcagctcctgtgtcccaataatttctagttatttacagtagagaatattaactttgctccatgaaatcttggagcactagagggactactgaagggccagccatggtaagagaaggacaacaagaccagggattccagactcccatctgggctgcaactcaaaaatttctacttttatttgttgtatacaatcagattccttataaaactttgtctgaagctgaaatcca

SEQ ID NO: 403464 - DNA, 468 bp, Homo sapiens
ttttttttgagacagcaggctggagttcagtggcacaacctcggctcaccgcagcctctgcctttcaggagaatcacttgagcctgggaggcagatgttacactgaactgagatcacgccactgcactctctagcctgatcaacagagcgagactccatcacacacacacaaaaaaaattaaaaaagagttgggtgcacctggatctaacccctgtctcatccttctgccttgaaggccaaatgcaccctgatacttttcaccaaagagtagaaacaccaccatccacttgaccccaaatgtgactttccacaggatgcaagcacagtgttggaatagccaaagacagtaacaatagaagtgcagggtgagggtgatgaacaggacacactggagagcctgacattggcctagactacgggggtgtcttgatccttcacaaagagcccaaggagcaacccaaagagac

SEQ ID NO: 403465 - DNA, 339 bp, Homo sapiens
agaggtcaaagagacgtatcaaccaaaaaggtgtggtcttcattgaatcctggattcaaaaatgaaagaaaaaaaaaagctcactattttgtaaaaaagcacactttggaaacaagcaaggaaagttcaatatgaattatatcctagataacattacagaatcacagctaactttcggaggtatgataatggtatgagattatgcagaaagtgcagcagatgaatactgaagcatcatgatacttttaacattgaaatgacttatctaaaaaaaagagagctaaagcaaatgtagaaaaatgttaagaacagtggatctaggtgaagggtatatgggtg

SEQ ID NO: 403466 - DNA, 350 bp, Homo sapiens
gagacagagtctcgctctgtcgcccaggctggagtgcagtggtacgatctcagctcaccgcaagctctgtccttcgagttcaagtgattctcctgcctcagcctcctgagtagctgggactacaggcgcatgccaccacgcccagctaatttttgtatttttaatagagacggggtttcaccatgttggccaggatggtctcgaactcctgaccttgtgatccacctgccttggcctcccaaagtgctgggattacaggcgtgagctaccacacctggcctgtagaacattttcatcactccagaaagaaaccctggacctgttagcagtcactcccttctacccttctc

SEQ ID NO: 403467 - DNA, 879 bp, Homo sapiens
ccacgcccaggagcgtgggaaccctgcttaagggctttactagggaaaacggtgctggttcactggggcgcgtttccgggaaggtgaataccggtgaaagttatgctgagggtgaggtaggctctgacgacgcacttgcaggttgaatactggcacatcatttacttgttactcccgtgtgtaaactcaaaaactgacactcgattcagctattggaaagtttttttaatgtggttggaacaactgagccatgtgaaaacacaacaagaaggtaccatcctggaagcagagagcaaacccttatcagataccacacctgctgactcctttatgtgcagcctccaaaaaaaaaaaaaaaaaaaaaaaaaaaaaattttgtggggggccctgggcccctcggaaaggttttttaaacccctcctggggtggggggcggggcccccaggggtaacgggagaccactgggccaaacgggggctcccaagggaaaacggggggccgggaaagggggggggggtcttccccacaaaataaaaaaacgccccgggggggaccccgcgggctttctgaaacaacaaccccaggtggggcgctcggggaggggccccacgggggacctcaatcaacgaggggaggccaggcggagccggaattaaaaattactgggcgcgctggggttgcactgacggagcagcagacgaagtgccagcacgagcaggatctagccgtgctacgacagggactagccgacgagctgatcatagccccacgctgacacctacgccccgacctactcacgcgaccgccatctcccgctatctacgcaggctactacgcactacgcccgcccccgaggacacagcgtgctaacacgccgct

SEQ ID NO: 403468 - DNA, 319 bp, Homo sapiens
cgacactccgtatttttccaaaacgtatttgtaatattctttcaacctgtttgcataatgggacatctcttaaatgcagcaagctttaatgcatttttgccaaataaactcaaaaactgacactcgattcagctattggaaagtttttttaatgtggttggaacaactgagccatgtgaaaacacaacaagaaggtaccatcctggaagcagagagcaaacccttatcagataccacacctgctgactcctttatgtgcagcctccagaactttaagaaataaatttttattatttataaaaataccaagtctgtattt

SEQ ID NO: 403469 - DNA, 335 bp, Homo sapiens
tattttgcatacatattgctgtagtctaaatgtgtaacccaaatttcatatgttgaaacttaattgccggtatgataacattaagaggtggggccatttgggcatgatttagtcatgaggtggaatcctcatgaatgtgattagagaccttataaaagagattgaagggatcatcttagtcccttttctccttcaaccttaagccatgtgaaaacacaacaagaaggtaccatcctggaagcagagagcaaacccttatcagataccacacctgctgactcctttatgtgcagcctccagaactttaagaaataaatttttattatttataaaaa

SEQ ID NO: 403470 - DNA, 532 bp, Homo sapiens
cacgaggacttcccctgggtcaaatctccctccagcagaatcagactttagtgagggctgtgttctcatggcagcacgtggctaaaatgatcatggagacattgctttggaacacatcacactagaaaccgatgtacagtctctcattaacacagtgtaacacagcctagtttacctctgatattagaagttacctctttttccttaactgtagctcagcaagtgaaatagttggcctgtgttacaggatcatgtttgcatgtaaattaagtcccccaggtggctggactctcatggactcaggcaactccgtaagatagtggcatggggaatctgagtgtgattgagagagccccaggtttacacattgtgtgtctcactcactgagggagatggtgggcagaatcccttgcactattttaaggtgttcttcgatttttggttgagtgtgaatagttgtactttgtaccatatacctctcattttgtgaggtacagttgtgacttaaatgcatttttgtgtggatgtcaca

SEQ ID NO: 403471 - DNA, 430 bp, Homo sapiens
agccaaattgtatgtgggtcaggaaactcacaagaagcagggagagcagatacagagcccacttttgtccattgaggagagaagccttactttgggatatcacaggtttagctcatatacatctcttcctccatcgctgagaagccacactgggccaagctatgttctcactcagctaccttggcactaaggaagtggtctttactgggcttcaattcctcctcaatctcaggtttagttgtattcctgtctctctgaaaaaggaaagaaagaaagaaagaaagaaagaaggaaagaaagaaagaaagaaagaaagaaagaaagaaagaaagaaagaaagagagagagaaagaaagagagaaggaaggaaggaaaggaggaaagagaaagaaagaaagagggaaaggaaggaaaggaaggaaagaaagga

SEQ ID NO: 403472 - DNA, 384 bp, Homo sapiens
aagaattagtaaaaataatatcagattttcagttatttcacaagtataaaaattgttagagttctagtcaggatctaaataaggatcacatattacaatttattgacaagtcttttgtcttgttattattttattttctttttttttttttagatggagtctcactctgtcgcccaggcatggtggtatgcacctgtaattccagcttctcaggagtctgaggcaggagaatcgctttatacccaggaggcgcaggttgcagtgagcagagaccatgtcactgcactccagcttgggaaacagagacagagcaagactctatctcaaaacaaacagcaaacaaacaaacaaaaaagggccccatctctgctctctgccctcaaa

SEQ ID NO: 403473 - DNA, 581 bp, Homo sapiens
tgtgtagtattgtgtgttagtcaggctcagtcttcctatccatgaatatgggatgcctttctacttatttgtatgttctttactttctagaatctttatgttgacagctgattagttagatttaacaagactgatataaatttgtgatttctatttttttcttttcttttttgttttttgagatggagtctcactctgtcaccatactggggtgcagtgatgtgatctctgctcacttctacctctgcctcctgggtgcaagtgatttttctgccttatcctcctgagtagctgggactacagtcatgtgccaccatgcctagataatttttgtatttttagtagagatgtggttttaccatgttggccgggatggtctcaatcttttgatgtcgtgatctgcccgcctcagcctcccaaaaagtgctgggattataggcatgagccaccatgcccagccaaatttgtgatatcttgtaccaatattttttggtacaataggcatcaaacaaaaaaaatttatgtaagctagttaaccaaaaaatcacgcttttcctcatggacattttttaatgaatttg

SEQ ID NO: 403474 - DNA, 236 bp, Homo sapiens
gccaacaactaagggaacatataactgtgagacatcatttactaaatgtaaccaagggcggaggacaccttcctgaagtgacatttacactaaaacttgaaaggcaagtaggagctacccatgaaaaggtagaaaagaagattctaagaaaagcacatgcaaaggcacaaaatcaagagaaagcacgagtgtaaaaggcatatcaacagagttcagcatgatggagaaggaagcat

SEQ ID NO: 403475 - DNA, 965 bp, Homo sapiens
tacacctttgctctcacaaaaggtctaaatatattagaattcccctctgtggtcatatttaattcaagacacctcacatacaatttgagaatgcttaggccggggcatggtggctcacgccctgtaatcccagcacttcgggaggccaaggcaggagaatcgcttgagttcgagaccagcctggtcaacacggcaagaccccatctctacaaaaaatacaaaaactagctaggtgaggtggtgggcacctgtaatcccagctactcaggaggctgaggcaagaggatcattcgaacccgcaaggcggaggttgcagtgagccgagatcgtaccactgcactccaacttgggcgacagagcgagactccatctcaaaaaaggagagacagtattctgaaggctacagaggaggagattgctggaagtctgctgggctttatagaagcctagtaggcaacagatgattccagccaacggtcagagccacctgggtaatagagaatgcacaccccattcccactcgcttgattgacaggatgaatgacgctgtgggaacccagctttattgacaggatgaatgaggctgtgagaatccagcctcattcactcagcatgtagccattcactcagcatgtagccacacaacagccatgccaacatagccctttgaagttcattcactaatcaataactttattttacttaaaaagagatttaaaaatataacttatgtctgtgagtattgaaaaattttggagaggatgaggcaatatattcttatgaaaaaagatttttttgggttcaaaatatagttattcctttaaaaagatgctttgtgctggaggtggtggctcatgcttgtaatcccagtactttgggatcacccaggctgatcacttgaggttaggagttcgagaccagcctggtcaacatggtgaaaccccatctctactaaaaatacaaaa

SEQ ID NO: 403476 - DNA, 1421 bp, Homo sapiens
gctcagttagggctcttgccactccccatactggcccccatggcttgtctaaataggaccttgtttcaacttttctacttactgtgaccagccaacaggtgacatatttgtacagcacaaacttgccccagatcagcatgtacatgcagcggaaccagaaggggtggttcttgagggaagaaagcacagtgcattagggatatcacatgactaggcagtttctctcagcactcttccttttcacacttgtggctggctacttcatacctgcctgagtcctgctgccagatgccctcaatagtctggcctgattgccttcacaataggcagagaggaataagcagagggcctggagaatattcattcgcctttcccttggagagcctcaagggcagcactgtatttaacttctctactgtttgccttcgttggcaaagtgtttggaatgagcatttggaatgttaagtacagaggggcccatattggattttaatttaaggagagaaacctgcccagaattactgaactgttttcaagcctttcagctgggcaggagcaaaagccagcacttccccccttcccttggtttctgaattccctagaagtgcccaaatgtatcagtcaagagaagaaaataggatggagaatcagaagctgctgtgctctgaggggtcacgtggatgtgataaggcaagctaggagcggctcctagagaaggcaacgggtgctaaatgtgcacctggcacagccctgtgcccgcgaaggttgttcagtgctggctgatgaacatgtcccagcacggctggcattgacaactcacagatctagagcaaaaccaacatgcacttgtagatgatatttcctacttctctgctatctgtagggatccttgcctgtccattttctagctctggtgcagtcatgctgctgctgctttagtagacactcacgtcatagtcttcagtgaggagatagtcttctgtgatgtgggggctgagcagtgtgtagcccactaggtagaaaaggcccagactcaggcgcttgagagcaggaatgatgctggaaaggaacgagtgaagttcctggtcacagagagcagagactattcccttcaccctctgaccttcagttatggagaggagtgtttaggggtgtggttgtctacctggaatgggatgagaagctctgctgcccaaagtgtttcctgtttcagggaaagatttctatggctggctatgaggaatggggactgcaaacctcttaagagttgtaggaaagtcagggcagcagacagtggaccagtcttgtgtttacccctcagggatgctactgatctcaaggtcttgccaggtctcacaatctccattgggactgaaaacccagtggaggtaagataataaaaataaccactttgaatctgc

SEQ ID NO: 403477 - DNA, 503 bp, Homo sapiens
tcagcagcagtgactgaggctgatgctgagatcagtggtgaaccagacactctactcaagctgcccacactctagtggtggggacaaacaagtaaagctgttgataaacagggcagtggaggacataagtccattggcagagtggaaaggaacgagtgaagttcctggtcacagagagcagagactattcccttcaccctctgaccttcagttatggagaggagtgtttaggggtgtggttgtctacctggaatgggatgagaagctctgctgcccaaagtgtttcctgtttcagggaaagatttctatggctggctatgaggaatggggactgcaaacctcttaagagttgtaggaaagtcagggcagcagacagtggaccagtcttgtgtttacccctcagggatgctactgatctcaaggtcttgccaggtctcacaatctccattgggactgaaaacccagtggaggtaagataataaaaataaccactttgaatctgc

SEQ ID NO: 403478 - DNA, 257 bp, Homo sapiens
atgagaggctccttcacagtggatgctgtgggggacatttacatggtataaaaacatcctcacattctgtgcatagtccacacacctctcccccagccctccatgtcaccaaatatgcagtttactctttcccaagttgctgactaatctgatgaatctgtcaatgactaaccatggattagagggtcattgctcagactatcttccctttcatgcaaataaaccagacctaatgcccgaagcccactggaaagatt

SEQ ID NO: 403479 - DNA, 392 bp, Homo sapiens
tggagaaagccatgccagacagtgagaaacatctgaagccacagggccgtgaggcctccgtggggaggtgcctttcttggctcagcggtgaccactggaatgcagcgactgaccctttgcccctgggtgacttctgaagcctcaagaaggtgaatgagggattttgaccccgtttcctcctaactcagtgccatgtgcgctgctttgcttttctctgcctgggaaccttccccactctgtctgtcaggtcacatgctcgtgccgcaaggctcatgtgccatgtcctctgaaggacggcatctctgacccattctgcctgacaggcagctgaccatctgtgcccacactgtacctggtacttagtcctaaaatagaatttatgaagtggaatg

SEQ ID NO: 403480 - DNA, 442 bp, Homo sapiens
aatggtttaatgctatttaaggtgttactactgagtgccaactttgtgccttgcaatgtgctatgagaaatacaaaagaaaagtaagaatgggctgtgacccaaagttccaccttcacagaagatatgggactttgcaagtagaatggacaagagaaaccactatgttggcagacaccacatgggcaaaggctctgagatgagaatgtgggtgacttgcttgtattagtgatgacataaacaagagagggcaaagagtcacactggggaacagtggggctcagactagggacggtctcaaaaagcagaatatggagactgaacccctgtctgcagaaatttgtggcaccaacatccatgtgagaaacaagacaaactgctcattcatgtgtgcaatgttgtgtaaacctttttgattcaagggaggaaaaagtgccctgacc

SEQ ID NO: 403481 - DNA, 293 bp, Homo sapiens
aaatcaaatactatattgtctgtgtagaagcagaggagctataaccataatggtcatagaagactatctccaaagtgggtcttggagccagccttcaagatgaggtgaagacttggatgagcaagtccaacaggaaacaaattccagacaaagaaacggcatgagcaaagcacaagtgtggagccaagaagaaaaactgacagctgcaagggtcaaaaactcaaaacacctacagcagccaggcaggaatacaatggagaaaagagggtcctgaaaaacaacagctacagtct

SEQ ID NO: 403482 - DNA, 606 bp, Homo sapiens
tgtgagattgcttaaggtgatagtataaagtgataaggaaagtgtatcaaagacagaaccctaagaaaccatcattttaaaggtaagatagagtaggagaggcttccactagggaaaggtggccagagaagagaaaatccagcatagtgcaatatcagcagtcaaggaaagagtattttaaggagtttggagcattgaactgtatgaaagcatagataatttagtaagatgagggttttatatttacatgatgtcctttctaaattttttttagatagaacaattgctttattttttagtgtcttaaaatatgcttttctccagcaattttctgtattatatgttggaggagcctgctatgtaatttgaataataaagtggctatgaaagtgctttgaaaagttacagcattagagaaacatactgttattacacctcttctgtgagtatgctccataaagcacacatgttgaacgtttcacaatagaaatgtgaaataaacattgaagaatatagggagttaagtaaggctctggagaccagtgaaaatgagggatttcttttctaacattaaagcaattagtaaagattgtgttagtattgtgg

SEQ ID NO: 403483 - DNA, 400 bp, Homo sapiens
taactacttacacttatataagttataaatatatatctataattccatcactcaaataaagtacattggagtaattacatcacttaaataaaagtaaagattgctaacaccaatagtaagtgtttattgatagcttattatggcccaggctgtgacctagtgtttttaattaattaattaatacttgttaattaagttaattaacctcattcaatcctctgaattgtgttggatactcacagtagtatttactccgcaaatcaggaaactgtcgctgaggccatagtttgaggccgaggacccaagctgggctgatccagagcctcattcttggccacgtgctcttttgttctgcctcaggcaatgaagcagacaatagattcacagagggatcatggac

SEQ ID NO: 403484 - DNA, 475 bp, Homo sapiens
gcagctgactgaatccctggacgtatatccctggtacttagcaggaccagcactcctgtactctgaatttacttctggaagaataattcccacttgtgctgagagaacccactacagttaccactcggatcacacaaagagttctcaatcctggatgcacatcagaatcatctgctgagctttttagaaataccaattgcctgggccccaccgcaatgcaactgaatcagtatttatagagggaagagggatctaggcatttgtatttaaatattctccagataatttaatgtgcccttaagtaataacaaataaaaacagcaaaggaagcagaaaataattgtagtattctctgaaagatctattaagataccatttcaaagatctatggagatactaagggagaggaacaatactaaaaagttattagtggggaataaaaaaacaaagctatgtttttctgtttttttgtttt

SEQ ID NO: 403485 - DNA, 441 bp, Homo sapiens
agccctgagtgcaaggccaaggtgcccccacagcttcctagttgctgctgagttccccaccccccagatgggaggtatgcacctcccattctgggtctcaatagatcacctgggccccggtcctctgaaagcctattgaatacaagtaagtaacacaaggctgttttgttcattacccctataattcaagaaatccaatttgcgagacagaattgacttgaggccaaaaactccagggtcattctgccccaacttgaatcctggcaccacttactgctatgtgatctcagatgccataactaatctctctaattctatttccctgcatttaaaatgcaggcaatgcccatggtttgccctaatgactcaatgactctgtattaaagggcttactattggcctgtcatgtctcaataaatgtgttactgttctttctctgtg

SEQ ID NO: 403486 - DNA, 485 bp, Homo sapiens
tttccagaccccttttataattcttatggataaaatcctatcaaaatgtggttgaaaatctttcatggtttggatgaaggtatctattgaacctattaattatctgcccctaaaaaccagtatttccttgagcatgacacttcacttttccaggtctcagtctcctcactggtcaatggggaggttggatcaagatgacttttcaagtctcctacaagcacattgctgcttaatgtgcccatacttggtttttctaaatgactaatgatgttacaaaaacctccctgtctttttcctaattatcttttctatattttacgctttcgattacagattaagtgagattattcacatatacagggctatttcattctgatatattttctttttcatatttgagtagcttagctggctgtatttgggtaattttgggctgtctataccttgaaacacaagcaagattcttaatacgaaaagttaaatgc

SEQ ID NO: 403487 - DNA, 186 bp, Homo sapiens
acagtatatagcaattgcaaagttaacatttacttcctcagtacactgaagtggcatagtaccactcaattgtgtcactttttaatactcaacacgttgatactatttcagtatcttaagagcctggtttcatgaagacactacttgcctccacgtattctgcagaaaaaagtctaaatttacaag

SEQ ID NO: 403488 - DNA, 460 bp, Homo sapiens
cctcacccatgtgtattaacaaatatccatggaacacacaactcatttattttggggcagagacttaacttttcaatatattataattatgccctatatttcaaaagttcttctgaggacaaaggcatacaagtgtgcatttactgtaaaccggccaaaactagtttatggtgagtgatcttttatcaggagaaaattaccgaaattggtcccttgtctacttcaatctgtagttatggctggtggaacagtgtctgaggtcagtcagtcagcttatcttgaggctagtgcttgcttggctgctagagaaacacagaaaccttgtggcagttgtaaacatagtctgcttttttaaagtgtaggaatgtgagacttaacgcttgcctggcatgtttttaagtcctgttcataatttggtattttattgttataaagagtctgttttacagtttttattgta

SEQ ID NO: 403489 - DNA, 424 bp, Homo sapiens
gtgagccaccgcacccagccccaaaggcctatctcttaatactactgcattggcaattaagtttcaacatatgtccaggaagaataaggcaggggaaaaaaaaagtttcaacatatgaactttgggggacacatttggaccacagcaatagggggaaaatggagaaatatgtttttaagttatagcttaagataatctaatgggccatgatgtagtaaccaggaccagaattgccctccataaaaacaaacagaaacctagacaaaatatgtgaaacaactttttcagaccttggacaataggcagcacaggcctgttgtccctaagagaaaaaacaagatgaatattgaccacagtgcagggagaggaacagcaaacaagaaccacaaaaatcttgcttttagatgtagtcttgtggaaaaaa

SEQ ID NO: 403490 - DNA, 707 bp, Homo sapiens
ccgccctaaagcactgaaggacatcctgttctttgaaaggggggcagggggctctggaatggagcccggctgctttggccagtttcttcatatttcagggtgttaccttcagaataacattctgaagttattcttgagaactacaagcaaggaaggggagaaaaataaggttgttcctttaatgtatacatcccacggtaccttacttctacaaaaccaaaagacagctcaggaagccttatcaaatttgctgtctccacatctcctgttggaactttcaagtgccaattaacagtatcaagttaattaagaagagaatggatgggggaaaatagttgagattcaaaggacttctcctcatgaaggtggaaattttaaaatcgtcattaagaaaaaaggtgaataaagcaagcattcacaggctgggtatggtgactcacacctgcaatcccagcactttgggaggccgaggcgggtggatcccttgaggtcaggaggtcgagaccagcttggcctacacagtgaaaccctgtctctactaaaaatacaaaacaattagctgggtgtggtggcgcacacctgtaatcccagctactctggaggctgaggcaggagaatggcttgaacctggaatggggagcttgcagtgagccaagatcgtgccactgcactcctccagtctgggcgacagagcgagactccgtctc

SEQ ID NO: 403491 - DNA, 410 bp, Homo sapiens
tagatggagtagtgctcagtcacccaggatggagtgcagcagcacgatctcggctctctaagtgtttgctgactcctaccatgatcaggtcccaggtgcctgcaatgcagtgggaaatgacacagacaaggccactgcccacaaggtgttaacattccacctcaggaccgggcagcaaccgggaaaataaaagggcacatttcaggttgttacaaatgatctgaagaaaataaagcagagtgaggggacacagtgggtgtttcgtacccctgtcccattcgaggactcactcctggagcaatgggaactttcccaccatagccacccagccatcttctcctcagcaacctcaccatggccaaattaggagcagcttctgggagagccagggtctgaagccatgctggcct

SEQ ID NO: 403492 - DNA, 459 bp, Homo sapiens
tagatggagtagtgctcagtcacccaggatggagtgcagcagcacgatctcggctctctaagtgtttgctgactcctaccatgatcaggtcccaggtgcctgcaatgcagtgggaaatgacacagacaaggccactgcccacaaggtgttaacattccacctcaggaccgggcagcaaccgggaaaataaaagggcacatttcaggttgttacaaatgatctgaagaaaataaagcagagtgaggggacacagtggtggggctggcctgggggctgttttaggtggggtggtgttatgagttgcaatgtgtgcccccaaaagatgttgaagtccctaggccgggcgtggtggctcaaacctgtgaggccaaacactctgggaggccaaggcgggcagatcacttgaggtcagtagttcgagaccagcctggccaacatggtgcactctcgtctctacta

SEQ ID NO: 403493 - DNA, 337 bp, Homo sapiens
tatcttttcttattttaaaataaggaggttgaactatatcatttctatgctttctttcattgttagcaatccacgaataatggaacactgcacagaatagtaaacactgggttaagatccagtattggctcgaatccttataactgtgtgatctgaatacagtaatttcttctccctgggccttactttcttcatctgaaaaattacaggattggcctctatcttccttattgtctcttcagactctcatgttttgtagttttcctcagttatggtagaaatctcatccttctcttcttaacatttagtcctgtgctccagggaaagaggagggagt

SEQ ID NO: 403494 - DNA, 629 bp, Homo sapiens
agagtgtgatgtcagaaatgcaaatactgttggagaaatgtacccaaagaacttaaaattttatgagagagtgatgcatatgaaactaattatagtataaggtaggatgaactaaatgtgcaacagagacttaaacagttctgtgggactaggggaagaagtaattgactctgaaggataaggaaaatctaaaggagggaaaggcagatgaataggattccaatagacaaaaaaagggggcattttttggagaaggtggagtcttgaggtccttagacactggtttgagaaactgcacagcaaattatcctgggaaagagaaggggcactttgtatgagagggctagaatcttcctttgaatgttattcagttggcattagtgagtttttgaaagttaaaccacacagattcaaacaatttgaaaaagaaatgatcactctagtttttgtagcctcttttagaataaaaaaaatcttgctatttagcatttcatatttaggctttcacattgccagcagattaatttacctaaaatgcacatccaaccatgccagttttctgtttaaaagcattcaatgactttatagcacatgccagatgaagtattagttcctgagttgagaagagg

SEQ ID NO: 403495 - DNA, 509 bp, Homo sapiens
caatatcccttgtggatcaagaatggcctctggagttccggttcccttggcagttacagttttcactataaatcctttaattggatattggacaaaatcccccacatagagatctttattttatgtttgaatctgatatcacattgatgtctcacccatgaattgccaagagaaaaattcgctttcttaatcgcattttctacctcatctattatttgcattttgggttaatgcactttactgacgtcggagtctggttaataattttattgtagtattacttctcttcatgtttgagctcctttgcccgcatcaccccttaacaatttatacttctctcatgccactttttgtatgcatttttgtacttgcactttataataaagtaatttatgtgaagttttcctgtcatatgcctgcactgtaaattgcttgtgtcttctttattcttaaaaatggtgattgaaaaaatagtagacatttaataaatatttgttgggtttaataaa

SEQ ID NO: 403496 - DNA, 383 bp, Homo sapiens
cctaagggtagaaagggactctaaaggccaggccaaatacttctaaaaatgaaagtaaccacttgcaaatcagtaagccttgcttttgaaagaatgatacactgtgtttccttgggggcagataaggaagagtcataacctaagtgttgtcagttcaatattccataaacactaatgagaaccaagttctgtaaagagagaatggattatttgaaatttaatagatgaacaaaggaaggatcattgtctatagaccatgaggtcctggaagacagaaaccacttgtttgatactttgtagctctgtcagcacatggaaagaaactggttttcctgtaaaactaatacatgtgattattaaaggtaaaaacataacaaatcaaa

SEQ ID NO: 403497 - DNA, 430 bp, Homo sapiens
cccccccccccgccggggagtgaaacagctgctggagacttgatcctggcccagatgtagccagggaaggaaaagctaaggccaaaaatggacggggactgactgggctgcccagactcaaaggggccctgggagctgaaagcaggcaaggacagacctgtcacacaccagagcacaaatgcggctgggaacacacatctgtgtctgtcatcaaccgactttatcgaacgccttaaacaatctgcctgcctctgtcgcacgctccccagactcagatttttatgcggattgtaacccggctgcctgaggtgtgatcagccctctttcctggtagctctgcaaagggtcctgcacttacccctagggagcccctctgtgaagccccagaggcttcctcccagaatctcaagacaatgagaaacgcgaaaca

SEQ ID NO: 403498 - DNA, 450 bp, Homo sapiens
acagaaaggcccgggaggggctgcagctcccaagtgacagctctggatccgggcaaggataaagacacccccgggtggcatggaggagcagactaaaggtcaggcgtctgcccatgtccaaagccaaagtcgtggtacataaggcactgcccacccctcgcaccttatgtcctaggggcacggcacagtcacgcagatgactcagctgcgccttaggaaatccaagcatgactatgagaccacatcacagaggaaaggggtgccagggccgccagctgccagggcagaggtaaggacggggcagccctgcacctaaatctgccatctatgctcccacagccccactgtgcgcccaccctacgcagggcagcagggagaaggggacttccaggcccactaactggaaagacagtccgtggaacacagcacagtgggcactatgggtcagac

SEQ ID NO: 403499 - DNA, 338 bp, Homo sapiens
tggtcattatgaaaaatgaacttgaaaaaaatcttggcttttctccctttccattatgtatttctctctctctcttggtttttttaaattagcaatcccatgaactttttggtattttggcatatttttataaaattctttgaactaaaactaatctctgagggatgtttagaaaggcaagtgttactaaaagttgtgcatacattgaaatggttatagtcatagcaaataaaattgttatttctcaagtgagaaaagaaaaagattttcttgggttttaattaaagtacattttcgcagctcaccattatctgatttgaaggtttctttctctacag

SEQ ID NO: 403500 - DNA, 454 bp, Homo sapiens
tttcactatttcttctactgctatctactaagaacttcaaagaggaaccaggactacgggaggagcatgaatgtggacaaggagtgtgaccactgaagcacagcaccacagggaggggttcaagcctctggatgactactggcaagcctggacaatatccaatctcccacaagaaggtggtggagcagagtgttccctgactcctccaagtaaaggagactccctttcacggtctactaagtaacaggtgccttcccaggcactggcgttaccacttgaccaaggagccctcaagcggcccttatgcgggcgtgacagagggctggctcacctcttgccttctaggtcacttctcacaatgtcccttcagcacctgaccctgtatctgccggttattccttggttatattagtagtacaacaaagagtaatattaaaagctaatgactagtaat

SEQ ID NO: 403501 - DNA, 364 bp, Homo sapiens
gatatgatcatatggtttttcttcctagcctgttgatgtgttgaattgtattaattgagttttcaaatggttgaatcagccttgcatatccataataaattccaattggttatggtgtatagttttgtttacatattgtaaatttgatttagcaatactttgttgaggatttttgcatctatgttcataaaatatgttggcctgtatttttcctttcttgtaatgtcttcatctgattttgatagtaaagtaatactcaccttatagaataaggtaagaagtgcttcctttgctactattctttgggatgagactgtagagaattgatattacatcttcttcaaatgtttggaggaactcaaca

SEQ ID NO: 403502 - DNA, 160 bp, Homo sapiens
tagtgatgtcctaaaacatgcccagagaacaatgccagaagtgacagacagcacaaagatgaagaaggcatgagtctagccatcatagagcttatgtaacccaattctaaggatgagcaaatattaaaaggttaaaagggctgagaggcttgagagtaga

SEQ ID NO: 403503 - DNA, 336 bp, Homo sapiens
cagcccacacttctccagacaatttatattcttggatgggatctccagaaggacattgccacctcttctatattttgcaaacaattctagaatcttaatcaaagaaccactggctacacataggccacattgctgaggtgaggtttgttaaccccattttaccagaggaaaaagagaaaagtgagaatatgaaagatcaggtgcctggatgataaatcactgagcttgcattcaaaatcaagtgactttcacttcctgattcctcctcctatttttctctatagacaatatgtgaagtctaaaaataaaattttaattcagtagaagtttcagcaa

SEQ ID NO: 403504 - DNA, 409 bp, Homo sapiens
tcttgtattttactcaaacaagctccaaaaaacttcctcattcaggtagtcacaagccaccactttttagagatgaggaaactgttgctcagaaggtttaagtgactcagagatagtaagtggagaattggacacatgcttgcatgcacatacacatgcacacgcacgcgcatgtgcgcacacacacacaaacacacactccacccaatgtgaggatggatacaatcagaccttcaatcccagtcactcacatacctgaagacacctgtctttctgtctctgtatccatctgccctgcaaatctataccctcctgtcagtatttggtggatggaaacctcagtttctctcgtcagctctcttctttgacaagagaatcgagccatcctggctctgtctttctgcagctt

SEQ ID NO: 403505 - DNA, 545 bp, Homo sapiens
accttctctccagtctccttaccattagggcctttcactacctggccttggtgtccctaggctgctcttcagctgtccacaaaccttgtttcataagcagtagcaatgcaagcttccactgccgtctgctaatgttcttccctcctagaatgttcatgatctgcgtttctacctgaaaggtctagttcaaaggtagctgaaaggttatcatccttgtcctttcttctctccctaccagtcatctatcctgaactttttaacagtagggacagtgttgcaattgtgtttgtgtccccagcacgtagcacacagtacctagtatacagtacctgtagcacataggcatttaataagtgtgtattgaattaacttggttatgcttgtatttttatcctagctttctcaaagaaacttaggtgctagctattttgaaacatatatccagaaccaccacctgagtaaaatgtataacaggaccctgctctttctatcccagagagtttgagaaaactacttttaaataaatcattaatcattctaaaatg

SEQ ID NO: 403506 - DNA, 286 bp, Homo sapiens
gttgtgcagtgggaagggtcgttaacctgcatgtgtgagagaggaaaggcattctcacctaacaggtttgtgatgtgttactattttctgtttcttcctctccaaactcagtgggccgagaaagtgtaaaacaactttcctcaatcatggctccacactggaatcactgagcaagctttaaataataccgatgctcaggttccacccctgggatttagatgtaattggtccaggagatggcctgaacatcggtatttttaatagctgcttgcgtgattctaaatag

SEQ ID NO: 403507 - DNA, 730 bp, Homo sapiens
tcagagaggtggagtgaaggaatgtggaagaaccatataggtaaatgtgtgctattgtaagtattatagttgtttttgttgttgagacagcgtctcttgctctgccgcccaggctggatgcagtggtgtgatctcggttcactgtaacctccgcctccagggttcaagcgattctcatgcctcagcctcccaagtagccatgattacaggcctgcactaccaggcttagctaatatttgtatttttagtagagatggggtttctccatgttggccaggccagtctccaactcctggcttcaagtgattcgccccccttggcctcccatgtgagccaccaaacccagctgtacctattatagttcttctgtcgagttttaagttcataagtgttaattagttaaccaaacaataattacagtatgtcatgaaccaagaattgtgaataatccaatgctgtgtatggtaaattaaaacttttttctctctaaaagtgacagtcctttaaatagtaaaatctggctaacatgacttgcttttatttttttagttccaggctaaaaatgctaatttctttatatcattttcatgtatcttggtatgactaaaacttgacttattttcttcccattcttttcttctccatttcatgtttcagctgatgacgctatactcctctgagccactaaggcatgagaatttggaatcatctctgaatccctcctcatttt

SEQ ID NO: 403508 - DNA, 174 bp, Homo sapiens
tgattatgtgcttctgtctggtttcagacagtttcttcagatcggagctgtaattcacccaaagtttgtttttcctttaacattaagttagagattgagagtaattctctggtataactttctaaaggtttttttacattctttgtaacttacctctctgtactgctactattg

SEQ ID NO: 403509 - DNA, 925 bp, Homo sapiens
cagagattctgcagttccctagagacctgctggcccctgtggttgtgaaagtcaaagcgggttgtggggtacgtttgcagggggtctggtgatgtggcaattcaaaggctgaggttccctggggagggcagtgggccacaatcggtgaacaaccaatatggcacctgctgtctcagttcaggcctaaggggtatgcaggcacttctgtgtgagttggtacctggttctctatccctggaagttcccagattgccaccaacagcatttcctggggtcatgagagcacagggactcctcaaaaatttggtggtcagcaaattgttacaggggtaagaggagcagagaagccctaccctttccgtagggctatgggtttctcaggggttgatctctgctgcactcctgctgctttccttttctgcactacagcttcattctctggactctctgacagatcctggttgtcttccttcattttttcattcagattttgaccattcacctataattttgatcttatttctgaggagaactggcatctgacatccctagttagccatcttgaaaaaaaaaaagcaacaaaaaactgatgctccctttgtgagaatccatgcttaaattctccttagaccactaagacaggaaaggcttacttctgagcaggtgggctattttctatcttgtagaatcacagtcatcctgaccacatgtaggtggttgtgcttctgttatttcccctcctgtagctaccaggaagctaagcctttcaatatattatttttccaaaattttattcttaaaaattttaaacatataaaagttgaaagaattttacagttaacatctacctgtcgtctatattccactccttacattttattatacctcctatatcatatatctttccatgtatctatatatctat

SEQ ID NO: 403510 - DNA, 298 bp, Homo sapiens
ggcttcagctcacttctgactcatgtcccttgataactgagttcttcttccccaagaaccttaattattttcatcactggttcttcaattgttccttggcctgatttcttctgttgtcttagacacttgatcacaaaacaggaagcctgagagctgggtgcaagctccacttccattgtcctctaagccagagctgagtgtggcccaaggacattgtgttgtaggaacattttcttggatgttaccttatttgtagcaatttagaatttcagaataaatcatccaaaatgctttcctc

SEQ ID NO: 403511 - DNA, 224 bp, Homo sapiens
ccagcactcttcctgtcaccgatgcttcctcagcatccaccggtcacgccacccctcttcctctcaccagcctttcctcagtatccacaggtgacaccacgcctcttcctgtcaccgacacttcctctgcatccacaggtcaggccacccctcttcctgtcaccagcctttcctcagtatccacaggtgacaccacgcctcttcctgtcaccatcccttcctca

SEQ ID NO: 403512 - DNA, 426 bp, Homo sapiens
gtggcaaaactgctggctagtgtacctgttctgccaaaagtaaaatgggcttactgaggaaattaaatttatgttcaagtgctatttctttatgcaccggggaacaagcatttctaacaacctggtcctacgtggctgaaactggatcccagaagccccgtccttcccgaagctcgtagcggaagtgacatcagcccgccgccactatcttttcccgcgctggctgcccacggtcagtgctgtttcacctttatcttggtggagtcgaccccggctgtggacttcaaataaccctgtacaaagaggaatggagattgcctctattcacctagattcataagttgccctgaggcaatcttggcatcaaggaagagagcattgaggcacaactgaccatcagcttcagagaatggcagtcactgattt

SEQ ID NO: 403513 - DNA, 219 bp, Homo sapiens
ataaatacaactataaatatattttcatttagtcagaggttaaatgtgtttccactttaaaaatactttgtttatatttgggaaattactactactgaaaatacagtaaaagagaaaggaaagtctttgagagtggtgaaaaaagcactgactggggctttatgtgacctagggtccaatctttactttgttagctaattagacaggcaggtcttagac

SEQ ID NO: 403514 - DNA, 644 bp, Homo sapiens
tatttgggaaggaaaaaataagtgcataaatgtatgcctttgaacttccaaaatgtcaaggtcatcacctttaacctttctgaataattaggcgccttaagttcttcttgattttcagctgccacccactctcacacatacatgctcacacatatagagagccacacacacatttatgaccacacaaaatcataccaggagctcaccataaatctaagaaaattcctaatttcaggatcaataaccttaatttccctgcaaacgtttgtgtaatgcaatagcagtcaacttctttttaaaaatactgattagattaaaatgccttctagctgctttcactacagctaggaaaggctgagaattctggcggggggtcttaaatagtggtcccctttgctttaatgaagaactacagttttaaaatcaagcctttgaaagaggaagttctgtgcagccttacaccttcattaaatttgaaagcaatttgccaccctgtgaaataaattattgcactttctacaataaggaacaaaaggaaatatagttataatgcttttaaaagcatcctttggtgaaagatgcaatggaaacaaagcctacttaacatccccctcccccccgcaaaaaaaaaaaaaaaaaaaaaa

SEQ ID NO: 403515 - DNA, 1279 bp, Homo sapiens
tatttgggaaggaaaaaataagtgcataaatgtatgcctttgaacttccaaaatgtcaaggtcatcacctttaacctttctgaataattaggcgccttaagttcttcttgattttcagctgccacccactctcacacatacatgctcacacatatagagagccacacacacatttatgaccacacaaaatcataccaggagctcaccataaatctaagaaaattcctaatttcaggatcaataaccttaatttccctgcaaacgtttgtgtaatgcaatagcagtcaacttctttttaaaaatactgattagattaaaatgccttctagctgctttcactacagctaggaaaggctgagaattctggcggggggtcttaaatagtggtcccctttgctttaatgaagaactacagttttaaaatcaagcctttgaaagaggaagttctgtgcagccttacaccttcattaaatttgaaagcaatttgccaccctgtgaaataaattattgcactttctacaataaggaacaaaaggaaatatagttataatgcttttaaaagcatcctttggtgaaagatgcaatggaaacaaagcctacaatcgaaaaatttcgttaagaaggggattcctttggtattctagacatcggttaaaatgtcagtgccctaatagtatgatcgttccatgagcttaaaactgttttttttctttctgtttccatctattttttaaaactgcatctaaacgtagcaagcttgtgtgcccaccacccaaggcaagccgaacccgagataccattttccgtttgcaggggcctggagatccacacgagggcgcgctcacgttccagaagccgcgtttgaccaagaggccgcggtaccttgtctgtccaacactggattctaataggcgacctcaaccccttagaaacaggcggcagctaaggtgtttgctagtttatttgttctaagcagccatgaggtgtgagaagttgtatagagacagaaaacggagcaactagattcacgaaacagcctaatctttgtctctttaaagacaaagctgttgcaaaagaataccttggtataaccagatggtgtggagcagagttttaaaagataaatgtatgcattttgaaagataccatagccactgctggttaattaaattagggaaaatcagttttcttggtttcagtgtggagagccttgtctagggttggacaccccctacttaacatccccctcccccccgcaaaaaaaaaaaaaaaaaaaaaa

SEQ ID NO: 403516 - DNA, 1915 bp, Homo sapiens
  misc_feature (292)..(292): n is a, c, g, or t
  misc_feature (1417)..(1417): n is a, c, g, or t
  misc_feature (1487)..(1487): n is a, c, g, or t
  misc_feature (1667)..(1667): n is a, c, g, or t
  misc_feature (1672)..(1672): n is a, c, g, or t
ctgccgagagtgtcttcagcgccagcatttcctggcctaattaagctgggtaatgagtagctaagaggaggggataaaagccctaggcggcttagagctgggacagtttatgacaggggcgtctgcagctggtgacattcctaggaaaattatttctcataaccctgggaagttgcatgctgtttccttagcagcagagtaagcctcaaaggacattctgattgtcataactgcgggaggcagacaacttgctacttcacctggagagtagaggctgacgatgctgctaaanatccgacagtgcacaggacagcctccaaaacaaagaaatatctggcgcaaatgtcagcagtgctgaggatgagaagccctgctggacaaatgggaagaagagctctgcccgctgattcctcctggcagaaaagttcccactgggctcctctctaccctgcccagtgggtctgcagctgttttgtttccaggagcctgagagagagacagaagcagctgggaggagaaaaatcaacgcggccaggggccctactggtccttctgccttagccacaggttctgaaaccaaagcaaaaccaccagagagtgattcatgtgggtatggccctccctccccctgcccagaaaggtttctcttgagcccatatgctagtttctgtcatgcaaacgccctggcaatgccttccttgccttggcgcaatggctctgattgggtaggcatctccgggggttaatactggcacaaactcatgtaaatcttcctgggcctaagtctggtgtactctcatatgtgaattggcatggtcctggagggctagtcagctagctcctagcctcgagatcggcctggaccaaaccaaaaaaaaaatcatctctggtgaaacaggatagccaccccaccccctgctcagcattccccagtgcctcccttcacagtggccagtttggattcttctcaccaaacgctcaagacctgtacaggttacttattggtccccttcatgccccagatgcaaatttggcatgtctcatttgcattctaaagtgtttggaggcaaggctgggatgagcttaatttgccctgatgtcttttgaccaggttagtaaacatccctccagcccatctcagcacttgagaatctggaaggcagctatgctttaattacagtgcaatttcaggagtttgcttgctgttcccccttggctctttgcctagcttattattttcatcttgttgtttgtttgtttaaatgagaactttcgtagacaattccctctcccgcctcccccagaggccagtctgtgttgctagaggactttttctgcctccctcttggtttacaaagccagggcatctctgttgacaaagggtctgcgatctggcactgggcctggcagttagggngtgtgtaagaaatgcagatgccttttgcagatgcctgccctgctcctcctctaagcagccaaaacatccngcaccacctcgggaagaccccacatcccagcttgctggtctctgagcactctgccccgccaaccctatagcgctaggaaggcaggaaggatggaaaaggctgtgggggattgagtaagggatttgggaatgagggacagtgacactgtaggtgggttggcttagcagggggattgggagnggccngctggagtggtggaaagaactggggacagggagtcaggaagctgagcttttattcatcccagctttgctactgacaagttaggtggtcttggggcagactgggccaaatctgggccttcctgtgtaaaacgcatgctcccatctcaaggtccttttctactttacagattctcttgcttttagaatgctaatttcattgactgtggcctgtttccttctccagagacaggataacccaataaa

SEQ ID NO: 403517 - DNA, 362 bp, Homo sapiens
aaattataaaatagagtgggtcaattcaaatgaagatatatatttaaaaatgaaataagaaaagaaaactaagtctcaaggaaattataaaattcttcaacaaattcttgtgggcatctcatgttatagaaagaatagtggaacatagagtcatatcctagagagaaaaaatttcccccacttaaaaaaaacacacacatttaacataaatcagttgaacttaattcattaggtgcagattctcttcaggacctctgaatttaaaaaatgagtacattcataacttgaatttacatcccattatattaaatcttcatgtccagtataaccaaaagcaagaatactaaaagttctttagcctt

SEQ ID NO: 403518 - DNA, 964 bp, Homo sapiens
agcgggtgtgggcggggcgcagttgggggagggtgcagagacctgagggcttgaggttgcctggctggccccgctcccagaggcgggtgccgcgctgtcgcccaggtatctggggtctctggtgtctgagtgtctcattgtcggcgcgaacacaattgctccagccacaggcgaggcctggccaaggtgtgggcgcatctggggcaggtcttgagaggtccagcgcccggtggtgcggacagaggcggggcaccgcggcgctcgccgccgcctccccgcaggtgatcatcctcctgcaggtgtcctcgggtctcaggtggctgcgtgtctgcgccatggttgacattctgggcgagcggcacctggtgacctgtaagggcgcgacggtggaggccgaggcggcgctgcagaacaaggtggtggcactgtacttcgcggcggcccggtgcgcgccgagccgcgacttcacgccgctgctctgcgacttctatacggcgctggtggccgaggcgcggcggcccgcgcccttcgaagtggtcttcgtgtcagccgacggcagctcccaggagatgctggacttcatgcgcgagctgcatggcgcctggctggcgctgcccttccacgacccctaccggcaacggagtctcgctctgttgcccaggctggagtgcagtggcgtgatcttagctcactgcaacctttgcctcctgggttcaagtgattctctagccttagcctcctgagcatctgggactacagccattgctgtgaattacgtgagggaaagatattgaagaggagttggacactccgagagtgcagctgttctccccccgcaccatccgtgtcctgcattctgcgagtctgtgctcattaacaatgtgctgtgaccatgtgactcagcaatcctgctgctgggtatatacccgaaagaaaggaaaaggaagccagtatattgaagagg

SEQ ID NO: 403519 - DNA, 310 bp, Homo sapiens
agcgggtgtgggcggggcgcagttgggggagggtgcagagacctgagggcttgaggttgcctggctggccccgctcccagaggcgggtgccgcgctgtcgcccagccattgctgtgaattacgtgagggaaagatattgaagaggagttggacactccgagagtgcagctgttctccccccgcaccatccgtgtcctgcattctgcgagtctgtgctcattaacaatgtgctgtgaccatgtgactcagcaatcctgctgctgggtatatacccgaaagaaaggaaaaggaagccagtatattgaagagg

SEQ ID NO: 403520 - DNA, 842 bp, Homo sapiens
agcgggtgtgggcggggcgcagttgggggagggtgcagagacctgagggcttgaggttgcctggctggccccgctcccagaggcgggtgccgcgctgtcgcccaggtatctggggtctctggtgtctgagtgtctcattgtcggcgcgaacacaattgctccagccacaggcgaggcctggccaaggtgtgggcgcatctggggcaggtcttgagaggtccagcgcccggtggtgcggacagaggcggggcaccgcggcgctcgccgccgcctccccgcaggtgatcatcctcctgcaggtgtcctcgggtctcaggtggctgcgtgtctgcgccatggttgacattctgggcgagcggcacctggtgacctgtaagggcgcgacggtggaggccgaggcggcgctgcagaacaaggtggtggcactgtacttcgcggcggcccggtgcgcgccgagccgcgacttcacgccgctgctctgcgacttctatacggcgctggtggccgaggcgcggcggcccgcgcccttcgaagtggtcttcgtgtcagccgacggcagctcccaggagatgctggacttcatgcgcgagctgcatggcgcctggctggcgctgcccttccacgacccctaccggcaccattgctgtgaattacgtgagggaaagatattgaagaggagttggacactccgagagtgcagctgttctccccccgcaccatccgtgtcctgcattctgcgagtctgtgctcattaacaatgtgctgtgaccatgtgactcagcaatcctgctgctgggtatatacccgaaagaaaggaaaaggaagccagtatattgaagagg

SEQ ID NO: 403521 - DNA, 1150 bp, Homo sapiens
agcgggtgtgggcggggcgcagttgggggagggtgcagagacctgagggcttgaggttgcctggctggccccgctcccagaggcgggtgccgcgctgtcgcccaggtatctggggtctctggtgtctgagtgtctcattgtcggcgcgaacacaattgctccagccacaggcgaggcctggccaaggtgtgggcgcatctggggcaggtcttgagaggtccagcgcccggtggtgcggacagaggcggggcaccgcggcgctcgccgccgcctccccgcaggtgatcatcctcctgcaggtgtcctcgggtctcaggtggctgcgtgtctgcgccatggttgacattctgggcgagcggcacctggtgacctgtaagggcgcgacggtggaggccgaggcggcgctgcagaacaaggtggtggcactgtacttcgcggcggcccggtgcgcgccgagccgcgacttcacgccgctgctctgcgacttctatacggcgctggtggccgaggcgcggcggcccgcgcccttcgaagtggtcttcgtgtcagccgacggcagctcccaggagatgctggacttcatgcgcgagctgcatggcgcctggctggcgctgcccttccacgacccctaccggcacagccggagccaactaatacatgcggccaccttctctccatgcctgcactttctgttccaagccatctggtggaagcaatccaattgcctgcagaatcatccgaaagcatcactgggaagaagctggtggaactaagaagcaattctttagcctgacagccagtctgtttttagtatttctaaacatgaaatcatctcagaagaagccaagggctgtcgaggtgatttgcctgaggtcctacaactcatcactgactgtgtttggaggaaggaagtaattaactataaatgtgattataagggtggggccttaatctgataggaccagtgtccttataagaacaggaagtgtgtgcgttcactgaggaaaagccatgcaagaacacaaagagaaggcggctgtctgcaagcctggaggagagctctgcctagaaactaatcctgccgggcatcttaatcttggaattccagcctccagaacagtgagaaataaatgtctgttgtttaaactac

SEQ ID NO: 403522 - DNA, 585 bp, Homo sapiens
gactcaaaaagaaaaagattagatctcttacttgactgcacgatccaatatggttgcactagcacgtttcaggtggacagtggctactgtatagtgcagatatggaacatttccatcatcacagagactgttattggacagtgctgccttagagacgtgggctgcaggacttccacaagaaggcctggatatcagacaccagcattcaaatttcttcccagtgctgtggaatgtggtagacccttggaagtccagtatctgaacatgctggtcaccaccgtatactagtgaccagaggatgcctttcttcagctgcttggcattctgccagcatgaattcctagcacgggaaagatggcaggtgatctgaattacttggggttatggtgtatttgagtgacctcactatatttgggaaggcgctggaaaaacacgaaaagaatgttagaaagggctggaataaaactacaggagtcccctctttatccacggttttgtttcccagttttaactactcatcatcaaccacgatttgaaaatattaaatgggaaaattacagaaataaacagttcatttattacata

SEQ ID NO: 403523 - DNA, 904 bp, Homo sapiens
gcttttccgtgctacctgcagaggggtccatacggcgttgttctggattcccgtcgtaacttaaagggaaattttcacaatgtccggagcccttgatgtcctgcaaatgaaggaggaggatgtccttaagttccttgcagcaggaacccacttaggtggcaccaatcttgacttccagatggaacagtacatctataaaaggaaaagtgatggcatctatatcataaatctcaagaggacctgggagaagcttctgctggcagctcgtgcaattgttgccattgaaaaccctgctgatgtcagtgttatatcctccaggaatactggccagagggctgtgctgaagtttgctgctgccactggagccactccaattgctggccgcttcactcctggaaccttcactaaccagatccaggcagccttccgggagccacggcttcttgtggttactgaccccaggctgaccaccagcctctcacggaggcatcttatgttaacctacctaccattgcgctgtgtaacacagattctcctctgcgctatgtggacattgccatcccatgcaacaacaagggagctcactcagtgggtttgatgtggtggatgctggctcgggaagttctgcgcatgcgtggcaccatttcccgtgaacacccatgggaggtcatgcctgatctgtacttctacagagatcctggagagattgaaaaagaagagcaggctgctgctgagaaggcgtgaccaggaggaatttcagggtgaatggactggtcccgctctgagttcactgctactcggctgaggttgcagactgtctgaggtgtccggtgcctctgtgctattagattcctactgagactggagcgctcagcctgccatagaagactggtctgcagctccc

SEQ ID NO: 403524 - DNA, 433 bp, Homo sapiens
gcatatcaggatccagaaaagtctcatggatctactcaatacataaaaccaccttttgagccaaaggactacagcctggaaggcaggagaggaagtgctaattgatctgtactccactagaggcagcagggtttgcacatgcaacaactgcagcagaacattacttcctagtgagccttgaccagtcctaaaaataagggtcatatgaaataatgaagtcttacagttaaaaaggacctgaaggctgtgtgcggtggctcacgcctgtaatcccagcactttgggagaccaaggcaggcagatcacctgaggtcaggagttctggccaacatggtggaacctcgtctctactaaaaatacaaaaattagccaggtgtagtggtgggtgcctgtagtcccagctactcaggaggctgaggcgggagaattgctt

SEQ ID NO: 403525 - DNA, 340 bp, Homo sapiens
tgagacagagtctcactctgtcgccaggctggagtgcagtagtgcgatcctggctcactgcaacctctgcttcccaggttcaagcaattctcctgtctcaacctcccgaatagctaggattataggcacccaccaccacacctggctaatttttggtatttttagtacagacaggttttcaccatcttggccaggctggtactgaactcctgacctcgtgatccaccctcctcggcctcccaaagtgctgggattacaggtgtgaaccaccgtgcccagcctgtagaatggaatcttaacaccaatctgcccaagcacatgtttatgttatctcaaaaga

SEQ ID NO: 403526 - DNA, 339 bp, Homo sapiens
ccctaagcagcaaagaacagcagggaccaggaaacaaagtgacccatagagcagctttgaaggaagacgaaagtcctttattaaccccccccgggtatctcagaagccctttgcaagtgaatggttgactttcgagggttgcattcacctttattattatttgcaactgctatgaagaataactggagggattatagcaaaacaaagagaaaatggacatttctccaagtcaaaatagaaatccacatattaagatggcatcaggtactgcgtggcatccttgatccaggtagggttttactggtgcaacatctttttggtgaaccctacctgcagaca

SEQ ID NO: 403527 - DNA, 226 bp, Homo sapiens
cattttcatcatagtgctagtcagttcttcgaagtgataacttacatgtttataagtcacattagataaaaataaacaaatctcactttggacaagtcaccacaagttatctgtgtttttttttttaatctgtaagatggtaatagtaaaataatacttgctctacctatttcacaggggtgttgtgaagatcagaaacaaataaaaatgagaaagcatgtgtgta

SEQ ID NO: 403528 - DNA, 377 bp, Homo sapiens
tgaatgaaagatgagtagcgtaaaatgaggtaggagaaggagatcatggcagatgggaggcaggatagatcgcagctccaactcggatggacagagcaatgggcagaggcctacatcgtgaattttagctccgagattgattgcaagaatgaaccagaaatccagagaggacccacagaccctctgaaggaaggggacttctcttgcagcacccaggagacacccaaatactgtgagtgtcccagctgcagaagtggggaaatgagatcctcctctcccaaacacacacccccactggggaaactgaaggtttgcttgttggagaagtttctgaccttaactggagctgagtcaatctagagagtccagtgaaatac

SEQ ID NO: 403529 - DNA, 457 bp, Homo sapiens
aatagaaatgagaccaaatttggggacctcatcttgccaaggaagaattgtagaggttaacctctcatgtggagagggccttgattaggatgcacctcagaggtgggcctgtgtgggtggttctgcttgtctgtggggcttgctcttgggtgcttcctgaggtgtggttgcacagggtggttattcctgaatgcaagggcttactatgattttctcttagtgcctctcatttctgatgctttctgtcctatgaggtcagtctacttactagttagtattctatattaataagtatgccaaatgacttaactcctccagaaatgttattcgttaaaagatgagatgtgctgagacaagaggatcgcttgagtccggaaggttgaggctgttgtgtgctataattgggcctgtgaatagccactctgttccagcctgggcaacatagtgacacccgtct

SEQ ID NO: 403530 - DNA, 433 bp, Homo sapiens
aatagaaatgagaccaaatttggggacctcatcttgccaaggaagaattgtagaggttaacctctcatgtggagagggccttgattaggatgcacctcagaggtgggcctgtgtgggtggttctgcttgtctgtggggcttgctcttgggtgcttcctgaggtgtggttgcacagggtggttattcctgaatgcaagggcttactatgattttctcttagtgcctctcatttctgatgctttctgtcctatgaggtcagtctacttactagttagtattctatattaataagtatgccaaatgacttaactcctccagaaatgttattcgttaaaagatgagatgtgctgagacaagaggatcgcttgagtccggaaggttgaggctgttgtgtgctataattgggcacaccttactggacgggtatcctcta

SEQ ID NO: 403531 - DNA, 492 bp, Homo sapiens
tcggctcaagccatcctcccatctcagcttcctaaagtgctgggattacaggtatgagccaccataccaggccacaaaggaatatttaaccatttgaattaagctttgtatcattgcatccttagaattataaaggtgttagaatttgcctgtgtttagcaaaccaggaaagagagtatggatttagaaaaaaagaatacaggaaaaaaccttaaaaaccattctattattcttaacactgtcatttttgatagaatcaatttcccataaacaaagtgattgaaatatttatttttgttgtgtaattgtgtgaggcctttgatgataagtggcatttcttgatcatgtttaaatcctccagaatctggggctttgactgtaaagtataagacagaagtagaaattaccttcacagttacctgacacgtatacacctttattcatgaaacattgggtctggacatgacattgcatcaggccgtgtggatttca

SEQ ID NO: 403532 - DNA, 719 bp, Homo sapiens
tttctgtagagccggcgttttgccctgttgcccaggagtttttcctttaatgttctcctgctacttactaattcactttgtcaccctgtgagctcataagagcagagagatagcaacaggagctaaaaaaactctaagctgtgaaaaaatattaaatatgaaatcatgatagctattagcttaatttgttttaggcaaattgcaaagtaattttttgggaatcagtgtcccactgcagtgattccatatggggattcctaattcccagtatgtttttaaaataatttgtaaacacctagtacaaacgcatgatatgaaattcaagaggtgggaggatcacctgagcccaggaggttgagacttgcagtgagctgagttcacaccactgcactcgagccttgatgacagaatgagactgtctcaaaaaaaaaaaaaaaaaaaaattgtccttaagtccatgtggacccctgactaggtttgtgccctagacagccttcctctgagggcagttcaggtggtgagactccagctttaaatggcctctagagaaatttcactaacctgccttggtgtttgaccctgtataacccctttcttctggaggtccctttgggtggcagtagatacgggatttggtgtctgacagctctggggacagatcccagctccaaatggcagagtctctacagattacaagccaaatacttagcactatgtgc

SEQ ID NO: 403533 - DNA, 684 bp, Homo sapiens
gggctcatcttgcttttgccctgttgagaggggccaagggacttggtagagcagcaggggctctgacggtgaacctcattgtttttaaaattattcataagaggccaggtgcattggctcacacctgtagtcccaggactttgaggagcagaggcaggaggatcatttgagtccaggagttcaagattagactgagcaacacggggagacctcatctctacaaaaaatttaaaagaaaattaattgggcatcatggcacgagcctgtggttcccgctactcgggaggctgaggtgggaggatcacctgagcccaggaggttgagacttgcagtgagctgagttcacaccactgcactcgagccttgatgacagaatgagactgtctcaaaaaaaaaaaaaaaaaaaaattgtccttaagtccatgtggacccctgactaggtttgtgccctagacagccttcctctgagggcagttcaggtggtgagactccagctttaaatggcctctagagaaatttcactaacctgccttggtgtttgaccctgtataacccctttcttctggaggtccctttgggtggcagtagatacgggatttggtgtctgacagctctggggacagatcccagctccaaatggcagagtctctacagattacaagccaaatacttagcactatgtgc

SEQ ID NO: 403534 - DNA, 486 bp, Homo sapiens
cactgccatctgaggagcaagttctttgacaggtgggggaagcactgacttcattagctcgtgtgagagtgaaggggggagatgtccctgggaacttctggcagccttgagggaaaaggatggtgacgttgtgtttcatattgaacttggcatacatgggagtgatgggggtgttcataggagatcagatggcacttccagtttgtctgcaagagcctaattactgacctgacacccgtttcttcaaataggcccgggaagcagctaactggtgtatggaagcatctggtagtgcaattaccctgtcagctctttatccacttgtagccctgtcattagacacttcttttccttgatatgcttaaaatgtagagttaccaaccagagcaatttaaaatgatatatagttatttttttctctcctctcctgtcgagggagaacttcataaatgatgtcacaataaacggaatgtgagagaaacctca

SEQ ID NO: 403535 - DNA, 231 bp, Homo sapiens
tgataccacagcttcttggagtgaaacaaaagatagtttccagaagataataaagagactttaaaatcagtgtgctatcttccttccatcagtgtccccctggttgggcccttagtgcaaggagacagtaataatagatagtgcttctgtcaaaaggtcgctttcttctttccagaaatagaaacatgcttcccaagaaataatctaaatctatttatatttctgccactt

SEQ ID NO: 403536 - DNA, 593 bp, Homo sapiens
taagtacatgaaaagacagtattgcatagtggttaaatgcatggactctgaagccatcctgtttgggatcatcctggctacattgcttactagctgtgtgacaatggatataggtgcttaatgtctctgtgcctcagtttttgtgtctatgtaaaggagataataggatccccctcatgcctcatggtcttagttgaatgaattcatgtaactccacagttatcttaatccagaaggctcaaaatactaatgttttgtgtgtgtgtgtgtgtgtgcatgtgcatctgtatgacaagtgatataaaacgtgacctgaatttataatatgaatagtcacattttgcagcagaaatattaaatgtttaattatagaatgctagcactgatcctgctgaaattgttacaaaatacagcagttgccccttaactgtggcagatacattccaagacccccagtactgaatgctgtatgtacattttttatacatgtatacttatgataaagtttataaattaggcacagtaagatattaataatagaatatacaatataccgcaataaaacttatgtgaacagttatttttggacagca

SEQ ID NO: 403537 - DNA, 442 bp, Homo sapiens
agttctgtttgatctgccaaagagccagcctcagtccactgagaaacagggatgtgccgttatctgcacactgaggtttatttttaccttgtccctggtgagtccccagagacaaggagaaaacactttgggagggagttaagagccttttgcttatccttgaaggaaagcagtctctgaggattagtgagggtggtggtgagggtaggtagggggaggagagtcagaggaatcagagttatttggactgcattttttccttgcctgattaaatcttactgacattggcactttgtgtcactaaaagaacacagccctggatgtggggccagggaccagagggttggcggcagagtctggggctggcatggctgctgggctgcttggctctgaggacccaccgtggagttggaacctgacttgtcgggcgctgaggacctgc

SEQ ID NO: 403538 - DNA, 420 bp, Homo sapiens
acattctcaagttataagaagttagttcttcttccctcatgttacttaagatttgaattcatgattgtatagaatcattagttgtcttaaacaagcaagggcactaaatgaatgaccattacagggaagacagtagattccatgagaggatgtgtcttgagaatgtatatgaacatgaagacttcatctttgagaaagaggaataactttcagaggaaggtgattcaagtgaaccaagacatgacactgaagaagaatggtgggggtggtagggagtaaaactatcgcagctgtgtgtacacaaaagggaatgaaccagggttgggagtgcagtggtgtgagttgtgacttgggcctagaatgcttgattgaacatagcattactggctttgctgtcctgagtgagtcagtgggcagttg

SEQ ID NO: 403539 - DNA, 377 bp, Homo sapiens
gtggagtgtgcaccaaatttcaccgtgtaaaaatataccattatagaccttgtaaaatataccgttacaccatgctggctgcaacctggctgtaccattaactgtaatcctgctttgttttcttggagtaggagaaacaggcaaagccaaccaagatgcttttgattcccagtagtactgttaaatagaccagcgttgcttagaaataggtgtgggtctgtctacttcagatgcaaaggataaatgcagtgggtgtcacagccacaataataattatgtcatctgtcttgtcatggaatgtgactatagtaattgcggcattttctcccatcattgaagcttgtaattatagtgcaactaacaggattacgtgctaa

SEQ ID NO: 403540 - DNA, 442 bp, Homo sapiens
ttcaggttgggtacaagacttagtttgagcagggcctgtagttttccttccctcttcgtactgggtgcaatcaaaaacccaaagacagaagagatcaattacaaaagcaacagtaagtagccttatttgggccatttcattaagaatgtttatgtttttacttatctctttaatttgcatttggaaatccaataaaactagtttgaaaattattgaaagtgagatttttttaatattgaaaactctttaaatattgaaagtggtactttttttctttgtgtaatttttttaatggggtcttctctgcatgtgtgtaattttcatgtcacttaggaataagcatgcatatactgatacttgtttacatgcatatggaaattgcatttttttcaaaactttgtgttgttttttccctaattttgttaatccagaactcttacag

SEQ ID NO: 403541 - DNA, 204 bp, Homo sapiens
agaaaaatcaagtcccttagcacattggaagataaattcagttaaccctgtttccccagggttcaacaaacctacatcacttaattttcatttattttctaacttatttccttcttagagcatcttcctctctgtcaatacttcctaataatatatataagagccagtcttattccggagttacttatggatcattctccagaa

SEQ ID NO: 403542 - DNA, 268 bp, Homo sapiens
agggctgctcctgtgactggcagctttccagcttctatccatgtatatatgtacaagttctgctgcacaaaacaggaactctgcattagtgacttagcccaaagggggtttgtagtcttcacataacaagaagtctgcaggcaggcggctcagggctggagcagcagctccacaacatcaacaacacaccaagctgcactagctttccacttcaccatcctggacaagcagcttttctcctcatatttgccatctcacagcctccagc

SEQ ID NO: 403543 - DNA, 385 bp, Homo sapiens
gcccccaagaagggctttttaaaaaaaattttttattttgaaattttttcaagtggtaagtttgaagaataaaaaaaaacttttatgtacccgttacccagattcaccagtttttgacattttgataatttgcttgcatcctttatgtatgtatatatgtatacatgtgtatatgtctgtatttgtaggtacatagatttgtgcacacacacacggttcccctgccaacccagtcaagggtagcttttatgagtgatgctgctgtattccttaatgcttcaatgtgtatttccagagaacaagaatagtctattatggatctgtagtacagcattcacattcaggaaagttactgttgtttgtttgtttttttttttttttagcc

SEQ ID NO: 403544 - DNA, 486 bp, Homo sapiens
gttgcagtgagccgagatcacgctgctacattctagcctgggggacagagtgagatgctgtctcaaaaggcaaaggaccagatagacatttcttaaaagaagactggccaaaaggtatatgaaaaactgcttaacattaaggcttaacactaatgatcagggaaacacacttaaaaccacaatgagatatcatattacaccagttagaatggccgttaccaaaagataaatgataacaaacgttggctagggtgtggagaaaagggaatcacagagttagtaagaatgtaaattagtacagctgttttgaggaacagtatggaggttccttaaaaaactgaaaataggccgggcgcagtggctcacgcctgtaatcccagcactctgggaggctgaggcgggcggatcacgaggtcatgagtttgagagcagcctggcaacatagtgaaaacccatctctactaaaaacacacacacacaaaaaaa

SEQ ID NO: 403545 - DNA, 178 bp, Homo sapiens
ctcccaaagtgctgggattacaggtgtcactgccccttttcatagccaatattttgtaatccttcctttcccacctgaagtgaatgtcatctatgctataacctacccataatgtaatttcagaaaatcactgtactatcccaaaggcaatgaaaaggagaaataaaaggaaagtata

SEQ ID NO: 403546 - DNA, 534 bp, Homo sapiens
tttacctggtttcacaggttcacagctggagaggaatgttggctcagaatgaatcattcctggtcttacttgtatctgatttagatgatataaaactttggactttaggcttcagaactgatgctggaatgttttgtcttttaaagatgttgagatggaatgaatatattttgtgtatgagaacatgaattttgtgggttcccgggcaaaatattatggacttaatgcttgtgccccctgctaattcatatgttgaagccctaccctcgaaagtgaggcgaggcctttgggaggtagttagggttagatgaggtcatgatggtgagccccccatgacgtgtccttaaaagaataggaagagaccagaacgtgctctctctttctttctccccaccaagtaagaacactgagagaaggtggctgtctgcaagcccggaagaacaccctcacatgaacattctggcaccttgatcttagatttcccagcctccaggactgtgagaaataaatgtctgttgtttcagccaaaaaatc

SEQ ID NO: 403547 - DNA, 239 bp, Homo sapiens
tccctctttcccacccccacacctgatacccagcccctggtcaccattgatctactcgctacttctacggggtcaacatttttcgatcaagacttccgtaacttcatgtggaatttgcctttctgaggtgatggagatgctaagatttgatcattccatggtgcacacatctatctaatcctcacattatatcccataaatgaatacaagcataattttccaattaaaaataataatta

SEQ ID NO: 403548 - DNA, 382 bp, Homo sapiens
aagatataaaacagctctttttccaaggcccggagtactggggattgatgtttcaaggccaatcaatgggatgcttcgttttctccagcaacaggaactctctcttttcacctttgctgccaggaatctcagagataatttagtgctcaatttactaaccttacttcacattcaggttagatgttacctccacctatatgatagtaattcctaattttattttttattgtcctttttatgagtgtttatattttaaagtactttgggtatttttggggggggtgtaaatgagtgatcagtgtacattgtgtgtggactgaagtgtaggtatgtagagatgcttcgccaaacagatgcttaaaaatgaatggaagttgagggt

SEQ ID NO: 403549 - DNA, 494 bp, Homo sapiens
ccaaaaggacctagttctgtaggtcctttgcacttaaagcaaaaatgcaagcaagtataggaaaaggtggttctcttcccaaagtagaagccaagttcattaattatgtgaagaattgcttctggatgattgatcaggaggctattcaagatctctggcagtggaggaagtctctttaggaaaatagtttaaacaatttgttaaaaattttccatcatttcatttctgtaacagttgatatctggctgtcctttttataatgcagagtgagaactttccctactgtgtttgataaatgttgtccaggttccattgccaagaatgtgttgtccaaaatacctgtttagtttttaaagatgcaactccaccctttgcttggttttaaatatgtatggaatgttatgataggccatagtagtagtggtggtcagacatggaaatggtggggagacaaaaatatacatgtgaaataaacctcactgttttaaattaaa

SEQ ID NO: 403550 - DNA, 363 bp, Homo sapiens
aacctgtcctttccccattaaatggtcttggcattcttgtcaaaaatcaggctggagtgcagtggcatgatctcggctcattgcaacctccaccttccagattctcttgcctcagcctcccaagtagctgagattacaggtgtgcaccaccacgcccggctaacttttttatttttaacagagacggggtttcaccatgttggccaggctggtctcgaactcctgacctcaggtgatccacccgcctcagcctcccaatgtgctgggattacaggcatgagccaccgcacctggtctgatcaagtttaagactgcattgcaccacagcactgcagcctagacaacagagcaagaccctatgtc

SEQ ID NO: 403551 - DNA, 377 bp, Homo sapiens
tttatggtctaaaaaaaaaaagtttcataaaaatggtggatgacatttacaatgaaatagagattttctttccttttaattatcctctcagggtagaggtcaggaaaggggtgaagaagagagaaaatccaggcccattaaatctttttcaagcctgctgcctgggtttgattcaagttcactgctaattccataagctgggatggatgccaaagagaagtccaaatcctatccgtgcgtcccctttgtaactggttttggaactacaagtcctagtctctgaaatggcctgtttaacaagaaatcaccccagaaatgtctttatgtaaaacaaattagtacacaatatattgccctcatattcagtgtgcagaaag

SEQ ID NO: 403552 - DNA, 402 bp, Homo sapiens
cagttccataaatggctgcctacagaggaaagcttcacatgtgcctaaaaactcccttcagatcgtcatcagcccgtattcagccacaaggaggtctttcaatctgaaactccagagatattaatatctatcgctgtacaagccagcccagttctgggaaggaaggaagggaagggaatgtgtgaagacaagagtgagtggtgggtggggaggactgttctgtgcatgttcctatcactttagtagctcatcaaagagagcaaacgtcagcacctcttgatttggttttgactcccccagatttctacaatttcagattcttgttttaagtgccagtaaaaccttttcccttggggctagggaactgtgcaaaggaaataataatactggcagagtgatttg

SEQ ID NO: 403553 - DNA, 451 bp, Homo sapiens
tgtgacctcattttaccttaatggactctctaaagaccctatttccaattacaggcacattgaagattagggcttcaacatatgaatttggtggtggagttgggcacaattcagtccacaacagtgacttcactttatggtttaatccagcctccacattttacaaatgaaggaactgaggttgggaaatagaatgtgcccagcaaatcagtgacagaggcaggtctgtggccctggccctaatcatgccgtccttctgcctttctttttcatgttttctttgttttcttcagcttccattcacttagtacataagcaaaataagacatgcaatgcatttatttccatcctcataccctcaagaatttgttaaacatagagaagtcagttaaacattacctgaaatatactagcaaatataaaactactgggaatattagtggtgttaaca

SEQ ID NO: 403554 - DNA, 369 bp, Homo sapiens
cagggcctgggtttcatcatgagtgctaacactgatagaatgagtgtggttgcgtgagcactgtgttgagaaggattctgaggcatcatctgagcaagagttccatggttgattagccaagtgtgcagcaggtacagaagcataaatggtactatttttttctctcttttttgccatccctgccctagacggaacccagaaagagtccagcctagttacagactcacctctgaatgaatcaaactctgagccccatgttttcctttttttaccctggctgccaggaaactcagaagcaacattttaaatattcacttattgttttctgctgctatggttatcaggcttacttttctatttacttttcca

SEQ ID NO: 403555 - DNA, 410 bp, Homo sapiens
tattttggcaattttactattttttaaaattcatacctagtttgaattgagattcatgtaagtgaaacaccattaataaggatttttagttttaaattttagtttgttttattataaaatagtcaatatctatcattcttaaaatcaagtattctttatagtagtcctacttaatatgcagtctgtaggctggaaagcatttgttaccagtctgccttgaaattaaatatagaagttgagtaaatgcttaaaactgtcaccaaagtttgatagagtaataaaaatagggggcttgtattttgtttttgtcaaatttgacttgattatacaaatgtgatgaattagaaatttaaaaaaccaattggtccttcccacagaaggatatttcatttgagaaatatcactttaga

SEQ ID NO: 403556 - DNA, 660 bp, Homo sapiens
gccatgcattagaccgcaggaagaacccactgaagtcaggctctactctttcgacagggactgggaagatcaggagtgagctccctgaatgtttgcattgcaaagagaaggctctcaggtcctcaaggaaatggggttgggtggtagattcacatcccaaagggcagagaaagtgtttatcattgcaggcttctaaagtaactgctctagttgggttcggggacctggctgcttgtctccaggttttggctggagcagagtaaattgtcctggcagggttgagccttcccaggcagttatgttaaggatactggggtcattctagggacacagccttaagctgctagaagcaatgctagagattggtcgagtccctgagtgcagaggtttgggaagagttgttatgtgcgtagagatgtgcagttcgcccctcagaaggatttcagaggttataccaaagaccaaagccacgaagacaggatttaaggatttcagtgtcatctgtgacaggtgggggtactagggaggtctacatcctcttccccagagccctctattccacactggcctggcagacaccttgcatctccatgtcactgaccactgtagggatcccagccacagacacacacacacacacgcgcgcacacacacacactg

SEQ ID NO: 403557 - DNA, 485 bp, Homo sapiens
tttttttttctgtcctcctggcgctcagctctggcacatacagttgcaaccataagaagcaggatcagggcagcaaacacaaagctccagttttttgtctgtagaactgaaaggcaagctccaggaaagcagaaagtcctggagaggatcctggaaagggagatgctcgaaaaatagaacacaaagttgttcaagaactccagggctccccctagaggcacacatcactgtactcggggacaaagcactgcccacatacacacgaccacaggaggtgcacgggcaggacagatcaaaccgcacaggctttgaagacatcaacccacagaagtcaactaggctgatttccagcttgaaaaaaaaaatcaacattcccctagtatgtaaagaagacctgaagtcatgtaacatagtcttcaaaatacccaggacaccatctgaaattacggggcataggaagaatcaagtagcatgcacatgaaaag

SEQ ID NO: 403558 - DNA, 332 bp, Homo sapiens
aaacataatcagtaaaagttacataaaagaggaatgagaaaaagaagtaaaaagtagagtcttcttcatatgttaaaagaatttgttgtaaagcctcagaatggcttctacatagtaaaccctccaaatctctccagtaaagattgtaattgcggcatatacacagtatcagacccaattagaaattgttaactagagaaaaacaatctggcagtggcttagtcttagcatggctttcagagactccagcacatttatggtattcttccctataatctacaccttcattctgaagcattatgatcaagacaaagaggacagtctacagattc

SEQ ID NO: 403559 - DNA, 492 bp, Homo sapiens
ccagcttcagacagcctgtggacatggctccctggtcagcaggagagcatgttgcatggggatccctgggcaggcactgggagggaggcctgaggtgtggctcctgcagcgtcatagctactgctctttcctgcagtgacaacctgtccggcccactgagcctccatcccagtaggccagcaacaccctcaaggctaagaagatcaggccatgaagaatctcagggccaatgagtgcccaggtggtaggtgcagagtgcctcagggctcagtgaagtttgggctgagcacgggctctggacttccaactaactccactgtgactagcactgtgattggggcagcctcactgctctggaacttgaggtaccattgtcacagatataaaacacccttccaatcttttttttttttatcttcctctgtaatcaccatgtactactgctctgttagtgtttttattcaaattaataaacatatgttatacagtgta

SEQ ID NO: 403560 - DNA, 407 bp, Homo sapiens
gtggagacagggtctggggtctgatgcggacaggacagatggatgattggggccccccgacatgacctcaccattcacccctaaaacccagggccagagcctcctccagagcccggggaaaggaggggtacgatggtggggggcgaaaggtcaggagatggagcataggccttctcctccccacctttgtcccctccggccctgggccacctcaaacctcctgcagatttttccctccagaggccctcatccatcccctcctcctgaccatccaagcaggagtcaccatgtctcccagaccccaggcagcttccgcttcactccctccccttgctcccagcacccccaccaggaccccaccaccccaactccagccctttctgggtccctcctctcctgatccccag

SEQ ID NO: 403561 - DNA, 412 bp, Homo sapiens
aaggcgcatacctcaaaataataaaaagccatgtatgacagtcccacagccaaaattatactgaacagagaaaagtggaaattattacccctaagaagtagaacaagaaaatgatgaccttttaccccttctactcaacatagtactagaagtcctaagagcaatcaggcaagagaaataaagtgcatccaaactggaaaacaggaagtcaaattgtatttgatggtaatatgatcttgtacctagaaaagcctaaagactccttcagaagactctaaaatctgataaatgaattcagtaaagtctcaggttacaaaattaatgtgtacaaatcggtagcactgctgtaagacaacagtgaccaagctgagaatcaaatcaagaactcaattccatttacaatagctacaaa

SEQ ID NO: 403562 - DNA, 422 bp, Homo sapiens
agatgtaagaagtatggtgaaaactgagtttccctgctactcctgactccctgtacccctccccagaggcaacagttgttccagtttcttaggtatctttccaaaaagatgctatcgaggcacctctgccagcttgttctctctccttccaaagccaaacactttatttcagacaattgtgtatttaaaagtatccagttatatattaaatatgaaaagcaaatgacaacagtgtgtacaggatgtttccatgttttaaaataataatgtgttagaaatgcaatataaacccgaatggtaaatgatgcctaggttggggtgtgggggtgcacttccttcgggaaccactgcagtttaatatgtgaacttgtgaaaacaagagcatgtaattttttcataataaagaaatttttttaactaag

SEQ ID NO: 403563 - DNA, 502 bp, Homo sapiens
aaccgagaaaacctggctcctcctgcctctctgaccttccactacatcgccctcctctacccctcaactccaacaatgggccttcttcctctccctcaaaacgacaagttcttccctgtcccccgggtttgtacttgctgctccttcttgacgtctttactgaccaccccaaactaaaagccctgtcctgttactatctccctgtgtatttccttcaaggtgcattcactaacagcacttatctttttcacatgcatgtttgcctgcccgttgtcagtttcccatgagaaccttaatctattcatagttaatctatataaatatctcagtctatcatcaccttcaccactgtcactcagccaccagagctgagcatggcacagaatgggtgtttattaactaaattaactacatttaatttgccatctcagtaagtcacccagcacagctctattcagcttccccacttttgcagatgaggaaactaagaacatcaaggctg

SEQ ID NO: 403564 - DNA, 484 bp, Homo sapiens
tagaacgtaaactccacgggaacagggactttgttttgttctctgccgtatctccagcacctacaacactgcctgacaccctgctgggtgaccgatatacgccggatggctcagggagtgggtgcaggtcgaggaaagggtatagcaagaggtatgtccgggagggatgtttagggtgtgcttttagtccaacagaaaagcactctccatcctttttctatttctctcctctccttctccctccctccgcacttcagaggttggggaaaagctgcgggaaagcaggaaataaggaaaaatcctaaattgcccagctcgaattccaatgaaaaattaatgagcgaggaagacagggaggcagggaataagtgcacatgcaaaagttaaggaagccagtggaaagcaaagaaaaaggcgaacagacgtcactctctctggtcacgctccccgactccccagaggacaggcgaggcgcttctggcac

SEQ ID NO: 403565 - DNA, 358 bp, Homo sapiens
gcacccggggccaggagcggaagtccgaggggaccccacggcggaggagcggcagagcccgggccccgcgggagagagaggcgggagcctctcacactaacagttgatcggcggattccacttactgtgactatccagtctcctctaggcctttggacatctgaaaggcagtgttaagagcccaactctggagatggactttggctccaccaccaagtattaatagctctgtgacttggggcaagttacttaacctccctacaccacagtttccactgctgtaaattggggatgatgataataacagccacctcacaaggttgcctggagatttgattaaatgaaataattagcatgg

SEQ ID NO: 403566 - DNA, 384 bp, Homo sapiens
tggagaacatcagcatttaatgggtggagaaaggaagacacacccatgaacaacactgaggagtggttggacatcaaggagagaaggtgcttcagggaaggagtaataatgtcaagagtagagaaaaagacttgaaaagtactttgtttgctttggcagttaggttactgatgacttaagccttgacatccccagctcacacgatcctcccgcctcaacctgccgcgtagctgggactacaggcacacaccaccatgctgagctaatatttttattttttggtggagacagcatctgcccagcttggtctcaaactcctggcctcaaaagattctcctgcctcagcctcccaaagtgctgggattacaggtataagccactaca

SEQ ID NO: 403567 - DNA, 781 bp, Homo sapiens
aaattgatggtaatgaaggagggttgtgccatgaaaatacaagagatttcctattgtaaccttgttgcactgtggattaaattgaagatgcacagtggactcctggggatggaggagagtttggaggtcagagggctcttgtcttgagctccaagtggtgctctaagtctaggataaagattttacacagggtggggcaggtggacagccagatcttcatttattcttaccaagctcttattaagtcatgtgggtgggatttactgttaaggaaggcagagcctacctgtccccatagggctggcatcctattggaggtggcactagccacttaactagttaagtgagtgatatttgggtagggtgcccataactctgatacgatctgccttgcgattctgctcctgctagtggagtgtgggggaggcctggtcttggatcttgttcctcacagctggttcattcaggaggttagtgctctgctgaggaggctggaggcagagctccatcttggcctggctggctagtttctgttcaggactagagctagcacctgtagtcttggcaagccattttagaaatctaagttgttggtccatgtaatgtcctggtggttgaaccaacactcgttctttgccattcctgggcaggtgcttggagaaggctggtgagctgttcatgttttttgaagaatggtgcatcagtagcacaaggttttccctggttctgctgaggcctgttgctgagctttggggtgccctgtcccctgttttattcctgt

SEQ ID NO: 403568 - DNA, 788 bp, Homo sapiens
cctgctgtaatgacccctgattaacgagttgattctaaccctgctgtgcccagttcctctacctgagaagtgagctttaacaaagaaggagacaggctgcataaaattaaaacacctgattttgaacaattagctagatatggaaggctaatctttcagatcatctttctaaaaatgaaaaaatggactagatctctggtccttaaacttggccatccatcagaatcacctgcagagcacagattctggttcagtagctctggggcaggtcaagaatctgcatgtctgacactaccgcctctgctgccgacactaccgcttctgctgccgtcaccactgccaggtctgccccactcaatgctggtgctaccggtcagccagaaccacactgcatatccctggaaagggtgcttggttggaaggcctttgtgagagaaacagccttagtgtccctcgtgcataaactgaggataatagttgtctgctcgtgttatgtagatttggtgcgagcactaaatgacttaatatttgtagtgtttagaactgtgtctgatacaaagtaatggccatacaagtgtttttaagtaacagtaatttttagagtcccatgcctattatccacaagtaaactctagtcttatacctctagaacaaatgaaatcaacttccttagatacagctgaaatcctggcctgagttcagctgaaagcctgggcttagatggctggaaaacaaaataagaagtgtgaatgttcctcataacttttcccagccctggagcacagata

SEQ ID NO: 403569 - DNA, 448 bp, Homo sapiens
cagattggagggcaggaccactgagggtgtcatagacattagctctatggaattctgctagcaatttccaagtgacagtgaggaattatggatatatgttgaggtcattcagcttcctgagtaccacattccccagctacttagacacgggttaaaatattaagatgtcctagttcaacagcttgaattccattgattgatactgatagtgcctgtccaagacaccagctgaaagacttgttttgtgtacaaaatagttctgaaagtggtgagatacaaaaaggttttagaatcactgccctgttgagagaaattagggggaaatgattacatttagaagctgctagagttatccagtgtttgctggtctttgcaacaaactgtggagaatgggtggtatgtaatgctttggtaggcttcaatcactgataaaagatcatgttaaaat

SEQ ID NO: 403570 - DNA, 680 bp, Homo sapiens
ggaacatgatgcctgtataggaaagctgaaggcagaactatttttaggtctccatgtaattttttatctaagataatgatgattatgataataatgatggagtagctattactttttaagttcctactgtataataggcatgttataaatgtctcattcagtcttcataacaaccctacaagttacgtggtgttagtctcattttacatttaagttctgccctgattttagttatttcttgccttctgctagcttttgaatgtgtttgcttttgcttttctagttcttttaattgtgatgttagggtgtcaatttcagatctttcctgctttctcttgtgggcatttagtgctataaatttggccagggcaattaggcaggagaaggaaataaagggtattcaattaggaagagaggaagtcaaattgtccctgtttgcagatgacatgattggatatctagaaaaccccattgtctcagcccaaaatctccttaagctgataagcaacttcagcaaagtctcaggatacaaaatcaatgtgcaaaaatcacaagcattcttatacaccaataacagacaaacagagagccaaatcatgagtgaactcccactcacaattgcttcaaagagaataaaatacctaggaatccaacttacaagggtcgtgaaggacctcttc

SEQ ID NO: 403571 - DNA, 2017 bp, Homo sapiens
tgtcttgaaggtggtctgagctttctcactccaagccagtcgtgtgggaagggacactctctgagcctcagtttcctcagctgtcaacctctcagggcttgttctagtggctccgaaagccagtgggagcaagcgcgctttgcaaagccttgggcgccgggccttggcgcgcctttgccggatccttccggccacgggcggggcgagcccagaggagaagagccgaggggcggtgcccgggccagggggcggaggcaggcggctctggctccctctcgggacgctctttccttcttcctcttgttcctcctcctgcctctcttcgcttcgcctgcaaacgcggtgggggctgctcggcggtcaggagcaggcaagagacagagcgacatgagagattggaccgcgggctgcactggagaatttactggtaggataattcatccctaaagagattgaagtgagcttcagaatggcaaaagaggagccccagagtatctcaagggacttgcaggaactgcagaagaagctgtctctgctgatagactccttccagaataactcaaaggtggtggcctttatgaagtctccagtgggtcagtacttggacagccatccgtttctggccttcaccttgctggtgttcattgtcatgtcggccgttcctgttggattcttcctgctcatcgtggtgcttaccaccctggctgctctgctgggggtcataatattggaaggattggtcatctctgtgggtggcttctcactgctctgcatcctctgtggtttgggcttcgtatcactcgccatgtcggggatgatgatagcatcttatgtagtggtctccagcctcatcagctgctggttttctcccaggccactgacacagcaaaacaccagttgtgactttctgccagccatgaagtctgcagacttcgaggggctttaccaggaatgagtgactgctcagaggccgggcttcttttcaagtactgctggatcatactcaccccttgggattatggcttagaagaagggggctgggtaggcaagcactccttggctgtgtcctctcgctttttcacttacttgtaggatcccgcagcagccaatttagggattgtgttgttcttgtgttggttcccatgtaaagaagcagcagagaaatgcgatggttcaacagctcgccctgccccaagtatgcagacttgaccttggcggggtcctgggcttctagagtctagcccgttgaccccaaagcctcagggcttatgtccaacggtcccattgggagcaacagtgattgtttatagttttttgttttcagaaatgagggcagctgttaattttttcactcatgtgaaacaaaatgaaaaaaaaaatccaaaacagaacaagcccttctgtggtatttgctttttatcagaaagaacagcaacatttggcctctccaagttggaaaatagagtccaaatgtaactttgtggccaagagtattttcaaaaaagtctaaaggtgtagtttccactgtaactgttgagtactgttaagtactgttaatcttttacatatttgcacttggtactgttgtattgttctaaagagcttgtcctttaagtaatttctttcttttttttttttttttttttgtgacggagtttccctcttgttgcccaggctggagtgcaacggtgcagtctcggctcactgcaacctccaactcccaggttcaagtgagtctcgtgcctcagcctcccaagtagctgggattacaggcacccgccaccgtgcccggctagtttttttttgtattttttttagtacagatggggtttcaccatgttggtcaggctagtctcaaactcctgacctcaggtgctccacctgccttggcctcccaaagtgctgggattacaggcgtgagccactgtgcccagcctaagccatttcttaaaataaaaatgctaaaggactagtaagtaaaaataaaacttcctatgggatttcccagtggaattac

SEQ ID NO: 403572 - DNA, 394 bp, Homo sapiens
tcttcctgctgccacgagaagaaggatgtgtttgcttccccttttgccacgaccgaccgaccataagtttcctgaggccaccccagacctgcagaattgggccaacttgatttttctgaaataccttgaaagtttgaatcaaaaaatcagaaacaagtttttcttctgcgttaacagttccaaggagcagattattcattggtattcacataggccttgttttcaaacctggtacaaaccatgtcttcttggcattgtaattcatcaaatgtagtaccggccctggtacctgccattgcagtggcagccgcgtgcatgctgggctctcctggctcagctgctttcacacattgccgatcagcagcagcagcagtgaaggagaacttaagtggta

SEQ ID NO: 403573 - DNA, 2048 bp, Homo sapiens
tgtcttgaaggtggtctgagctttctcactccaagccagtcgtgtgggaagggacactctctgagcctcagtttcctcagctgtcaacctctcagggcttgttctagtggctccgaaagccagtgggagcaagcgcgctttgcaaagccttgggcgccgggccttggcgcgcctttgccggatccttccggccacgggcggggcgagcccagaggagaagagccgaggggcggtgcccgggccagggggcggaggcaggcggctctggctccctctcgggacgctctttccttcttcctcttgttcctcctcctgcctctcttcgcttcgcctgcaaacgcggtgggggctgctcggcggtcaggagcaggttaccctccgtctgcatgcccaccatcaaggcaagagacagagcgacatgagagattggaccgcgggctgcactggagaatttactggtaggataattcatccctaaagagattgaagtgagcttcagaatggcaaaagaggagccccagagtatctcaagggacttgcaggaactgcagaagaagctgtctctgctgatagactccttccagaataactcaaaggtggtggcctttatgaagtctccagtgggtcagtacttggacagccatccgtttctggccttcaccttgctggtgttcattgtcatgtcggccgttcctgttggattcttcctgctcatcgtggtgcttaccaccctggctgctctgctgggggtcataatattggaaggattggtcatctctgtgggtggcttctcactgctctgcatcctctgtggtttgggcttcgtatcactcgccatgtcggggatgatgatagcatcttatgtagtggtctccagcctcatcagctgctggttttctcccaggccactgacacagcaaaacaccagttgtgactttctgccagccatgaagtctgcagacttcgaggggctttaccaggaatgagtgactgctcagaggccgggcttcttttcaagtactgctggatcatactcaccccttgggattatggcttagaagaagggggctgggtaggcaagcactccttggctgtgtcctctcgctttttcacttacttgtaggatcccgcagcagccaatttagggattgtgttgttcttgtgttggttcccatgtaaagaagcagcagagaaatgcgatggttcaacagctcgccctgccccaagtatgcagacttgaccttggcggggtcctgggcttctagagtctagcccgttgaccccaaagcctcagggcttatgtccaacggtcccattgggagcaacagtgattgtttatagttttttgttttcagaaatgagggcagctgttaattttttcactcatgtgaaacaaaatgaaaaaaaaaatccaaaacagaacaagcccttctgtggtatttgctttttatcagaaagaacagcaacatttggcctctccaagttggaaaatagagtccaaatgtaactttgtggccaagagtattttcaaaaaagtctaaaggtgtagtttccactgtaactgttgagtactgttaagtactgttaatcttttacatatttgcacttggtactgttgtattgttctaaagagcttgtcctttaagtaatttctttcttttttttttttttttttttgtgacggagtttccctcttgttgcccaggctggagtgcaacggtgcagtctcggctcactgcaacctccaactcccaggttcaagtgagtctcgtgcctcagcctcccaagtagctgggattacaggcacccgccaccgtgcccggctagtttttttttgtattttttttagtacagatggggtttcaccatgttggtcaggctagtctcaaactcctgacctcaggtgctccacctgccttggcctcccaaagtgctgggattacaggcgtgagccactgtgcccagcctaagccatttcttaaaataaaaatgctaaaggactagtaagtaaaaataaaacttcctatgggatttcccagtggaattac

SEQ ID NO: 403574 - DNA, 2089 bp, Homo sapiens
tgtcttgaaggtggtctgagctttctcactccaagccagtcgtgtgggaagggacactctctgagcctcagtttcctcagctgtcaacctctcagggcttgttctagtggctccgaaagccagtgggagcaagcgcgctttgcaaagccttgggcgccgggccttggcgcgcctttgccggatccttccggccacgggcggggcgagcccagaggagaagagccgaggggcggtgcccgggccagggggcggaggcaggcggctctggctccctctcgggacgctctttccttcttcctcttgttcctcctcctgcctctcttcgcttcgcctgcaaacgcggtgggggctgctcggcggtcaggagcaggcaagagacagagcgacatgagagattggaccgcgggctgcactggagaatttactggtaggataattcatccctaaagagattgaagtgagcttcagaatggcaaaagaggagccccagagtatctcaagggacttgcaggaactgcagaagaagctgtctctgctgatagactccttccagaataactcaaagctgccccaacacagcaggatctcactggactctgatgatggagtgtccaggctgggcagtgctggctccaaggtggtggcctttatgaagtctccagtgggtcagtacttggacagccatccgtttctggccttcaccttgctggtgttcattgtcatgtcggccgttcctgttggattcttcctgctcatcgtggtgcttaccaccctggctgctctgctgggggtcataatattggaaggattggtcatctctgtgggtggcttctcactgctctgcatcctctgtggtttgggcttcgtatcactcgccatgtcggggatgatgatagcatcttatgtagtggtctccagcctcatcagctgctggttttctcccaggccactgacacagcaaaacaccagttgtgactttctgccagccatgaagtctgcagacttcgaggggctttaccaggaatgagtgactgctcagaggccgggcttcttttcaagtactgctggatcatactcaccccttgggattatggcttagaagaagggggctgggtaggcaagcactccttggctgtgtcctctcgctttttcacttacttgtaggatcccgcagcagccaatttagggattgtgttgttcttgtgttggttcccatgtaaagaagcagcagagaaatgcgatggttcaacagctcgccctgccccaagtatgcagacttgaccttggcggggtcctgggcttctagagtctagcccgttgaccccaaagcctcagggcttatgtccaacggtcccattgggagcaacagtgattgtttatagttttttgttttcagaaatgagggcagctgttaattttttcactcatgtgaaacaaaatgaaaaaaaaaatccaaaacagaacaagcccttctgtggtatttgctttttatcagaaagaacagcaacatttggcctctccaagttggaaaatagagtccaaatgtaactttgtggccaagagtattttcaaaaaagtctaaaggtgtagtttccactgtaactgttgagtactgttaagtactgttaatcttttacatatttgcacttggtactgttgtattgttctaaagagcttgtcctttaagtaatttctttcttttttttttttttttttttgtgacggagtttccctcttgttgcccaggctggagtgcaacggtgcagtctcggctcactgcaacctccaactcccaggttcaagtgagtctcgtgcctcagcctcccaagtagctgggattacaggcacccgccaccgtgcccggctagtttttttttgtattttttttagtacagatggggtttcaccatgttggtcaggctagtctcaaactcctgacctcaggtgctccacctgccttggcctcccaaagtgctgggattacaggcgtgagccactgtgcccagcctaagccatttcttaaaataaaaatgctaaaggactagtaagtaaaaataaaacttcctatgggatttcccagtggaattac

SEQ ID NO: 403575 - DNA, 1984 bp, Homo sapiens
tgtcttgaaggtggtctgagctttctcactccaagccagtcgtgtgggaagggacactctctgagcctcagtttcctcagctgtcaacctctcagggcttgttctagtggctccgaaagccagtgggagcaagcgcgctttgcaaagccttgggcgccgggccttggcgcgcctttgccggatccttccggccacgggcggggcgagcccagaggagaagagccgaggggcggtgcccgggccagggggcggaggcaggcggctctggctccctctcgggacgctctttccttcttcctcttgttcctcctcctgcctctcttcgcttcgcctgcaaacgcggtgggggctgctcggcggtcaggagcaggttaccctccgtctgcatgcccaccatcaaggtatgaggatggtagaagctctcgtcgaaccagatggatgaagaccactaacggcttttgtttcctctggtaacagcaagagacagagcgacatgagagattggaccgcgggctgcactggagaatttactggtaggataattcatccctaaagagattgaagtgagcttcagaatggcaaaagaggagccccagagtatctcaagggacttgcaggaactgcagaagaagctgtctctgctgatagactccttccagaataactcaaaggtggtggcctttatgaagtctccagtgggtcagtacttggacagccatccgtttctggccttcaccttgctggtgttcattgtcatgtcggccgttcctgttggattcttcctgctcatcgtggtgcttaccaccctggctgctctgctgggggtcataatattggaaggccactgacacagcaaaacaccagttgtgactttctgccagccatgaagtctgcagacttcgaggggctttaccaggaatgagtgactgctcagaggccgggcttcttttcaagtactgctggatcatactcaccccttgggattatggcttagaagaagggggctgggtaggcaagcactccttggctgtgtcctctcgctttttcacttacttgtaggatcccgcagcagccaatttagggattgtgttgttcttgtgttggttcccatgtaaagaagcagcagagaaatgcgatggttcaacagctcgccctgccccaagtatgcagacttgaccttggcggggtcctgggcttctagagtctagcccgttgaccccaaagcctcagggcttatgtccaacggtcccattgggagcaacagtgattgtttatagttttttgttttcagaaatgagggcagctgttaattttttcactcatgtgaaacaaaatgaaaaaaaaaatccaaaacagaacaagcccttctgtggtatttgctttttatcagaaagaacagcaacatttggcctctccaagttggaaaatagagtccaaatgtaactttgtggccaagagtattttcaaaaaagtctaaaggtgtagtttccactgtaactgttgagtactgttaagtactgttaatcttttacatatttgcacttggtactgttgtattgttctaaagagcttgtcctttaagtaatttctttcttttttttttttttttttttgtgacggagtttccctcttgttgcccaggctggagtgcaacggtgcagtctcggctcactgcaacctccaactcccaggttcaagtgagtctcgtgcctcagcctcccaagtagctgggattacaggcacccgccaccgtgcccggctagtttttttttgtattttttttagtacagatggggtttcaccatgttggtcaggctagtctcaaactcctgacctcaggtgctccacctgccttggcctcccaaagtgctgggattacaggcgtgagccactgtgcccagcctaagccatttcttaaaataaaaatgctaaaggactagtaagtaaaaataaaacttcctatgggatttcccagtggaattac

SEQ ID NO: 403576 - DNA, 457 bp, Homo sapiens
ccctcgctggcgcagcatactcacgggtgtactgctgcctccctttcctggagagcccatctgctctccccactgtggttctttggattgtaaagatcaggtgacacagggagcatcaaataaggatgcatgtggattcgaactggaaagaagtcaggacctgagacagcgcaagggaccagcccacattctgtgtggtgactcccacggctcctccgcctctctttctctttcagctgccccaacacagcaggatctcactggactctgatgatggagtgtccaggctgggcagtgctggctccaaggtgattcctgctacagtcatctctggctagagaagcggaatagcaagctctttggtggcttttgtcagaatggtggggtagcaggaggcagtgaggtcagcgggcattatgccgtcctgtggcctggcagggagtgaaattggccatgc

SEQ ID NO: 403577 - DNA, 2123 bp, Homo sapiens
tgtcttgaaggtggtctgagctttctcactccaagccagtcgtgtgggaagggacactctctgagcctcagtttcctcagctgtcaacctctcagggcttgttctagtggctccgaaagccagtgggagcaagcgcgctttgcaaagccttgggcgccgggccttggcgcgcctttgccggatccttccggccacgggcggggcgagcccagaggagaagagccgaggggcggtgcccgggccagggggcggaggcaggcggctctggctccctctcgggacgctctttccttcttcctcttgttcctcctcctgcctctcttcgcttcgcctgcaaacgcggtgggggctgctcggcggtcaggagcaggttaccctccgtctgcatgcccaccatcaaggtatgaggatggtagaagctctcgtcgaaccagatggatgaagaccactaacggcttttgtttcctctggtaacagcaagagacagagcgacatgagagattggaccgcgggctgcactggagaatttactggtaggataattcatccctaaagagattgaagtgagcttcagaatggcaaaagaggagccccagagtatctcaagggacttgcaggaactgcagaagaagctgtctctgctgatagactccttccagaataactcaaaggtggtggcctttatgaagtctccagtgggtcagtacttggacagccatccgtttctggccttcaccttgctggtgttcattgtcatgtcggccgttcctgttggattcttcctgctcatcgtggtgcttaccaccctggctgctctgctgggggtcataatattggaaggattggtcatctctgtgggtggcttctcactgctctgcatcctctgtggtttgggcttcgtatcactcgccatgtcggggatgatgatagcatcttatgtagtggtctccagcctcatcagctgctggttttctcccaggccactgacacagcaaaacaccagttgtgactttctgccagccatgaagtctgcagacttcgaggggctttaccaggaatgagtgactgctcagaggccgggcttcttttcaagtactgctggatcatactcaccccttgggattatggcttagaagaagggggctgggtaggcaagcactccttggctgtgtcctctcgctttttcacttacttgtaggatcccgcagcagccaatttagggattgtgttgttcttgtgttggttcccatgtaaagaagcagcagagaaatgcgatggttcaacagctcgccctgccccaagtatgcagacttgaccttggcggggtcctgggcttctagagtctagcccgttgaccccaaagcctcagggcttatgtccaacggtcccattgggagcaacagtgattgtttatagttttttgttttcagaaatgagggcagctgttaattttttcactcatgtgaaacaaaatgaaaaaaaaaatccaaaacagaacaagcccttctgtggtatttgctttttatcagaaagaacagcaacatttggcctctccaagttggaaaatagagtccaaatgtaactttgtggccaagagtattttcaaaaaagtctaaaggtgtagtttccactgtaactgttgagtactgttaagtactgttaatcttttacatatttgcacttggtactgttgtattgttctaaagagcttgtcctttaagtaatttctttcttttttttttttttttttttgtgacggagtttccctcttgttgcccaggctggagtgcaacggtgcagtctcggctcactgcaacctccaactcccaggttcaagtgagtctcgtgcctcagcctcccaagtagctgggattacaggcacccgccaccgtgcccggctagtttttttttgtattttttttagtacagatggggtttcaccatgttggtcaggctagtctcaaactcctgacctcaggtgctccacctgccttggcctcccaaagtgctgggattacaggcgtgagccactgtgcccagcctaagccatttcttaaaataaaaatgctaaaggactagtaagtaaaaataaaacttcctatgggatttcccagtggaattac

SEQ ID NO: 403578 - DNA, 1745 bp, Homo sapiens
tcttcctgctgccacgagaagaaggatgtgtttgcttccccttttgccacgaccgaccgaccataagtttcctgaggccaccccagacctgcagaattgcaagagacagagcgacatgagagattggaccgcgggctgcactggagaatttactggtaggataattcatccctaaagagattgaagtgagcttcagaatggcaaaagaggagccccagagtatctcaagggacttgcaggaactgcagaagaagctgtctctgctgatagactccttccagaataactcaaaggtggtggcctttatgaagtctccagtgggtcagtacttggacagccatccgtttctggccttcaccttgctggtgttcattgtcatgtcggccgttcctgttggattcttcctgctcatcgtggtgcttaccaccctggctgctctgctgggggtcataatattggaaggattggtcatctctgtgggtggcttctcactgctctgcatcctctgtggtttgggcttcgtatcactcgccatgtcggggatgatgatagcatcttatgtagtggtctccagcctcatcagctgctggttttctcccaggccactgacacagcaaaacaccagttgtgactttctgccagccatgaagtctgcagacttcgaggggctttaccaggaatgagtgactgctcagaggccgggcttcttttcaagtactgctggatcatactcaccccttgggattatggcttagaagaagggggctgggtaggcaagcactccttggctgtgtcctctcgctttttcacttacttgtaggatcccgcagcagccaatttagggattgtgttgttcttgtgttggttcccatgtaaagaagcagcagagaaatgcgatggttcaacagctcgccctgccccaagtatgcagacttgaccttggcggggtcctgggcttctagagtctagcccgttgaccccaaagcctcagggcttatgtccaacggtcccattgggagcaacagtgattgtttatagttttttgttttcagaaatgagggcagctgttaattttttcactcatgtgaaacaaaatgaaaaaaaaaatccaaaacagaacaagcccttctgtggtatttgctttttatcagaaagaacagcaacatttggcctctccaagttggaaaatagagtccaaatgtaactttgtggccaagagtattttcaaaaaagtctaaaggtgtagtttccactgtaactgttgagtactgttaagtactgttaatcttttacatatttgcacttggtactgttgtattgttctaaagagcttgtcctttaagtaatttctttcttttttttttttttttttttgtgacggagtttccctcttgttgcccaggctggagtgcaacggtgcagtctcggctcactgcaacctccaactcccaggttcaagtgagtctcgtgcctcagcctcccaagtagctgggattacaggcacccgccaccgtgcccggctagtttttttttgtattttttttagtacagatggggtttcaccatgttggtcaggctagtctcaaactcctgacctcaggtgctccacctgccttggcctcccaaagtgctgggattacaggcgtgagccactgtgcccagcctaagccatttcttaaaataaaaatgctaaaggactagtaagtaaaaataaaacttcctatgggatttcccagtggaattac

SEQ ID NO: 403579 - DNA, 2120 bp, Homo sapiens
tgtcttgaaggtggtctgagctttctcactccaagccagtcgtgtgggaagggacactctctgagcctcagtttcctcagctgtcaacctctcagggcttgttctagtggctccgaaagccagtgggagcaagcgcgctttgcaaagccttgggcgccgggccttggcgcgcctttgccggatccttccggccacgggcggggcgagcccagaggagaagagccgaggggcggtgcccgggccagggggcggaggcaggcggctctggctccctctcgggacgctctttccttcttcctcttgttcctcctcctgcctctcttcgcttcgcctgcaaacgcggtgggggctgctcggcggtcaggagcaggttaccctccgtctgcatgcccaccatcaaggcaagagacagagcgacatgagagattggaccgcgggctgcactggagaatttactggtaggataattcatccctaaagagattgaagtgagcttcagaatggcaaaagaggagccccagagtatctcaagggacttgcaggaactgcagaagaagctgtctctgctgatagactccttccagaataactcaaagctgccccaacacagcaggatctcactggactctgatgatggagtgtccaggctgggcagtgctggctccaaggtggtggcctttatgaagtctccagtgggtcagtacttggacagccatccgtttctggccttcaccttgctggtgttcattgtcatgtcggccgttcctgttggattcttcctgctcatcgtggtgcttaccaccctggctgctctgctgggggtcataatattggaaggattggtcatctctgtgggtggcttctcactgctctgcatcctctgtggtttgggcttcgtatcactcgccatgtcggggatgatgatagcatcttatgtagtggtctccagcctcatcagctgctggttttctcccaggccactgacacagcaaaacaccagttgtgactttctgccagccatgaagtctgcagacttcgaggggctttaccaggaatgagtgactgctcagaggccgggcttcttttcaagtactgctggatcatactcaccccttgggattatggcttagaagaagggggctgggtaggcaagcactccttggctgtgtcctctcgctttttcacttacttgtaggatcccgcagcagccaatttagggattgtgttgttcttgtgttggttcccatgtaaagaagcagcagagaaatgcgatggttcaacagctcgccctgccccaagtatgcagacttgaccttggcggggtcctgggcttctagagtctagcccgttgaccccaaagcctcagggcttatgtccaacggtcccattgggagcaacagtgattgtttatagttttttgttttcagaaatgagggcagctgttaattttttcactcatgtgaaacaaaatgaaaaaaaaaatccaaaacagaacaagcccttctgtggtatttgctttttatcagaaagaacagcaacatttggcctctccaagttggaaaatagagtccaaatgtaactttgtggccaagagtattttcaaaaaagtctaaaggtgtagtttccactgtaactgttgagtactgttaagtactgttaatcttttacatatttgcacttggtactgttgtattgttctaaagagcttgtcctttaagtaatttctttcttttttttttttttttttttgtgacggagtttccctcttgttgcccaggctggagtgcaacggtgcagtctcggctcactgcaacctccaactcccaggttcaagtgagtctcgtgcctcagcctcccaagtagctgggattacaggcacccgccaccgtgcccggctagtttttttttgtattttttttagtacagatggggtttcaccatgttggtcaggctagtctcaaactcctgacctcaggtgctccacctgccttggcctcccaaagtgctgggattacaggcgtgagccactgtgcccagcctaagccatttcttaaaataaaaatgctaaaggactagtaagtaaaaataaaacttcctatgggatttcccagtggaattac

SEQ ID NO: 403580 - DNA, 2225 bp, Homo sapiens
tgtcttgaaggtggtctgagctttctcactccaagccagtcgtgtgggaagggacactctctgagcctcagtttcctcagctgtcaacctctcagggcttgttctagtggctccgaaagccagtgggagcaagcgcgctttgcaaagccttgggcgccgggccttggcgcgcctttgccggatccttccggccacgggcggggcgagcccagaggagaagagccgaggggcggtgcccgggccagggggcggaggcaggcggctctggctccctctcgggacgctctttccttcttcctcttgttcctcctcctgcctctcttcgcttcgcctgcaaacgcggtgggggctgctcggcggtcaggagcaggcaagagacagagcgacatgagagattggaccgcgggctgcactggagaatttactggtaggataattcatccctaaagagattgaagtgagcttcagaatggcaaaagaggagccccagagtatctcaagggacttgcaggaactgcagaagaagctgtctctgctgatagactccttccagaataactcaaagctgccccaacacagcaggatctcactggactctgatgatggagtgtccaggctgggcagtgctggctccaaggtggtggcctttatgaagtctccagtgggtcagtacttggacagccatccgtttctggccttcaccttgctggtgttcattgtcatgtcggccgttcctgttggattcttcctgctcatcgtggtgcttaccaccctggctgctctgctgggggtcataatattggaaggattggtcatctctgtgggtggcttctcactgctctgcatcctctgtggtttgggcttcgtatcactcgccatgtcggggatgatgatagcatcttatgtagtggtctccagcctcatcagctgctggttttctcccaggtctcacgagatctgatggttttataaagggcatttcccctgcacatgctctcttgcctgccgccatgtaagaagtgcctctgatcttcctttgccttccaccatgattgtgaggcctccccagccatgtggaattgccactgacacagcaaaacaccagttgtgactttctgccagccatgaagtctgcagacttcgaggggctttaccaggaatgagtgactgctcagaggccgggcttcttttcaagtactgctggatcatactcaccccttgggattatggcttagaagaagggggctgggtaggcaagcactccttggctgtgtcctctcgctttttcacttacttgtaggatcccgcagcagccaatttagggattgtgttgttcttgtgttggttcccatgtaaagaagcagcagagaaatgcgatggttcaacagctcgccctgccccaagtatgcagacttgaccttggcggggtcctgggcttctagagtctagcccgttgaccccaaagcctcagggcttatgtccaacggtcccattgggagcaacagtgattgtttatagttttttgttttcagaaatgagggcagctgttaattttttcactcatgtgaaacaaaatgaaaaaaaaaatccaaaacagaacaagcccttctgtggtatttgctttttatcagaaagaacagcaacatttggcctctccaagttggaaaatagagtccaaatgtaactttgtggccaagagtattttcaaaaaagtctaaaggtgtagtttccactgtaactgttgagtactgttaagtactgttaatcttttacatatttgcacttggtactgttgtattgttctaaagagcttgtcctttaagtaatttctttcttttttttttttttttttttgtgacggagtttccctcttgttgcccaggctggagtgcaacggtgcagtctcggctcactgcaacctccaactcccaggttcaagtgagtctcgtgcctcagcctcccaagtagctgggattacaggcacccgccaccgtgcccggctagtttttttttgtattttttttagtacagatggggtttcaccatgttggtcaggctagtctcaaactcctgacctcaggtgctccacctgccttggcctcccaaagtgctgggattacaggcgtgagccactgtgcccagcctaagccatttcttaaaataaaaatgctaaaggactagtaagtaaaaataaaacttcctatgggatttcccagtggaattac

SEQ ID NO: 403581 - DNA, 469 bp, Homo sapiens
ctttctgtacatcagttttctcatacaatggaaaatggtatgtcagttagaatgactttgctacacatagtaaagcgtctcccacagaaagattaaacaatgagaatgtttatactcttgcacaaaaattcagtgacaggtggtacttcagtgtatctgctttgtcctcacgctggctcctcttctgaccccacggttactccttttcaggcatcctgtgcaggtacaaccatgaacagcagcagaaggcctgtctctttccagggtatttgttaaagaataaagaaacctttctcagaaacttctcagcaaccttctcatcacctttcattggctagaatcttatctgttgttatgtccaagaatttcctttcaagggcaattgcaaaacaatgacctttcagaattacccctattgctgaaggatggagacatggagacataagttttgtatgggaagtaaacacta

SEQ ID NO: 403582 - DNA, 2014 bp, Homo sapiens
  misc_feature (1755)..(1755): n is a, c, g, or t
  misc_feature (1778)..(1778): n is a, c, g, or t
  misc_feature (1798)..(1798): n is a, c, g, or t
  misc_feature (1853)..(1853): n is a, c, g, or t
  misc_feature (1859)..(1859): n is a, c, g, or t
  misc_feature (1864)..(1864): n is a, c, g, or t
  misc_feature (1868)..(1868): n is a, c, g, or t
  misc_feature (1894)..(1894): n is a, c, g, or t
  misc_feature (1936)..(1936): n is a, c, g, or t
  misc_feature (1947)..(1947): n is a, c, g, or t
  misc_feature (1972)..(1972): n is a, c, g, or t
aggtcataggtcatttttgcagcttattgtgatgacaacagtggaggatggtcttccacttcaccttaaaagcggctgttctctgattatcattaagcatggccacgcccgcacttaacttctgacagtggggaaagcagctgtgtgtgatagcttggaaggtttactgctgcctcaagtcctcttctctgcagttgaggtttcaggtttcaatcctcccaataccacaagacagagcacggggcggctgccgcctccgcctccgcgccttaacctaggcggcttgccgaagatctcagccccgcggccgcgcgctcgccctgccctagaccagggttgggcgcagcggcggaggtggcttctgggctgcgcgagctgggagagctgggaggcggcgatcgcagctgggccgggacttccttcctccaccgcacggcaacaaaacaaccctgcggcaggcactgagtgcttcgcagctgtctgggcgagaggcacagcgatgggctccgtgctgagcaccgacagcggcaaatcggcgcccgcctctgccaccgcgcgggccctggagcgcaggagggacccggagttgcccgtcacgtccttcgactgcgccgtgtgccttgaggtgttacaccagcctgtccggacccgctgtggccacgtattctgccgttcctgtattgctaccagtctaaagaacaacaagtggacctgtccttattgccgggcatatcttccttcagaaggagttccagcaactgatgtagccaaaagaatgaaatcagagtataagaactgcgctgagtgtgacaccctggtttgcctcagtgaaatgagggcacatattcggacttgtcagaagtacatagataagtatggaccactacaagaacttgaggagacagcagcaaggtgtgtatgtcccttttgtcagagggaactgtatgaagacagcttgctggatcattgtattactcatcacagatcggaacggaggcctgtgttctgtccactttgccgtttaatacccgatgagaatccaagcagcttcagtggcagtttaataagacatctgcaagttagtcacactttgttttatgatgatttcatagattttaatataattgaggaagctcttatccgaagagtcttagaccggtcacttcttgaatatgtgaatcactcgaacaccacataattttattaaaacgaagggaaaagggaccactgaattgcaccatttaagatgctgcttgaacaaatgggagggaagttgtcaatgattgatgggcaaaaatgtacaacacagttatgtgtttgtccatgtttattgttatagtgcatttaaaaactgctttaattttaatggtttaaatctgttttacatccttgagattcttacacatctaacaacaaaaaaaattatctacatcagtcattgttacatggaaaagacaggtggtaggcaagtaggtggaggatctcggtttgcaaattagataatactctgtgtataatgctacatatcaataactaccatcatggttaggcacgataactaatctttgttctgtgtaaaaaaatatggagagtgaaacaaagtgcagacattcaaagaaataagaaatctgctccaatgctcttgttctaatctctaataggttaacgttaataatcttgtatgggagttggaaaggaaaattttggaagtcaagaaagtccatttaggccggacgcggtggcttacgcttgtantcccagcactttgggaggctgangcaggcggatcacagggtcnggagttcgagaccagcctggccaacactggtctctgtgaaactccgtctctactnaaaatncaaanattngctggacgtgttggcgggcatctgtnataccagctacttgggaggctgaggcagaagaatcgcttgancccgggaggcngaggttgcagtgagctgagatcgcnccagtacactccagcctgggtaacagagctagactccatctc

SEQ ID NO: 403583 - DNA, 1297 bp, Homo sapiens
  misc_feature (1038)..(1038): n is a, c, g, or t
  misc_feature (1061)..(1061): n is a, c, g, or t
  misc_feature (1081)..(1081): n is a, c, g, or t
  misc_feature (1136)..(1136): n is a, c, g, or t
  misc_feature (1142)..(1142): n is a, c, g, or t
  misc_feature (1147)..(1147): n is a, c, g, or t
  misc_feature (1151)..(1151): n is a, c, g, or t
  misc_feature (1177)..(1177): n is a, c, g, or t
  misc_feature (1219)..(1219): n is a, c, g, or t
  misc_feature (1230)..(1230): n is a, c, g, or t
  misc_feature (1255)..(1255): n is a, c, g, or t
cacagtatgaccttacttgaaagttaaaaggctggatcgcataagctttcattgagcccttttttaacagtgagtttattttgaatttgtttttatgtaggtttgcctcagtgaaatgagggcacatattcggacttgtcagaagtacatagataagtatggaccactacaagaacttgaggagacagcagcaaggtgtgtatgtcccttttgtcagagggaactgtatgaagacagcttgctggatcattgtattactcatcacagatcggaacggaggcctgtgttctgtccactttgccgtttaatacccgatgagaatccaagcagcttcagtggcagtttaataagacatctgcaagttagtcacactttgttttatgatgatttcatagattttaatataattgaggaagctcttatccgaagagtcttagaccggtcacttcttgaatatgtgaatcactcgaacaccacataattttattaaaacgaagggaaaagggaccactgaattgcaccatttaagatgctgcttgaacaaatgggagggaagttgtcaatgattgatgggcaaaaatgtacaacacagttatgtgtttgtccatgtttattgttatagtgcatttaaaaactgctttaattttaatggtttaaatctgttttacatccttgagattcttacacatctaacaacaaaaaaaattatctacatcagtcattgttacatggaaaagacaggtggtaggcaagtaggtggaggatctcggtttgcaaattagataatactctgtgtataatgctacatatcaataactaccatcatggttaggcacgataactaatctttgttctgtgtaaaaaaatatggagagtgaaacaaagtgcagacattcaaagaaataagaaatctgctccaatgctcttgttctaatctctaataggttaacgttaataatcttgtatgggagttggaaaggaaaattttggaagtcaagaaagtccatttaggccggacgcggtggcttacgcttgtantcccagcactttgggaggctgangcaggcggatcacagggtcnggagttcgagaccagcctggccaacactggtctctgtgaaactccgtctctactnaaaatncaaanattngctggacgtgttggcgggcatctgtnataccagctacttgggaggctgaggcagaagaatcgcttgancccgggaggcngaggttgcagtgagctgagatcgcnccagtacactccagcctgggtaacagagctagactccatctc

SEQ ID NO: 403584 - DNA, 1338 bp, Homo sapiens
  misc_feature (1079)..(1079): n is a, c, g, or t
  misc_feature (1102)..(1102): n is a, c, g, or t
  misc_feature (1122)..(1122): n is a, c, g, or t
  misc_feature (1177)..(1177): n is a, c, g, or t
  misc_feature (1183)..(1183): n is a, c, g, or t
  misc_feature (1188)..(1188): n is a, c, g, or t
  misc_feature (1192)..(1192): n is a, c, g, or t
  misc_feature (1218)..(1218): n is a, c, g, or t
  misc_feature (1260)..(1260): n is a, c, g, or t
  misc_feature (1271)..(1271): n is a, c, g, or t
  misc_feature (1296)..(1296): n is a, c, g, or t
gatggtctcgatctcctgacctcgtgatccgcccgcctcggcctcccaaagtgctgggattacaggcgtgagccaccgcgcccggccgtatatgctttttagaagaaccaaattcaagaacttaacagttggatcttctaagtttgcctcagtgaaatgagggcacatattcggacttgtcagaagtacatagataagtatggaccactacaagaacttgaggagacagcagcaaggtgtgtatgtcccttttgtcagagggaactgtatgaagacagcttgctggatcattgtattactcatcacagatcggaacggaggcctgtgttctgtccactttgccgtttaatacccgatgagaatccaagcagcttcagtggcagtttaataagacatctgcaagttagtcacactttgttttatgatgatttcatagattttaatataattgaggaagctcttatccgaagagtcttagaccggtcacttcttgaatatgtgaatcactcgaacaccacataattttattaaaacgaagggaaaagggaccactgaattgcaccatttaagatgctgcttgaacaaatgggagggaagttgtcaatgattgatgggcaaaaatgtacaacacagttatgtgtttgtccatgtttattgttatagtgcatttaaaaactgctttaattttaatggtttaaatctgttttacatccttgagattcttacacatctaacaacaaaaaaaattatctacatcagtcattgttacatggaaaagacaggtggtaggcaagtaggtggaggatctcggtttgcaaattagataatactctgtgtataatgctacatatcaataactaccatcatggttaggcacgataactaatctttgttctgtgtaaaaaaatatggagagtgaaacaaagtgcagacattcaaagaaataagaaatctgctccaatgctcttgttctaatctctaataggttaacgttaataatcttgtatgggagttggaaaggaaaattttggaagtcaagaaagtccatttaggccggacgcggtggcttacgcttgtantcccagcactttgggaggctgangcaggcggatcacagggtcnggagttcgagaccagcctggccaacactggtctctgtgaaactccgtctctactnaaaatncaaanattngctggacgtgttggcgggcatctgtnataccagctacttgggaggctgaggcagaagaatcgcttgancccgggaggcngaggttgcagtgagctgagatcgcnccagtacactccagcctgggtaacagagctagactccatctc

SEQ ID NO: 403585 - DNA, 1155 bp, Homo sapiens
aggtcataggtcatttttgcagcttattgtgatgacaacagtggaggatggtcttccacttcaccttaaaagcggctgttctctgattatcattaagcatggccacgcccgcacttaacttctgacagtggggaaagcagctgtgtgtgatagcttggaaggtttactgctgcctcaagtcctcttctctgcagttgaggtttcaggtttcaatcctcccaataccacaagacagagcacggggcggctgccgcctccgcctccgcgccttaacctaggcggcttgccgaagatctcagccccgcggccgcgcgctcgccctgccctagaccagggttgggcgcagcggcggaggtggcttctgggctgcgcgagctgggagagctgggaggcggcgatcgcagctgggccgggacttccttcctccaccgcacggcaacaaaacaaccctgcggcaggcactgagtgcttcgcagctgtctgggcgagaggcacagcgatgggctccgtgctgagcaccgacagcggcaaatcggcgcccgcctctgccaccgcgcgggccctggagcgcaggagggacccggagttgcccgtcacgtccttcgactgcgccgtgtgccttgaggtgttacaccagcctgtccggacccgctgtggccacgtattctgccgttcctgtattgctaccagtctaaagaacaacaagtggacctgtccttattgccgggcatatcttccttcagaaggagttccagcaactgatgtagccaaaagaatgaaatcagagtataagaactgcgctgagtgtgacaccctggtgtgtatgtcccttttgtcagagggaactgtatgaagacagcttgctggatcattgtattactcatcacagatcggaacggaggcctgtgttctgtccactttgccgtttaatacccgatgagaatccaagcagcttcagtggcagtttaataagacatctgcaagttagtcacactttgttttatgatgatttcatagtaagtatattttcttatttttacattatgttttcatgctgtcttgttaagcttacctttccgatccaagtgaataaaattatagaggaaaaaatgtgtatatagctatagtgttgagtattagcattaagtaagaaat

SEQ ID NO: 403586 - DNA, 1506 bp, Homo sapiens
gatcaagttcatggaagtatatgctttttaaaaatcaaagggagactttgtgaccaacagggtcactgctgtagcaaaatataaaatatgccatggttaaagcagtaatgattttcttttgggtggggttcctagagattccaagaagacatcatgaaatatgtgagtgaaacatatcaccagtgaagttctgtctgcccggcactaactttttacttggcttgagttgtaggaggaacagacacctttacatattgcctcccgcctgggtaagacagaaattgtccagctgcttctacaacatatggctcatccagatgcggccactacaaatgggtacacaccactgcacatctctgcccgggagggccaggtggatgtggcatcagtcctattggaagcaggagcagcccactccttagctaccaaggtaaggagaatgacatcatgagaacatggaccaagaggattcctaagtcatggcctttctgctctaccacatacagaatcaagagggtagatctcctcaggccttgacttacttccttctctacatatttaagactcattgtctaaatgatttaatagaattgtgagattccgtatatcttcaataaagagtgctgaatttcattctaattaatgccaatgtttctaggacaggtatctagtactctaagatgattttcactttttcttctcttttattataaaatccataatatattcttaagaaaaagataaatgaaatccctaaatatattgaactggtaatactaatgaggaagagggtactgcattagattggcagtactatatttgctgtgagttatagtaccagatcgaagctcaatttacttgtacattttcgcaaccctactattagccaccacttatttgacattctcattcccatattagtttccaactttaccaactacacttttgcctgggtatttacagtgtttaaagagagctgaagctggaaaatcacacttctttagttgttattgacatcgagcaaagaattttacttatgttccaagtttcatgacagggcagagtaatttttcccatgctttatacatgctgtttgacattcataatttggagatgacttagaataaaacatgaatatactcagctaattagagcaaaattaattgagccagtgcaagtgaatttgtcatggggcaaaataattcccacaaatgtaacagtgattcagattaatgaaaggacaatttcaattctctcataatcagtaggtataagtacttcatccagggagagggaaagttgcaaatttaaactgagatagtgatgtggcatctgtcctcttgtaagtaggagcagcccactagctgttatggcttatctggttgcctgttatgacttacctggttgcctatggctgtaaaaggtattttgatataagaaattgacaattattgaagttctgaactctgaaaagttggaaggattttaaaagttcttaaaaaaaaa

SEQ ID NO: 403587 - DNA, 717 bp, Homo sapiens
cataagagttccatgttgcaatcagtcttttaaaagccaaaattaccttttgcctttggcactgctatctgataccttaaatggagtattttgctaccaaatgaaactaaataggacaagaaagagctgctcatctctttattgcaccatcattgatactaaacttttccacaaaagggtaatgtttctctttaacctcaggggcacatgtgagtcattgctctttcagatcctaactatccagtgatatctattaagtcaccacttgtacctttaacacagtttctattcagtcctcctggcctcccgcaaggactgcattagtctagtcaaccagtagtgctgctgccgaagttacctattcttcatgcttgactctaagaacctcttcctttctttcttcttgttttctaggcatagggatttccagctttacaacatgctatgaattatcctcctctgtgttaacacttgtgttaacctcatccgaagtcctgggggatgtcctgttcaacctgccatttcacccatagtagagttggtccacagtgaaaagtggtgaaaagactgaagtctttataccacttgcatatattgttcctgatcctgcgtgtacatttcagagaactggtgaataaactctccgctccatgcctttctgctcagagaggttacatcttatattctccaaatttaaattaaaatgtagcttccttc

SEQ ID NO: 403588 - DNA, 442 bp, Homo sapiens
ctgtacaggcggcacggtttgatggcagagatattttctttccaaactgttcaaaatgatgaacgaagatgcagctcagaaaagcgacagtggagagaagttcaacggcagtagtcagaggagaaaaagacccaagaaggcatagggatttccagctttacaacatgctatgaattatcctcctctgtgttaacacttgtgttaacctcatccgaagtcctgggggatgtcctgttcaacctgccatttcacccatagtagagttggtccacagtgaaaagtggtgaaaagactgaagtctttataccacttgcatatattgttcctgatcctgcgtgtacatttcagagaactggtgaataaactctccgctccatgcctttctgctcagagaggttacatcttatattctccaaatttaaattaaaatgtagcttccttc

SEQ ID NO: 403589 - DNA, 207 bp, Homo sapiens
ctgtacaggcggcacggtttgatggcagagatattttctttccaaactgttcaaaatgatgaacgaagatgcagctcagaaaagcgacagtggagagaagttcaacggcagtagtcagaggagaaaaagacccaagaaggtaaatcgccggaattaggaatgtctgtgtataaatatgtatgtgtgtgcatgtgtgagtgtgtaata

SEQ ID NO: 403590 - DNA, 14206 bp, Homo sapiens
ctgtacaggcggcacggtttgatggcagagatattttctttccaaactgttcaaaatgatgaacgaagatgcagctcagaaaagcgacagtggagagaagttcaacggcagtagtcagaggagaaaaagacccaagaagtctgacagcaatgcaagcttcctccgtgctgccagagcaggcaacctggacaaagttgtggaatatctgaaggggggcatagacatcaatacctgcaatcagaatggactcaacgctctccatctggctgccaaggaaggccacgtggggctggtgcaggagctgctgggaagagggtcctctgtggattctgccactaagaagggaaataccgctcttcacattgcatctttggctggacaagcagaagttgtcaaagttcttgttaaggaaggagccaatattaatgcacagtctcagaatggctttactcctttatacatggctgcccaagagaatcacattgatgttgtaaaatatttgctggaaaatggagctaatcagagcactgctacagaggatggctttactcctctagctgtggcactccagcaaggacacaaccaggcggtggccatcctcttggagaatgacaccaaagggaaagtgaggctgccagctctgcatattgccgctaggaaagacgacaccaaatctgccgcacttctgcttcagaatgaccacaatgctgacgtacaatccaagatgatggtgaataggacaactgagagtggttttacccctttgcacatagctgcacattacggaaatgtcaacgtggcaactcttcttctaaaccggggagctgctgtggacttcacagccaggaatggaatcactcctctgcatgtggcttccaaaagaggaaatacaaacatggtgaagctcttactggatcgaggcggtcagatcgatgccaaaactagggatgggttgacaccacttcactgtgctgcacgaagtgggcatgaccaagtggtggaacttctgttggaacggggtgcccccttgctggcaaggactaagaatgggctgtctccactacacatggctgcccagggagaccacgtggaatgtgtgaagcacctgttacagcacaaggcacctgttgatgatgtcaccctagactacctgacagccctccacgttgctgcgcactgtggccactaccgtgtaaccaaactccttttagacaagagagccaatccgaacgccagagccctgaatggttttactccactgcacattgcctgcaagaaaaaccgcatcaaagtcatggaactgctggtgaaatatggggcttcaatccaagctataacagagtctggcctcacaccaatacatgtggctgccttcatgggccacttgaacattgtcctccttctgctgcagaacggagcctctccagatgtcactaacattcgtggtgagacggcactacacatggcagcccgagccgggcaggtggaagtggtccgatgcctcctgagaaatggtgcccttgttgatgccagagccagggaggaacagacacctttacatattgcctcccgcctgggtaagacagaaattgtccagctgcttctacaacatatggctcatccagatgcggccactacaaatgggtacacaccactgcacatctctgcccgggagggccaggtggatgtggcatcagtcctattggaagcaggagcagcccactccttagctaccaagaagggttttactcccctgcatgtagcagccaagtatggaagcctggatgtggcaaaacttctcttgcaacgccgtgctgccgcagattctgcagggaagaacggccttaccccgctccatgttgctgctcattatgacaaccagaaggtggcgctgctgttactggagaagggtgcttcccctcatgccactgccaagaatggctatactccgttacatattgctgccaagaagaatcaaatgcagatagcttccacactcctgaactatggagcagagacaaacattgtgacaaagcaaggagtaactccactccatctggcctcgcaggaggggcacacagatatggttaccttgcttctggataagggagccaatatccacatgtcaactaagagtggactcacatccttacaccttgcagcccaggaagataaagtgaatgttgctgatattctcaccaagcatggagctgatcaggatgctcatacaaagcttggttacacacctttaattgtggcctgtcactatggaaatgtgaaaatggtcaactttcttctgaagcagggagcaaatgttaacgcaaaaaccaagaacggctacacgcctttgcaccaggccgctcagcagggtcacacgcacatcatcaacgtcctgctccagcatggggccaagcccaacgccaccactgcgaatggcaacactgccttggcgattgctaagcgtctgggctacatctccgtggtcgacaccctgaaggttgtgactgaggaggtcaccaccaccaccacaactattacagaaaaacacaaactaaatgtacctgagacgatgactgaggttcttgatgtttctgatgaagagggtgatgacacaatgactggtgatgggggagaataccttaggcctgaggacctaaaagaactgggtgatgactcactacccagcagtcagttcctggatggtatgaattacctgcgatacagcttggagggaggacgatctgacagccttcgatccttcagttccgacaggtctcacactctgagccatgcctcctacctgagggacagtgccgtgatggatgactcagttgtgattcccagtcaccaggtgtcaactctagccaaggaggcagaaaggaattcttatcgcctaagctggggcactgagaacttagacaacgtggctctttcttctagtcctattcattcaggtttcctggttagttttatggtggatgcccgaggtggtgctatgcgaggatgcagacacaatgggctccgaatcattattccacctcggaaatgtactgctccaacgcgagtcacctgccgactggtcaagcgccacagactggcaacaatgcctccaatggtggaaggagaaggcctggccagtcgcctgatcgaagttggaccttctggtgctcagttccttggtaaacttcacctgccaacggctcctcccccacttaatgagggagaaagtttggtcagccgcattcttcagctggggcctcctggaaccaaattccttgggcctgtgatcgtggagatccctcactttgcggcccttcgaggaaaggaaagggaactggtggtcctgcgcagtgagaatggggacagctggaaagagcatttctgtgactacactgaagatgaattgaatgaaattcttaacggcatggatgaagtactggatagcccagaagacctagaaaagaaacgaatctgccgcatcatcacccgagacttcccacagtactttgcagtggtgtctcgtatcaaacaggacagcaatctgattggcccagaaggaggtgtactgagcagcacagtggtgccccaggtgcaggccgtcttcccagagggggcactcaccaagcggatccgcgtaggcctgcaggctcaacctatgcacagtgagctggttaagaagatcctaggcaacaaagctaccttcagccctatagtcactttggaacctagaagaagaaaattccacaaaccaattaccatgaccattcctgtccccaaagcttcaagtgatgtcatgttgaatggttttgggggagatgcaccaaccttaagattactatgcagcataacaggtggaaccacccctgcccagtgggaagatattacaggaactacgccattaacatttgtcaatgaatgtgtttcctttacaacaaacgtgtctgccaggttctggctgatagattgtcgacagatccaggaatccgttacttttgcatcacaagtatacagagaaattatctgcgtaccttatatggccaaatttgtagtgtttgccaaatcacatgaccccattgaagccaggttgaggtgtttctgcatgactgatgataaagtggataagacccttgaacaacaagaaaattttgctgaggtggccagaagcagggatgtggaggtgttagaaggaaaacccatctacgttgattgtttcggcaacttggtaccattaactaaaagtggccagcatcatatattcagtttttttgccttcaaagaaaatagacttcctctatttgtcaaggtacgcgatacgactcaggaaccttgcggacgactatcatttatgaaggagccaaaatccacgagaggcctggtgcatcaagctatttgcaacttaaacatcactttgccgatttatacaaaggaatcagagtcagatcaagaacaggaggaagagatcgatatgacatcagaaaaaaatgatgagacagaatctacagaaacatctgtcctgaaaagtcacctggttaatgaagttcctgtcctagcaagtccggacttgctctctgaagtttctgagatgaaacaagatttgatcaaaatgaccgccatcttgaccacagatgtgtctgataaggcaggttctattaaagtgaaggagctggtgaaggctgctgaggaagagccaggagagccttttgaaatcgttgaaagagttaaagaggacttagagaaagtgaatgaaatcctgagaagtggaacctgcacaagagatgaaagcagtgtgcagagctctcggtctgagagaggattagttgaagaggaatgggttattgtcagtgatgaggaaatagaagaggctaggcaaaaagcacctttagaaatcactgaatatccatgtgtagaagttagaatagataaagagatcaaaggaaaagtagagaaagactcaactgggctagtgaactaccttactgatgatctgaatacctgtgtgcctcttcccaaagagcagctgcagacagttcaagataaggcagggaagaaatgtgaggctctggctgttggcaggagctctgaaaaggaagggaaagacatacccccagatgagacacagagtacacagaaacagcacaaaccaagcttgggaataaagaagccagtaagaaggaaattaaaagaaaagcagaaacaaaaagaggaaggtttacaagctagtgcagagaaagctgaacttaaaaaaggtagttcagaagagtcattaggtgaagacccaggtttagcccctgaaccccttcccactgtcaaggccacatctcctttgatagaagaaactcccattggttccataaaggacaaagtaaaggcccttcagaagcgagtggaagatgaacagaaaggtcgaagcaagttgcccatcagagtcaaaggcaaggaggacgtgccaaaaaagaccacccacaggccacatccagctgcgtcaccctctctgaagtcagagagacatgcgccagggtctccctcccctaaaacagaaagacactctactctttcctcttccgcaaaaactgaaaggcaccctccagtatcaccatcaagtaaaactgagaaacactcacctgtgtcaccctctgcaaaaacggaaagacattcacctgcgtcatcatcgagtaaaactgagaaacactcacctgtatcaccctcgacaaaaactgaaaggcactctcctgtgtcatctacaaaaacagaaagacacccacctgtttcgccttcaggcaaaacagacaaacgtccacctgtatcgccctccgggaggacagaaaaacacccgccagtatcgcctgggagaacagaaaaacgcttgcctgtttcaccctccggaagaacggacaagcaccaacctgtatcaacagctgggaaaactgagaagcacctgcctgtgtcaccttctggcaaaacagaaaagcaaccacctgtatcccccacttcaaaaacagagaggattgaggaaaccatgtctgttcgggagctgatgaaggctttccagtcaggtcaggacccttctaaacataaaactggactctttgagcacaaatcagcaaaacaaaagcagccacaagagaaaggtaaagttcgggtagaaaaagaaaaggggccgatactaacccagagagaagctcagaaaacagagaatcagacaatcaaacgaggccagagactcccggtaacgggcacagcagaatccaaaagaggagttcgtgtttcctccataggagttaagaaagaagatgcagctggaggaaaggagaaagttctcagccacaaaatacctgaacctgttcagtcagtgcctgaagaagaaagccacagagagagcgaagtgcccaaagaaaagatggctgatgagcagggagacatggatctacagatcagcccagataggaaaacctccactgacttctctgaggtcattaagcaagagttggaagacaatgacaaataccaacaattccgcctgagtgaggagacagaaaaggcacagcttcacttagaccaagtactcactagtcctttcaacacaacatttccactcgactacatgaaagatgagttccttccagctctgtctttacaaagcggtgctttagatggcagttctgaaagcctaaagaatgagggggtagccggctctccgtgtggcagcctgatggaggggacccctcagattagttcagaagaaagctataagcatgaaggcctagcagagacccctgagacgagcccagaaagcctttctttctcaccaaagaaaagtgaggagcaaactggggaaacaaaggaaagcaccaagacagaaaccaccacagaaattcgttcagaaaaagagcatcccacgaccaaagacattactggtggctctgaagagcgaggtgccacagtcactgaggactcagagacctctactgagagttttcagaaagaggccactctaggctctcccaaagacacaagccctaaaagacaagatgattgcacaggcagctgtagtgtagcattagctaaagagacacctacaggactgactgaggaggcagcctgtgatgaaggtcaacgtacctttggtagttcagcccacaagacacaaactgatagtgaggctcaggaatccacagccacctcagacgagacaaaggccttgccgctgcctgaggcttctgtaaagacagatacaggaactgaatcaaaacctcagggagtcattagaagtccccaagggttagaacttgcactccctagccgagatagcgaagtcctcagcgctgtggctgatgactcattagcagtgagccacaaagactctctggaagccagccctgtgctagaagataactcttcacacaaaacccctgattctctggagccaagtcctctgaaagaatccccttgccgtgactctctggaaagcagccctgttgaaccaaagatgaaggctggaatttttccaagtcactttcctcttcctgcagctgttgccaaaacagaactcttgacggaagtggcctctgtgcggtcccggctactccgagaccctgatggcagtgctgaggatgacagtcttgagcagacatcgctcatggagagctcagggaagagccccctttctcctgacacccccagctctgaagaagtcagctatgaggttacacccaaaaccacagatgtaagtacaccaaaaccagctgtgattcatgaatgtgcagaggaggatgattcagaaaacggggagaaaaagaggttcacacctgaagaggagatgtttaaaatggtaaccaaaatcaaaatgtttgatgaacttgaacaagaagcaaagcagaaaagggactacaaaaaagaacccaaacaagaagaatcttcttcatcttctgacccagatgctgactgttcagtagatgtggatgaaccaaaacatacaggcagtggggaggatgaaagtggtgtccctgtgttagtaacttcggagagcaggaaggtgtcttcctcctcagaaagtgaacctgagttggcacagcttaaaaaaggtgctgactcaggccttttaccagaaccagtgattcgagtacaacctccttctccacttccatcaagcatggactccaattccagtccagaagaagtacaattccagcctgtcgtttccaaacaatatactttcaagatgaatgaagatactcaggaagagccaggcaaatcagaagaagaaaaagattctgaatcccatttagctgaagaccgtcatgctgtttccactgaggctgaagacaggtcttatgataagctaaacagagacactgatcagccaaaaatctgtgatggccatggatgtgaggccatgagtcctagcagctcagctcgtcctgtctcttcaggtctacagagtccgactggtgatgatgttgatgaacagccagtcatctataaagaatcattagctctccaaggcactcatgaaaaagacacagagggagaagagcttgatgtttctagagcagaatctccacaagcagattgccccagtgaaagcttttcatcttcatcctctttgcctcattgtttggtatctgaaggaaaagaattagatgaagacatatctgccacatcttctattcaaaaaacagaggtcacaaaaactgatgaaacatttgagaacttaccaaaggactgcccctctcaagactcatccattactactcaaacagatagattttccatggatgttcccgtgtctgacctagctgagaatgatgaaatctatgatccacaaatcactagcccttatgaaaatgtcccttcccaatcttttttctctagtgaagaaagcaaaacccaaacagatgcaaatcacaccacaagttttcactcttctgaagtgtattctgttaccatcacatcccctgttgaagacgttgtagtggcaagctcctctagtggaactgttttaagcaaagaatctaattttgagggccaggacataaaaatggaatcccaactggaaagtaccttgtgggaaatgcaatcagacagtgtctcttcatctttcgagcctactatgtccgctacaacaacagttgttggtgaacaaataagcaaagtcatcatcacaaaaactgatgtggattctgattcttggagtgaaattcgggaagacgatgaagcctttgaggctcgtgtgaaagaggaagaacaaaagatatttggtttgatggtagacagacaatcacagggtaccacccctgacaccactcctgctaggaccccaactgaagaggggaccccaacaagtgagcaaaacccatttctgtttcaggaaggaaaattgtttgaaatgacccgaagtggtgccattgatatgaccaaaaggtcctatgcagatgaaagttttcactttttccaaattggtcaagaatccagggaagagactctctctgaagatgtgaaagaaggggctactggggctgatcccctaccgctggagacatcagctgaatcactagcactttcagaatcaaaagaaacagtggatgatgaggcagacttacttccagatagcgtgagtgaggaagtagaggaaatacctgcttcggatgctcaacttaactcccaaatggggatttcagcctccactgaaacacctacaaaagaggctgttagtgtagggaccaaggacctccccaccgtgcaaacgggtgatatacctcctctctctggtgtaaagcagatatcctgccccgactcttctgaaccagctgtacaagtccagttagatttttccacactcaccaggtctgtttattcagataggggtgatgattctcccgattcttccccagaagaacagaaatcagtaatcgagattcctactgcacccatggagaatgtgccttttactgaaagcaaatccaaaattcctgtaaggactatgcccacttccaccccagcacctccatctgcagagtatgagagttcagtttctgaagattttctatccagtgtagatgaggaaaataaggcggatgaagcaaaaccaaagtccaaactccctgtcaaagtacccctccaaagagttgaacagcagctctcagatctagacacctctgtccagaagacagtggctcctcagggacaggacatggcaagcatcgcaccagataatagaagcaaatctgaatctgatgctagttctttggattcaaagaccaaatgcccagtaaaaacccgaagttacactgagacagaaacagagagcagagagagggccgaggaacttgagttagaatcagaagaaggggccacaagaccaaagatacttacatcccgattgccagttaagagcagaagcactacatcttcctgcagggggggcacgagccccacaaaagaaagtaaggagcatttctttgacctttacagaaattccatagaattctttgaggagattagtgatgaggcttccaaattagtggataggctgacacagtcagagagggagcaggaaatagtttcagacgatgaaagtagtagtgccctggaagtatcagtaattgaaaatctgccacctgttgagaccgagcactcagttcctgaggacatctttgacacaaggcccatttgggatgagtctattgagactctgattgaacgcatccctgatgaaaatggccatgaccatgctgaagatccacaggatgagcaggaacggatcgaggaaaggctggcttatattgctgatcaccttggcttcagctggacagaattagcaagagaactggatttcactgaggagcaaattcatcaaattcgaattgaaaatcccaactctcttcaagaccagagtcatgcactgttgaagtactggctagagagggatgggaaacatgctacagataccaacctcgttgaatgtctcaccaagatcaaccgaatggatattgttcatctcatggagaccaacacagaacctctccaggagcgcatcagtcatagttatgcagaaattgaacagaccattacactggatcatagtgaagggttctcggtacttcaagaggagttatgcactgcacagcacaagcagaaagaggagcaagctgtttctaaagaaagtgagacctgcgatcaccctcctatcgtctcagaggaagacatttctgttggttattccacttttcaggatggcgtccccaaaactgagggggacagctcagcaacagcactctttccccaaactcacaaggagcaagttcaacaggatttctcagggaaaatgcaagacctgcctgaagagtcatctctggaatatcagcaggaatattttgtgacaactccaggaacagaaacatcagagactcagaaggctatgatagtacccagctctcccagcaagacacctgaggaagttagcacccctgcagaggaggagaagctgtacctccagaccccaacatccagcgagcggggaggctctcccatcatacaagaacccgaagagccctcagagcacagagaggagagctctccgcggaaaaccagcctcgtaatagtggagtctgccgataaccagcctgagacctgtgaaagactcgatgaagatgcagcttttgaaaagggagacgatatgcctgaaatacccccagaaacagtcacagaagaagaatacattgatgagcatggacacaccgtggtaaagaaggttactaggaaaatcattaggcggtatgtatcctctgaaggcacagagaaagaagagattatggtgcagggaatgccacaggaacctgtcaacatcgaggaaggggatggctattccaaagttataaagcgtgttgtattgaagagtgacaccgagcagtcagaggacaacaatgagtaaagccatcacacagaagagggctgtggtgaaggaccagcatggaaaacgcattgacttggagcacctggaggatgtaccagaagcactagaccaggacgacctccagcgcgatctccagcagctccttcggcatttctgcaaggaggacttgaagcaagaggccaagtgaggggctgcccagttctcacaccagaaaccacacattcactcaatatgcagcttcctgtttcagtaggggagtgacctaactggcctaattaatgggataccccgacatttccactgttagcaaatatacggcattttgctttagttttcccccatcctctttaactataaagctaatttgtgaccaaagatggcatccttcatactggatgctgtatccaatactttgttgtgtctgtgctaacctgggaactggccacctccattgttctttgcttctgcacaagatccatgaaaatccattgatcagaagaacttcacctgcagacctcttcaagtgacactatgtaggaatccttccaaggaatatctatgtacaatgtatatagctgaaatgctcagatgaacaacatattaaaattaaaaccactgcctattgtaactacactgggcatcagaataaaaggcctctagaaattgctgaacaatggttaattaagatattgctaacacaatcgagtgataatacagttttactgcaaaagaagcacttcaaacctattatgtccttagaacttccagagtagccactgctcccagttaaaggtgggtcagtagccttgcagaactgtcctgagaagttattgctggtgctggccagccatggcttaggactccaacagccactctgagggaggggagaagggagcagaggccacgcagaatgaaccgatggggtattcagttgctggcagctacattgtgtggcattctagcatcttcaggtctttagatcttggacaagttggcagggtattttaaaagctataactactgtagttttccagttttcattgctgctttagcaaaccacgctgtcttacagtggtactttcttctggccactgcactgtagataattcattggaaacaagatttacccactacataaaaggttaaactccttcagtatgttggagtggtttctttttttttttctttctttcttttttttcttcaggtttatatcttctctaatacctgcatgtggcgtttaaaaatcaagaccacggtcaaacccctcttctaatcacattaattgtttccattctttttaccctgagtgagcacttttcactttccagctaggtctgtttttcagcttgcagacaagattgagaaatccttgaaaatttggttttggttaaaatttttggtttatttatttgaaatccacactcccttggaaactcttaagtgcatttgtgcacttctgtttgtttgtctcaaagaagggactgtaacaatctgagtaatttccatgtcctcttccttattcctctagtggttgaagctgtgtagcattttaacatatatatattcacaaatatattcatataaacagtatacattttgaatcagtcatttgttaaagaaaagtatattcaatgaagatgaaatttaaataaaaaaggacagagtctatcctccagggattgaacattttccaattatctggtcttttcctgttgtgcaaaaatgactcattgctccgaatgtcaaaaacaaatgcgacaaacaatggcacttcatcatttaaagtaatgttgccaagagaaaaaatttcctgggagggaggtttcccacaagccaaatctcctaagcctcaaatgctagcactttttggcagttggataggaaatgagacattctttggcagccaaaataagagaggccgatggtgaaactttttgagacaccctatggccttcttgtcaaaaccttcactggagctcaagaaaagcatttctgttgtgttatttgcagtgcagatgatgtctgtgtaacaacataatggttattcacctttttttgattttgatttttgctgtgttatcaaaaacttgaatactgtgagaagaagtgaattttcagttgacgaatcagcatcttgttcccatggtgataacactaattgaatatatctatgagggcatgtattagttaatggaaaaaaaaatacaacactaacaatacatagctgcaatgtgtacaatggctgatttaattaaataaaatgtacaagtgttaaatgtgaaaaaaaaaaat

SEQ ID NO: 403591 - DNA, 14077 bp, Homo sapiens
ctgtacaggcggcacggtttgatggcagagatattttctttccaaactgttcaaaatgatgaacgaagatgcagctcagaaaagcgacagtggagagaagttcaacggcagtagtcagaggagaaaaagacccaagaagtctgacagcaatgcaagcttcctccgtgctgccagagcaggcaacctggacaaagttgtggaatatctgaaggggggcatagacatcaatacctgcaatcagaatggactcaacgctctccatctggctgccaaggaaggccacgtggggctggtgcaggagctgctgggaagagggtcctctgtggattctgccactaagaagggaaataccgctcttcacattgcatctttggctggacaagcagaagttgtcaaagttcttgttaaggaaggagccaatattaatgcacagtctcagaatggctttactcctttatacatggctgcccaagagaatcacattgatgttgtaaaatatttgctggaaaatggagctaatcagagcactgctacagaggatggctttactcctctagctgtggcactccagcaaggacacaaccaggcggtggccatcctcttggagaatgacaccaaagggaaagtgaggctgccagctctgcatattgccgctaggaaagacgacaccaaatctgccgcacttctgcttcagaatgaccacaatgctgacgtacaatccaagatgatggtgaataggacaactgagagtggttttacccctttgcacatagctgcacattacggaaatgtcaacgtggcaactcttcttctaaaccggggagctgctgtggacttcacagccaggaatggaatcactcctctgcatgtggcttccaaaagaggaaatacaaacatggtgaagctcttactggatcgaggcggtcagatcgatgccaaaactagggatgggttgacaccacttcactgtgctgcacgaagtgggcatgaccaagtggtggaacttctgttggaacggggtgcccccttgctggcaaggactaagaatgggctgtctccactacacatggctgcccagggagaccacgtggaatgtgtgaagcacctgttacagcacaaggcacctgttgatgatgtcaccctagactacctgacagccctccacgttgctgcgcactgtggccactaccgtgtaaccaaactccttttagacaagagagccaatccgaacgccagagccctgaatggttttactccactgcacattgcctgcaagaaaaaccgcatcaaagtcatggaactgctggtgaaatatggggcttcaatccaagctataacagagtctggcctcacaccaatacatgtggctgccttcatgggccacttgaacattgtcctccttctgctgcagaacggagcctctccagatgtcactaacattcgtggtgagacggcactacacatggcagcccgagccgggcaggtggaagtggtccgatgcctcctgagaaatggtgcccttgttgatgccagagccagggaggaacagacacctttacatattgcctcccgcctgggtaagacagaaattgtccagctgcttctacaacatatggctcatccagatgcggccactacaaatgggtacacaccactgcacatctctgcccgggagggccaggtggatgtggcatcagtcctattggaagcaggagcagcccactccttagctaccaagaagggttttactcccctgcatgtagcagccaagtatggaagcctggatgtggcaaaacttctcttgcaacgccgtgctgccgcagattctgcagggaagaacggccttaccccgctccatgttgctgctcattatgacaaccagaaggtggcgctgctgttactggagaagggtgcttcccctcatgccactgccaagaatggctatactccgttacatattgctgccaagaagaatcaaatgcagatagcttccacactcctgaactatggagcagagacaaacattgtgacaaagcaaggagtaactccactccatctggcctcgcaggaggggcacacagatatggttaccttgcttctggataagggagccaatatccacatgtcaactaagagtggactcacatccttacaccttgcagcccaggaagataaagtgaatgttgctgatattctcaccaagcatggagctgatcaggatgctcatacaaagcttggttacacacctttaattgtggcctgtcactatggaaatgtgaaaatggtcaactttcttctgaagcagggagcaaatgttaacgcaaaaaccaagaacggctacacgcctttgcaccaggccgctcagcagggtcacacgcacatcatcaacgtcctgctccagcatggggccaagcccaacgccaccactgcgaatggcaacactgccttggcgattgctaagcgtctgggctacatctccgtggtcgacaccctgaaggttgtgactgaggaggtcaccaccaccaccacaactattacagaaaaacacaaactaaatgtacctgagacgatgactgaggttcttgatgtttctgatgaagagggtgatgacacaatgactggtgatgggggagaataccttaggcctgaggacctaaaagaactgggtgatgactcactacccagcagtcagttcctggatggtatgaattacctgcgatacagcttggagggaggacgatctgacagccttcgatccttcagttccgacaggtctcacactctgagccatgcctcctacctgagggacagtgccgtgatggatgactcagttgtgattcccagtcaccaggtgtcaactctagccaaggaggcagaaaggaattcttatcgcctaagctggggcactgagaacttagacaacgtggctctttcttctagtcctattcattcaggtttcctggttagttttatggtggatgcccgaggtggtgctatgcgaggatgcagacacaatgggctccgaatcattattccacctcggaaatgtactgctccaacgcgagtcacctgccgactggtcaagcgccacagactggcaacaatgcctccaatggtggaaggagaaggcctggccagtcgcctgatcgaagttggaccttctggtgctcagttccttggtaaacttcacctgccaacggctcctcccccacttaatgagggagaaagtttggtcagccgcattcttcagctggggcctcctggaaccaaattccttgggcctgtgatcgtggagatccctcactttgcggcccttcgaggaaaggaaagggaactggtggtcctgcgcagtgagaatggggacagctggaaagagcatttctgtgactacactgaagatgaattgaatgaaattcttaacggcatggatgaagtactggatagcccagaagacctagaaaagaaacgaatctgccgcatcatcacccgagacttcccacagtactttgcagtggtgtctcgtatcaaacaggacagcaatctgattggcccagaaggaggtgtactgagcagcacagtggtgccccaggtgcaggccgtcttcccagagggggcactcaccaagcggatccgcgtaggcctgcaggctcaacctatgcacagtgagctggttaagaagatcctaggcaacaaagctaccttcagccctatagtcactttggaacctagaagaagaaaattccacaaaccaattaccatgaccattcctgtccccaaagcttcaagtgatgtcatgttgaatggttttgggggagatgcaccaaccttaagattactatgcagcataacaggtggaaccacccctgcccagtgggaagatattacaggaactacgccattaacatttgtcaatgaatgtgtttcctttacaacaaacgtgtctgccaggttctggctgatagattgtcgacagatccaggaatccgttacttttgcatcacaagtatacagagaaattatctgcgtaccttatatggccaaatttgtagtgtttgccaaatcacatgaccccattgaagccaggttgaggtgtttctgcatgactgatgataaagtggataagacccttgaacaacaagaaaattttgctgaggtggccagaagcagggatgtggaggtgttagaaggaaaacccatctacgttgattgtttcggcaacttggtaccattaactaaaagtggccagcatcatatattcagtttttttgccttcaaagaaaatagacttcctctatttgtcaaggtacgcgatacgactcaggaaccttgcggacgactatcatttatgaaggagccaaaatccacgagaggcctggtgcatcaagctatttgcaacttaaacatcactttgccgatttatacaaaggaatcagagtcagatcaagaacaggaggaagagatcgatatgacatcagaaaaaaatgatgagacagaatctacagaaacatctgtcctgaaaagtcacctggttaatgaagttcctgtcctagcaagtccggacttgctctctgaagtttctgagatgaaacaagatttgatcaaaatgaccgccatcttgaccacagatgtgtctgataaggcaggttctattaaagtgaaggagctggtgaaggctgctgaggaagagccaggagagccttttgaaatcgttgaaagagttaaagaggacttagagaaagtgaatgaaatcctgagaagtggaacctgcacaagagatgaaagcagtgtgcagagctctcggtctgagagaggattagttgaagaggaatgggttattgtcagtgatgaggaaatagaagaggctaggcaaaaagcacctttagaaatcactgaatatccatgtgtagaagttagaatagataaagagatcaaaggaaaagtagagaaagactcaactgggctagtgaactaccttactgatgatctgaatacctgtgtgcctcttcccaaagagcagctgcagacagttcaagataaggcagggaagaaatgtgaggctctggctgttggcaggagctctgaaaaggaagggaaagacatacccccagatgagacacagagtacacagaaacagcacaaaccaagcttgggaataaagaagccagtaagaaggaaattaaaagaaaagcagaaacaaaaagaggaaggtttacaagctagtgcagagaaagctgaacttaaaaaaggtagttcagaagagtcattaggtgaagacccaggtttagcccctgaaccccttcccactgtcaaggccacatctcctttgatagaagaaactcccattggttccataaaggacaaagtaaaggcccttcagaagcgagtggaagatgaacagaaaggtcgaagcaagttgcccatcagagtcaaaggcaaggaggacgtgccaaaaaagaccacccacaggccacatccagctgcgtcaccctctctgaagtcagagagacatgcgccagggtctccctcccctaaaacagaaagacactctactctttcctcttccgcaaaaactgaaaggcaccctccagtatcaccatcaagtaaaactgagaaacactcacctgtgtcaccctctgcaaaaacggaaagacattcacctgcgtcatcatcgagtaaaactgagaaacactcacctgtatcaccctcgacaaaaactgaaaggcactctcctgtgtcatctacaaaaacagaaagacacccacctgtttcgccttcaggcaaaacagacaaacgtccacctgtatcgccctccgggaggacagaaaaacacccgccagtatcgcctgggagaacagaaaaacgcttgcctgtttcaccctccggaagaacggacaagcaccaacctgtatcaacagctgggaaaactgagaagcacctgcctgtgtcaccttctggcaaaacagaaaagcaaccacctgtatcccccacttcaaaaacagagaggattgaggaaaccatgtctgttcgggagctgatgaaggctttccagtcaggtcaggacccttctaaacataaaactggactctttgagcacaaatcagcaaaacaaaagcagccacaagagaaaggtaaagttcgggtagaaaaagaaaaggggccgatactaacccagagagaagctcagaaaacagagaatcagacaatcaaacgaggccagagactcccggtaacgggcacagcagaatccaaaagaggagttcgtgtttcctccataggagttaagaaagaagatgcagctggaggaaaggagaaagttctcagccacaaaatacctgaacctgttcagtcagtgcctgaagaagaaagccacagagagagcgaagtgcccaaagaaaagatggctgatgagcagggagacatggatctacagatcagcccagataggaaaacctccactgacttctctgaggtcattaagcaagagttggaagacaatgacaaataccaacaattccgcctgagtgaggagacagaaaaggcacagcttcacttagaccaagtactcactagtcctttcaacacaacatttccactcgactacatgaaagatgagttccttccagctctgtctttacaaagcggtgctttagatggcagttctgaaagcctaaagaatgagggggtagccggctctccgtgtggcagcctgatggaggggacccctcagattagttcagaagaaagctataagcatgaaggcctagcagagacccctgagacgagcccagaaagcctttctttctcaccaaagaaaagtgaggagcaaactggggaaacaaaggaaagcaccaagacagaaaccaccacagaaattcgttcagaaaaagagcatcccacgaccaaagacattactggtggctctgaagagcgaggtgccacagtcactgaggactcagagacctctactgagagttttcagaaagaggccactctaggctctcccaaagacacaagccctaaaagacaagatgattgcacaggcagctgtagtgtagcattagctaaagagacacctacaggactgactgaggaggcagcctgtgatgaaggtcaacgtacctttggtagttcagcccacaagacacaaactgatagtgaggctcaggaatccacagccacctcagacgagacaaaggccttgccgctgcctgaggcttctgtaaagacagatacaggaactgaatcaaaacctcagggagtcattagaagtccccaagggttagaacttgcactccctagccgagatagcgaagtcctcagcgctgtggctgatgactcattagcagtgagccacaaagactctctggaagccagccctgtgctagaagataactcttcacacaaaacccctgattctctggagccaagtcctctgaaagaatccccttgccgtgactctctggaaagcagccctgttgaaccaaagatgaaggctggaatttttccaagtcactttcctcttcctgcagctgttgccaaaacagaactcttgacggaagtggcctctgtgcggtcccggctactccgagaccctgatggcagtgctgaggatgacagtcttgagcagacatcgctcatggagagctcagggaagagccccctttctcctgacacccccagctctgaagaagtcagctatgaggttacacccaaaaccacagatgtaagtacaccaaaaccagctgtgattcatgaatgtgcagaggaggatgattcagaaaacggggagaaaaagaggttcacacctgaagaggagatgtttaaaatggtaaccaaaatcaaaatgtttgatgaacttgaacaagaagcaaagcagaaaagggactacaaaaaagaacccaaacaagaagaatcttcttcatcttctgacccagatgctgactgttcagtagatgtggatgaaccaaaacatacaggcagtggggaggatgaaagtggtgtccctgtgttagtaacttcggagagcaggaaggtgtcttcctcctcagaaagtgaacctgagttggcacagcttaaaaaaggtgctgactcaggccttttaccagaaccagtgattcgagtacaacctccttctccacttccatcaagcatggactccaattccagtccagaagaagtacaattccagcctgtcgtttccaaacaatatactttcaagatgaatgaagatactcaggaagagccaggcaaatcagaagaagaaaaagattctgaatcccatttagctgaagaccgtcatgctgtttccactgaggctgaagacaggtcttatgataagctaaacagagacactgatcagccaaaaatctgtgatggccatggatgtgaggccatgagtcctagcagctcagctcgtcctgtctcttcaggtctacagagtccgactggtgatgatgttgatgaacagccagtcatctataaagaatcattagctctccaaggcactcatgaaaaagacacagagggagaagagcttgatgtttctagagcagaatctccacaagcagattgccccagtgaaagcttttcatcttcatcctctttgcctcattgtttggtatctgaaggaaaagaattagatgaagacatatctgccacatcttctattcaaaaaacagaggtcacaaaaactgatgaaacatttgagaacttaccaaaggactgcccctctcaagactcatccattactactcaaacagatagattttccatggatgttcccgtgtctgacctagctgagaatgatgaaatctatgatccacaaatcactagcccttatgaaaatgtcccttcccaatcttttttctctagtgaagaaagcaaaacccaaacagatgcaaatcacaccacaagttttcactcttctgaagtgtattctgttaccatcacatcccctgttgaagacgttgtagtggcaagctcctctagtggaactgttttaagcaaagaatctaattttgagggccaggacataaaaatggaatcccaactggaaagtaccttgtgggaaatgcaatcagacagtgtctcttcatctttcgagcctactatgtccgctacaacaacagttgttggtgaacaaataagcaaagtcatcatcacaaaaactgatgtggattctgattcttggagtgaaattcgggaagacgatgaagcctttgaggctcgtgtgaaagaggaagaacaaaagatatttggtttgatggtagacagacaatcacagggtaccacccctgacaccactcctgctaggaccccaactgaagaggggaccccaacaagtgagcaaaacccatttctgtttcaggaaggaaaattgtttgaaatgacccgaagtggtgccattgatatgaccaaaaggtcctatgcagatgaaagttttcactttttccaaattggtcaagaatccagggaagagactctctctgaagatgtgaaagaaggggctactggggctgatcccctaccgctggagacatcagctgaatcactagcactttcagaatcaaaagaaacagtggatgatgaggcagacttacttccagatagcgtgagtgaggaagtagaggaaatacctgcttcggatgctcaacttaactcccaaatggggatttcagcctccactgaaacacctacaaaagaggctgttagtgtagggaccaaggacctccccaccgtgcaaacgggtgatatacctcctctctctggtgtaaagcagatatcctgccccgactcttctgaaccagctgtacaagtccagttagatttttccacactcaccaggtctgtttattcagataggggtgatgattctcccgattcttccccagaagaacagaaatcagtaatcgagattcctactgcacccatggagaatgtgccttttactgaaagcaaatccaaaattcctgtaaggactatgcccacttccaccccagcacctccatctgcagagtatgagagttcagtttctgaagattttctatccagtgtagatgaggaaaataaggcggatgaagcaaaaccaaagtccaaactccctgtcaaagtacccctccaaagagttgaacagcagctctcagatctagacacctctgtccagaagacagtggctcctcagggacaggacatggcaagcatcgcaccagataatagaagcaaatctgaatctgatgctagttctttggattcaaagaccaaatgcccagtaaaaacccgaagttacactgagacagaaacagagagcagagagagggccgaggaacttgagttagaatcagaagaaggggccacaagaccaaagatacttacatcccgattgccagttaagagcagaagcactacatcttcctgcagggggggcacgagccccacaaaagaaagtaaggagcatttctttgacctttacagaaattccatagaattctttgaggagattagtgatgaggcttccaaattagtggataggctgacacagtcagagagggagcaggaaatagtttcagacgatgaaagtagtagtgccctggaagtatcagtaattgaaaatctgccacctgttgagaccgagcactcagttcctgaggacatctttgacacaaggcccatttgggatgagtctattgagactctgattgaacgcatccctgatgaaaatggccatgaccatgctgaagatccacaggatgagcaggaacggatcgaggaaaggctggcttatattgctgatcaccttggcttcagctggacagaattagcaagagaactggatttcactgaggagcaaattcatcaaattcgaattgaaaatcccaactctcttcaagaccagagtcatgcactgttgaagtactggctagagagggatgggaaacatgctacagataccaacctcgttgaatgtctcaccaagatcaaccgaatggatattgttcatctcatggagaccaacacagaacctctccaggagcgcatcagtcatagttatgcagaaattgaacagaccattacactggatcatagtgaagggttctcggtacttcaagaggagttatgcactgcacagcacaagcagaaagaggagcaagctgtttctaaagaaagtgagacctgcgatcaccctcctatcgtctcagaggaagacatttctgttggttattccacttttcaggatggcgtccccaaaactgagggggacagctcagcaacagcactctttccccaaactcacaaggagcaagttcaacaggatttctcagggaaaatgcaagacctgcctgaagagtcatctctggaatatcagcaggaatattttgtgacaactccaggaacagaaacatcagagactcagaaggctatgatagtacccagctctcccagcaagacacctgaggaagttagcacccctgcagaggaggagaagctgtacctccagaccccaacatccagcgagcggggaggctctcccatcatacaagaacccgaagagccctcagagcacagagaggagagctctccgcggaaaaccagcctcgtaatagtggagtctgccgataaccagcctgagacctgtgaaagactcgatgaagatgcagcttttgaaaagggagacgatatgcctgaaatacccccagaaacagtcacagaagaagaatacattgatgagcatggacacaccgtggtaaagaaggttactaggaaaatcattaggcggtatgtatcctctgaaggcacagagaaagaagagattatggtgcagggaatgccacaggaacctgtcaacatcgaggaaggggatggctattccaaagttataaagcgtgttgtattgaagagtgacaccgagcagtcagaggacaacaatgagtaaagccatcacacagaagagggctgtggtgaaggaccagcatggaaaacgcattgacttggagcacctggaggatgtaccagaagcactagaccaggacgacctccagcgcgatctccagcagctccttcggcatttctgcaaggaggacttgaagcaagaggccaagtgaggggctgcccagttctcacaccagaaaccacacattcactcaatatgcagcttcctgtttcagtaggggagtgacctaactggcctaattaatgggataccccgacatttccactgttagcaaatatacggcattttgctttagttttcccccatcctctttaactataaagctaatttgtgaccaaagatggcatccttcatactggatgctgtatccaatactttgttgtgtctgtgctaacctgggaactggccacctccattgttctttgcttctgcacaagatccatgaaaatccattgatcagaagaacttcacctgcagacctcttcaagtgacactatgtaggaatccttccaaggaatatctatgtacaatgtatatagctgaaatgctcagatgaacaacatattaaaattaaaaccactgcctattgtaactacactgggcatcagaataaaaggcctctagaaattgctgaacaatggttaattaagatattgctaacacaatcgagtgataatacagttttactgcaaaagaagcacttcaaacctattatgtccttagaacttccagaaggccacgcagaatgaaccgatggggtattcagttgctggcagctacattgtgtggcattctagcatcttcaggtctttagatcttggacaagttggcagggtattttaaaagctataactactgtagttttccagttttcattgctgctttagcaaaccacgctgtcttacagtggtactttcttctggccactgcactgtagataattcattggaaacaagatttacccactacataaaaggttaaactccttcagtatgttggagtggtttctttttttttttctttctttcttttttttcttcaggtttatatcttctctaatacctgcatgtggcgtttaaaaatcaagaccacggtcaaacccctcttctaatcacattaattgtttccattctttttaccctgagtgagcacttttcactttccagctaggtctgtttttcagcttgcagacaagattgagaaatccttgaaaatttggttttggttaaaatttttggtttatttatttgaaatccacactcccttggaaactcttaagtgcatttgtgcacttctgtttgtttgtctcaaagaagggactgtaacaatctgagtaatttccatgtcctcttccttattcctctagtggttgaagctgtgtagcattttaacatatatatattcacaaatatattcatataaacagtatacattttgaatcagtcatttgttaaagaaaagtatattcaatgaagatgaaatttaaataaaaaaggacagagtctatcctccagggattgaacattttccaattatctggtcttttcctgttgtgcaaaaatgactcattgctccgaatgtcaaaaacaaatgcgacaaacaatggcacttcatcatttaaagtaatgttgccaagagaaaaaatttcctgggagggaggtttcccacaagccaaatctcctaagcctcaaatgctagcactttttggcagttggataggaaatgagacattctttggcagccaaaataagagaggccgatggtgaaactttttgagacaccctatggccttcttgtcaaaaccttcactggagctcaagaaaagcatttctgttgtgttatttgcagtgcagatgatgtctgtgtaacaacataatggttattcacctttttttgattttgatttttgctgtgttatcaaaaacttgaatactgtgagaagaagtgaattttcagttgacgaatcagcatcttgttcccatggtgataacactaattgaatatatctatgagggcatgtattagttaatggaaaaaaaaatacaacactaacaatacatagctgcaatgtgtacaatggctgatttaattaaataaaatgtacaagtgttaaatgtgaaaaaaaaaaat

SEQ ID NO: 403592 - DNA, 14107 bp, Homo sapiens
ctgtacaggcggcacggtttgatggcagagatattttctttccaaactgttcaaaatgatgaacgaagatgcagctcagaaaagcgacagtggagagaagttcaacggcagtagtcagaggagaaaaagacccaagaagtctgacagcaatgcaagcttcctccgtgctgccagagcaggcaacctggacaaagttgtggaatatctgaaggggggcatagacatcaatacctgcaatcagaatggactcaacgctctccatctggctgccaaggaaggccacgtggggctggtgcaggagctgctgggaagagggtcctctgtggattctgccactaagaagggaaataccgctcttcacattgcatctttggctggacaagcagaagttgtcaaagttcttgttaaggaaggagccaatattaatgcacagtctcagaatggctttactcctttatacatggctgcccaagagaatcacattgatgttgtaaaatatttgctggaaaatggagctaatcagagcactgctacagaggatggctttactcctctagctgtggcactccagcaaggacacaaccaggcggtggccatcctcttggagaatgacaccaaagggaaagtgaggctgccagctctgcatattgccgctaggaaagacgacaccaaatctgccgcacttctgcttcagaatgaccacaatgctgacgtacaatccaagatgatggtgaataggacaactgagagtggttttacccctttgcacatagctgcacattacggaaatgtcaacgtggcaactcttcttctaaaccggggagctgctgtggacttcacagccaggaatggaatcactcctctgcatgtggcttccaaaagaggaaatacaaacatggtgaagctcttactggatcgaggcggtcagatcgatgccaaaactagggatgggttgacaccacttcactgtgctgcacgaagtgggcatgaccaagtggtggaacttctgttggaacggggtgcccccttgctggcaaggactaagaatgggctgtctccactacacatggctgcccagggagaccacgtggaatgtgtgaagcacctgttacagcacaaggcacctgttgatgatgtcaccctagactacctgacagccctccacgttgctgcgcactgtggccactaccgtgtaaccaaactccttttagacaagagagccaatccgaacgccagagccctgaatggttttactccactgcacattgcctgcaagaaaaaccgcatcaaagtcatggaactgctggtgaaatatggggcttcaatccaagctataacagagtctggcctcacaccaatacatgtggctgccttcatgggccacttgaacattgtcctccttctgctgcagaacggagcctctccagatgtcactaacattcgtggtgagacggcactacacatggcagcccgagccgggcaggtggaagtggtccgatgcctcctgagaaatggtgcccttgttgatgccagagccagggaggaacagacacctttacatattgcctcccgcctgggtaagacagaaattgtccagctgcttctacaacatatggctcatccagatgcggccactacaaatgggtacacaccactgcacatctctgcccgggagggccaggtggatgtggcatcagtcctattggaagcaggagcagcccactccttagctaccaagaagggttttactcccctgcatgtagcagccaagtatggaagcctggatgtggcaaaacttctcttgcaacgccgtgctgccgcagattctgcagggaagaacggccttaccccgctccatgttgctgctcattatgacaaccagaaggtggcgctgctgttactggagaagggtgcttcccctcatgccactgccaagaatggctatactccgttacatattgctgccaagaagaatcaaatgcagatagcttccacactcctgaactatggagcagagacaaacattgtgacaaagcaaggagtaactccactccatctggcctcgcaggaggggcacacagatatggttaccttgcttctggataagggagccaatatccacatgtcaactaagagtggactcacatccttacaccttgcagcccaggaagataaagtgaatgttgctgatattctcaccaagcatggagctgatcaggatgctcatacaaagcttggttacacacctttaattgtggcctgtcactatggaaatgtgaaaatggtcaactttcttctgaagcagggagcaaatgttaacgcaaaaaccaagaacggctacacgcctttgcaccaggccgctcagcagggtcacacgcacatcatcaacgtcctgctccagcatggggccaagcccaacgccaccactgcgaatggcaacactgccttggcgattgctaagcgtctgggctacatctccgtggtcgacaccctgaaggttgtgactgaggaggtcaccaccaccaccacaactattacagaaaaacacaaactaaatgtacctgagacgatgactgaggttcttgatgtttctgatgaagagggtgatgacacaatgactggtgatgggggagaataccttaggcctgaggacctaaaagaactgggtgatgactcactacccagcagtcagttcctggatggtatgaattacctgcgatacagcttggagggaggacgatctgacagccttcgatccttcagttccgacaggtctcacactctgagccatgcctcctacctgagggacagtgccgtgatggatgactcagttgtgattcccagtcaccaggtgtcaactctagccaaggaggcagaaaggaattcttatcgcctaagctggggcactgagaacttagacaacgtggctctttcttctagtcctattcattcaggtttcctggttagttttatggtggatgcccgaggtggtgctatgcgaggatgcagacacaatgggctccgaatcattattccacctcggaaatgtactgctccaacgcgagtcacctgccgactggtcaagcgccacagactggcaacaatgcctccaatggtggaaggagaaggcctggccagtcgcctgatcgaagttggaccttctggtgctcagttccttgggcctgtgatcgtggagatccctcactttgcggcccttcgaggaaaggaaagggaactggtggtcctgcgcagtgagaatggggacagctggaaagagcatttctgtgactacactgaagatgaattgaatgaaattcttaacggcatggatgaagtactggatagcccagaagacctagaaaagaaacgaatctgccgcatcatcacccgagacttcccacagtactttgcagtggtgtctcgtatcaaacaggacagcaatctgattggcccagaaggaggtgtactgagcagcacagtggtgccccaggtgcaggccgtcttcccagagggggcactcaccaagcggatccgcgtaggcctgcaggctcaacctatgcacagtgagctggttaagaagatcctaggcaacaaagctaccttcagccctatagtcactttggaacctagaagaagaaaattccacaaaccaattaccatgaccattcctgtccccaaagcttcaagtgatgtcatgttgaatggttttgggggagatgcaccaaccttaagattactatgcagcataacaggtggaaccacccctgcccagtgggaagatattacaggaactacgccattaacatttgtcaatgaatgtgtttcctttacaacaaacgtgtctgccaggttctggctgatagattgtcgacagatccaggaatccgttacttttgcatcacaagtatacagagaaattatctgcgtaccttatatggccaaatttgtagtgtttgccaaatcacatgaccccattgaagccaggttgaggtgtttctgcatgactgatgataaagtggataagacccttgaacaacaagaaaattttgctgaggtggccagaagcagggatgtggaggtgttagaaggaaaacccatctacgttgattgtttcggcaacttggtaccattaactaaaagtggccagcatcatatattcagtttttttgccttcaaagaaaatagacttcctctatttgtcaaggtacgcgatacgactcaggaaccttgcggacgactatcatttatgaaggagccaaaatccacgagaggcctggtgcatcaagctatttgcaacttaaacatcactttgccgatttatacaaaggaatcagagtcagatcaagaacaggaggaagagatcgatatgacatcagaaaaaaatgatgagacagaatctacagaaacatctgtcctgaaaagtcacctggttaatgaagttcctgtcctagcaagtccggacttgctctctgaagtttctgagatgaaacaagatttgatcaaaatgaccgccatcttgaccacagatgtgtctgataaggcaggttctattaaagtgaaggagctggtgaaggctgctgaggaagagccaggagagccttttgaaatcgttgaaagagttaaagaggacttagagaaagtgaatgaaatcctgagaagtggaacctgcacaagagatgaaagcagtgtgcagagctctcggtctgagagaggattagttgaagaggaatgggttattgtcagtgatgaggaaatagaagaggctaggcaaaaagcacctttagaaatcactgaatatccatgtgtagaagttagaatagataaagagatcaaaggaaaagtagagaaagactcaactgggctagtgaactaccttactgatgatctgaatacctgtgtgcctcttcccaaagagcagctgcagacagttcaagataaggcagggaagaaatgtgaggctctggctgttggcaggagctctgaaaaggaagggaaagacatacccccagatgagacacagagtacacagaaacagcacaaaccaagcttgggaataaagaagccagtaagaaggaaattaaaagaaaagcagaaacaaaaagaggaaggtttacaagctagtgcagagaaagctgaacttaaaaaaggtagttcagaagagtcattaggtgaagacccaggtttagcccctgaaccccttcccactgtcaaggccacatctcctttgatagaagaaactcccattggttccataaaggacaaagtaaaggcccttcagaagcgagtggaagatgaacagaaaggtcgaagcaagttgcccatcagagtcaaaggcaaggaggacgtgccaaaaaagaccacccacaggccacatccagctgcgtcaccctctctgaagtcagagagacatgcgccagggtctccctcccctaaaacagaaagacactctactctttcctcttccgcaaaaactgaaaggcaccctccagtatcaccatcaagtaaaactgagaaacactcacctgtgtcaccctctgcaaaaacggaaagacattcacctgcgtcatcatcgagtaaaactgagaaacactcacctgtatcaccctcgacaaaaactgaaaggcactctcctgtgtcatctacaaaaacagaaagacacccacctgtttcgccttcaggcaaaacagacaaacgtccacctgtatcgccctccgggaggacagaaaaacacccgccagtatcgcctgggagaacagaaaaacgcttgcctgtttcaccctccggaagaacggacaagcaccaacctgtatcaacagctgggaaaactgagaagcacctgcctgtgtcaccttctggcaaaacagaaaagcaaccacctgtatcccccacttcaaaaacagagaggattgaggaaaccatgtctgttcgggagctgatgaaggctttccagtcaggtcaggacccttctaaacataaaactggactctttgagcacaaatcagcaaaacaaaagcagccacaagagaaaggtaaagttcgggtagaaaaagaaaaggggccgatactaacccagagagaagctcagaaaacagagaatcagacaatcaaacgaggccagagactcccggtaacgggcacagcagaatccaaaagaggagttcgtgtttcctccataggagttaagaaagaagatgcagctggaggaaaggagaaagttctcagccacaaaatacctgaacctgttcagtcagtgcctgaagaagaaagccacagagagagcgaagtgcccaaagaaaagatggctgatgagcagggagacatggatctacagatcagcccagataggaaaacctccactgacttctctgaggtcattaagcaagagttggaagacaatgacaaataccaacaattccgcctgagtgaggagacagaaaaggcacagcttcacttagaccaagtactcactagtcctttcaacacaacatttccactcgactacatgaaagatgagttccttccagctctgtctttacaaagcggtgctttagatggcagttctgaaagcctaaagaatgagggggtagccggctctccgtgtggcagcctgatggaggggacccctcagattagttcagaagaaagctataagcatgaaggcctagcagagacccctgagacgagcccagaaagcctttctttctcaccaaagaaaagtgaggagcaaactggggaaacaaaggaaagcaccaagacagaaaccaccacagaaattcgttcagaaaaagagcatcccacgaccaaagacattactggtggctctgaagagcgaggtgccacagtcactgaggactcagagacctctactgagagttttcagaaagaggccactctaggctctcccaaagacacaagccctaaaagacaagatgattgcacaggcagctgtagtgtagcattagctaaagagacacctacaggactgactgaggaggcagcctgtgatgaaggtcaacgtacctttggtagttcagcccacaagacacaaactgatagtgaggctcaggaatccacagccacctcagacgagacaaaggccttgccgctgcctgaggcttctgtaaagacagatacaggaactgaatcaaaacctcagggagtcattagaagtccccaagggttagaacttgcactccctagccgagatagcgaagtcctcagcgctgtggctgatgactcattagcagtgagccacaaagactctctggaagccagccctgtgctagaagataactcttcacacaaaacccctgattctctggagccaagtcctctgaaagaatccccttgccgtgactctctggaaagcagccctgttgaaccaaagatgaaggctggaatttttccaagtcactttcctcttcctgcagctgttgccaaaacagaactcttgacggaagtggcctctgtgcggtcccggctactccgagaccctgatggcagtgctgaggatgacagtcttgagcagacatcgctcatggagagctcagggaagagccccctttctcctgacacccccagctctgaagaagtcagctatgaggttacacccaaaaccacagatgtaagtacaccaaaaccagctgtgattcatgaatgtgcagaggaggatgattcagaaaacggggagaaaaagaggttcacacctgaagaggagatgtttaaaatggtaaccaaaatcaaaatgtttgatgaacttgaacaagaagcaaagcagaaaagggactacaaaaaagaacccaaacaagaagaatcttcttcatcttctgacccagatgctgactgttcagtagatgtggatgaaccaaaacatacaggcagtggggaggatgaaagtggtgtccctgtgttagtaacttcggagagcaggaaggtgtcttcctcctcagaaagtgaacctgagttggcacagcttaaaaaaggtgctgactcaggccttttaccagaaccagtgattcgagtacaacctccttctccacttccatcaagcatggactccaattccagtccagaagaagtacaattccagcctgtcgtttccaaacaatatactttcaagatgaatgaagatactcaggaagagccaggcaaatcagaagaagaaaaagattctgaatcccatttagctgaagaccgtcatgctgtttccactgaggctgaagacaggtcttatgataagctaaacagagacactgatcagccaaaaatctgtgatggccatggatgtgaggccatgagtcctagcagctcagctcgtcctgtctcttcaggtctacagagtccgactggtgatgatgttgatgaacagccagtcatctataaagaatcattagctctccaaggcactcatgaaaaagacacagagggagaagagcttgatgtttctagagcagaatctccacaagcagattgccccagtgaaagcttttcatcttcatcctctttgcctcattgtttggtatctgaaggaaaagaattagatgaagacatatctgccacatcttctattcaaaaaacagaggtcacaaaaactgatgaaacatttgagaacttaccaaaggactgcccctctcaagactcatccattactactcaaacagatagattttccatggatgttcccgtgtctgacctagctgagaatgatgaaatctatgatccacaaatcactagcccttatgaaaatgtcccttcccaatcttttttctctagtgaagaaagcaaaacccaaacagatgcaaatcacaccacaagttttcactcttctgaagtgtattctgttaccatcacatcccctgttgaagacgttgtagtggcaagctcctctagtggaactgttttaagcaaagaatctaattttgagggccaggacataaaaatggaatcccaactggaaagtaccttgtgggaaatgcaatcagacagtgtctcttcatctttcgagcctactatgtccgctacaacaacagttgttggtgaacaaataagcaaagtcatcatcacaaaaactgatgtggattctgattcttggagtgaaattcgggaagacgatgaagcctttgaggctcgtgtgaaagaggaagaacaaaagatatttggtttgatggtagacagacaatcacagggtaccacccctgacaccactcctgctaggaccccaactgaagaggggaccccaacaagtgagcaaaacccatttctgtttcaggaaggaaaattgtttgaaatgacccgaagtggtgccattgatatgaccaaaaggtcctatgcagatgaaagttttcactttttccaaattggtcaagaatccagggaagagactctctctgaagatgtgaaagaaggggctactggggctgatcccctaccgctggagacatcagctgaatcactagcactttcagaatcaaaagaaacagtggatgatgaggcagacttacttccagatagcgtgagtgaggaagtagaggaaatacctgcttcggatgctcaacttaactcccaaatggggatttcagcctccactgaaacacctacaaaagaggctgttagtgtagggaccaaggacctccccaccgtgcaaacgggtgatatacctcctctctctggtgtaaagcagatatcctgccccgactcttctgaaccagctgtacaagtccagttagatttttccacactcaccaggtctgtttattcagataggggtgatgattctcccgattcttccccagaagaacagaaatcagtaatcgagattcctactgcacccatggagaatgtgccttttactgaaagcaaatccaaaattcctgtaaggactatgcccacttccaccccagcacctccatctgcagagtatgagagttcagtttctgaagattttctatccagtgtagatgaggaaaataaggcggatgaagcaaaaccaaagtccaaactccctgtcaaagtacccctccaaagagttgaacagcagctctcagatctagacacctctgtccagaagacagtggctcctcagggacaggacatggcaagcatcgcaccagataatagaagcaaatctgaatctgatgctagttctttggattcaaagaccaaatgcccagtaaaaacccgaagttacactgagacagaaacagagagcagagagagggccgaggaacttgagttagaatcagaagaaggggccacaagaccaaagatacttacatcccgattgccagttaagagcagaagcactacatcttcctgcagggggggcacgagccccacaaaagaaagtaaggagcatttctttgacctttacagaaattccatagaattctttgaggagattagtgatgaggcttccaaattagtggataggctgacacagtcagagagggagcaggaaatagtttcagacgatgaaagtagtagtgccctggaagtatcagtaattgaaaatctgccacctgttgagaccgagcactcagttcctgaggacatctttgacacaaggcccatttgggatgagtctattgagactctgattgaacgcatccctgatgaaaatggccatgaccatgctgaagatccacaggatgagcaggaacggatcgaggaaaggctggcttatattgctgatcaccttggcttcagctggacagaattagcaagagaactggatttcactgaggagcaaattcatcaaattcgaattgaaaatcccaactctcttcaagaccagagtcatgcactgttgaagtactggctagagagggatgggaaacatgctacagataccaacctcgttgaatgtctcaccaagatcaaccgaatggatattgttcatctcatggagaccaacacagaacctctccaggagcgcatcagtcatagttatgcagaaattgaacagaccattacactggatcatagtgaagggttctcggtacttcaagaggagttatgcactgcacagcacaagcagaaagaggagcaagctgtttctaaagaaagtgagacctgcgatcaccctcctatcgtctcagaggaagacatttctgttggttattccacttttcaggatggcgtccccaaaactgagggggacagctcagcaacagcactctttccccaaactcacaaggagcaagttcaacaggatttctcagggaaaatgcaagacctgcctgaagagtcatctctggaatatcagcaggaatattttgtgacaactccaggaacagaaacatcagagactcagaaggctatgatagtacccagctctcccagcaagacacctgaggaagttagcacccctgcagaggaggagaagctgtacctccagaccccaacatccagcgagcggggaggctctcccatcatacaagaacccgaagagccctcagagcacagagaggagagctctccgcggaaaaccagcctcgtaatagtggagtctgccgataaccagcctgagacctgtgaaagactcgatgaagatgcagcttttgaaaagggagacgatatgcctgaaatacccccagaaacagtcacagaagaagaatacattgatgagcatggacacaccgtggtaaagaaggttactaggaaaatcattaggcggtatgtatcctctgaaggcacagagaaagaagagattatggtgcagggaatgccacaggaacctgtcaacatcgaggaaggggatggctattccaaagttataaagcgtgttgtattgaagagtgacaccgagcagtcagaggacaacaatgagtaaagccatcacacagaagagggctgtggtgaaggaccagcatggaaaacgcattgacttggagcacctggaggatgtaccagaagcactagaccaggacgacctccagcgcgatctccagcagctccttcggcatttctgcaaggaggacttgaagcaagaggccaagtgaggggctgcccagttctcacaccagaaaccacacattcactcaatatgcagcttcctgtttcagtaggggagtgacctaactggcctaattaatgggataccccgacatttccactgttagcaaatatacggcattttgctttagttttcccccatcctctttaactataaagctaatttgtgaccaaagatggcatccttcatactggatgctgtatccaatactttgttgtgtctgtgctaacctgggaactggccacctccattgttctttgcttctgcacaagatccatgaaaatccattgatcagaagaacttcacctgcagacctcttcaagtgacactatgtaggaatccttccaaggaatatctatgtacaatgtatatagctgaaatgctcagatgaacaacatattaaaattaaaaccactgcctattgtaactacactgggcatcagaataaaaggcctctagaaattgctgaacaatggttaattaagatattgctaacacaatcgagtgataatacagttttactgcaaaagaagcacttcaaacctattatgtccttagaacttccagagtagccactgctcccagttaaaggtgggtcagtagccttgcagaactgtcctgagaagttattgctggtgctggccagccatggcttaggactccaacagccactctgagggaggggagaagggagcagaggccacgcagaatgaaccgatggggtattcagttgctggcagctacattgtgtggcattctagcatcttcaggtctttagatcttggacaagttggcagggtattttaaaagctataactactgtagttttccagttttcattgctgctttagcaaaccacgctgtcttacagtggtactttcttctggccactgcactgtagataattcattggaaacaagatttacccactacataaaaggttaaactccttcagtatgttggagtggtttctttttttttttctttctttcttttttttcttcaggtttatatcttctctaatacctgcatgtggcgtttaaaaatcaagaccacggtcaaacccctcttctaatcacattaattgtttccattctttttaccctgagtgagcacttttcactttccagctaggtctgtttttcagcttgcagacaagattgagaaatccttgaaaatttggttttggttaaaatttttggtttatttatttgaaatccacactcccttggaaactcttaagtgcatttgtgcacttctgtttgtttgtctcaaagaagggactgtaacaatctgagtaatttccatgtcctcttccttattcctctagtggttgaagctgtgtagcattttaacatatatatattcacaaatatattcatataaacagtatacattttgaatcagtcatttgttaaagaaaagtatattcaatgaagatgaaatttaaataaaaaaggacagagtctatcctccagggattgaacattttccaattatctggtcttttcctgttgtgcaaaaatgactcattgctccgaatgtcaaaaacaaatgcgacaaacaatggcacttcatcatttaaagtaatgttgccaagagaaaaaatttcctgggagggaggtttcccacaagccaaatctcctaagcctcaaatgctagcactttttggcagttggataggaaatgagacattctttggcagccaaaataagagaggccgatggtgaaactttttgagacaccctatggccttcttgtcaaaaccttcactggagctcaagaaaagcatttctgttgtgttatttgcagtgcagatgatgtctgtgtaacaacataatggttattcacctttttttgattttgatttttgctgtgttatcaaaaacttgaatactgtgagaagaagtgaattttcagttgacgaatcagcatcttgttcccatggtgataacactaattgaatatatctatgagggcatgtattagttaatggaaaaaaaaatacaacactaacaatacatagctgcaatgtgtacaatggctgatttaattaaataaaatgtacaagtgttaaatgtgaaaaaaaaaaat

SEQ ID NO: 403593 - DNA, 14200 bp, Homo sapiens
ctgtacaggcggcacggtttgatggcagagatattttctttccaaactgttcaaaatgatgaacgaagatgcagctcagaaaagcgacagtggagagaagttcaacggcagtagtcagaggagaaaaagacccaagaagtctgacagcaatgcaagcttcctccgtgctgccagagcaggcaacctggacaaagttgtggaatatctgaaggggggcatagacatcaatacctgcaatcagaatggactcaacgctctccatctggctgccaaggaaggccacgtggggctggtgcaggagctgctgggaagagggtcctctgtggattctgccactaagaagggaaataccgctcttcacattgcatctttggctggacaagcagaagttgtcaaagttcttgttaaggaaggagccaatattaatgcacagtctcagaatggctttactcctttatacatggctgcccaagagaatcacattgatgttgtaaaatatttgctggaaaatggagctaatcagagcactgctacagaggatggctttactcctctagctgtggcactccagcaaggacacaaccaggcggtggccatcctcttggagaatgacaccaaagggaaagtgaggctgccagctctgcatattgccgctaggaaagacgacaccaaatctgccgcacttctgcttcagaatgaccacaatgctgacgtacaatccaagatgatggtgaataggacaactgagagtggttttacccctttgcacatagctgcacattacggaaatgtcaacgtggcaactcttcttctaaaccggggagctgctgtggacttcacagccaggaatggaatcactcctctgcatgtggcttccaaaagaggaaatacaaacatggtgaagctcttactggatcgaggcggtcagatcgatgccaaaactagggatgggttgacaccacttcactgtgctgcacgaagtgggcatgaccaagtggtggaacttctgttggaacggggtgcccccttgctggcaaggactaagaatgggctgtctccactacacatggctgcccagggagaccacgtggaatgtgtgaagcacctgttacagcacaaggcacctgttgatgatgtcaccctagactacctgacagccctccacgttgctgcgcactgtggccactaccgtgtaaccaaactccttttagacaagagagccaatccgaacgccagagccctgaatggttttactccactgcacattgcctgcaagaaaaaccgcatcaaagtcatggaactgctggtgaaatatggggcttcaatccaagctataacagagtctggcctcacaccaatacatgtggctgccttcatgggccacttgaacattgtcctccttctgctgcagaacggagcctctccagatgtcactaacattcgtggtgagacggcactacacatggcagcccgagccgggcaggtggaagtggtccgatgcctcctgagaaatggtgcccttgttgatgccagagccagggaggaacagacacctttacatattgcctcccgcctgggtaagacagaaattgtccagctgcttctacaacatatggctcatccagatgcggccactacaaatgggtacacaccactgcacatctctgcccgggagggccaggtggatgtggcatcagtcctattggaagcaggagcagcccactccttagctaccaagaagggttttactcccctgcatgtagcagccaagtatggaagcctggatgtggcaaaacttctcttgcaacgccgtgctgccgcagattctgcagggaagaacggccttaccccgctccatgttgctgctcattatgacaaccagaaggtggcgctgctgttactggagaagggtgcttcccctcatgccactgccaagaatggctatactccgttacatattgctgccaagaagaatcaaatgcagatagcttccacactcctgaactatggagcagagacaaacattgtgacaaagcaaggagtaactccactccatctggcctcgcaggaggggcacacagatatggttaccttgcttctggataagggagccaatatccacatgtcaactaagagtggactcacatccttacaccttgcagcccaggaagataaagtgaatgttgctgatattctcaccaagcatggagctgatcaggatgctcatacaaagcttggttacacacctttaattgtggcctgtcactatggaaatgtgaaaatggtcaactttcttctgaagcagggagcaaatgttaacgcaaaaaccaagaacggctacacgcctttgcaccaggccgctcagcagggtcacacgcacatcatcaacgtcctgctccagcatggggccaagcccaacgccaccactgcgaatggcaacactgccttggcgattgctaagcgtctgggctacatctccgtggtcgacaccctgaaggttgtgactgaggaggtcaccaccaccaccacaactattacagaaaaacacaaactaaatgtacctgagacgatgactgaggttcttgatgtttctgatgaagagggtgatgacacaatgactggtgatgggggagaataccttaggcctgaggacctaaaagaactgggtgatgactcactacccagcagtcagttcctggatggtatgaattacctgcgatacagcttggagggaggacgatctgacagccttcgatccttcagttccgacaggtctcacactctgagccatgcctcctacctgagggacagtgccgtgatggatgactcagttgtgattcccagtcaccaggtgtcaactctagccaaggaggcagaaaggaattcttatcgcctaagctggggcactgagaacttagacaacgtggctctttcttctagtcctattcattcaggtttcctggttagttttatggtggatgcccgaggtggtgctatgcgaggatgcagacacaatgggctccgaatcattattccacctcggaaatgtactgctccaacgcgagtcacctgccgactggtcaagcgccacagactggcaacaatgcctccaatggtggaaggagaaggcctggccagtcgcctgatcgaagttggaccttctggtgctcagttccttgggcctgtgatcgtggagatccctcactttgcggcccttcgaggaaaggaaagggaactggtggtcctgcgcagtgagaatggggacagctggaaagagcatttctgtgactacactgaagatgaattgaatgaaattcttaacggcatggatgaagtactggatagcccagaagacctagaaaagaaacgaatctgccgcatcatcacccgagacttcccacagtactttgcagtggtgtctcgtatcaaacaggacagcaatctgattggcccagaaggaggtgtactgagcagcacagtggtgccccaggtgcaggccgtcttcccagagggggcactcaccaagcggatccgcgtaggcctgcaggctcaacctatgcacagtgagctggttaagaagatcctaggcaacaaagctaccttcagccctatagtcactttggaacctagaagaagaaaattccacaaaccaattaccatgaccattcctgtccccaaagcttcaagtgatgtcatgttgaatggttttgggggagatgcaccaaccttaagattactatgcagcataacaggtggaaccacccctgcccagtgggaagatattacaggaactacgccattaacatttgtcaatgaatgtgtttcctttacaacaaacgtgtctgccaggttctggctgatagattgtcgacagatccaggaatccgttacttttgcatcacaagtatacagagaaattatctgcgtaccttatatggccaaatttgtagtgtttgccaaatcacatgaccccattgaagccaggttgaggtgtttctgcatgactgatgataaagtggataagacccttgaacaacaagaaaattttgctgaggtggccagaagcagggatgtggaggtgttagaaggaaaacccatctacgttgattgtttcggcaacttggtaccattaactaaaagtggccagcatcatatattcagtttttttgccttcaaagaaaatagacttcctctatttgtcaaggtacgcgatacgactcaggaaccttgcggacgactatcatttatgaaggagccaaaatccacgagaggcctggtgcatcaagctatttgcaacttaaacatcactttgccgatttatacaaaggaatcagagtcagatcaagaacaggaggaagagatcgatatgacatcagaaaaaaatgatgagacagaatctacagaaacatctgtcctgaaaagtcacctggttaatgaagttcctgtcctagcaagtccggacttgctctctgaagtttctgagatgaaacaagatttgatcaaaatgaccgccatcttgaccacagatgtgtctgataaggcaggttctattaaagtgaaggagctggtgaaggctgctgaggaagagccaggagagccttttgaaatcgttgaaagagttaaagaggacttagagaaagtgaatgaaatcctgagaagtggaacctgcacaagagatgaaagcagtgtgcagagctctcggtctgagagaggattagttgaagaggaatgggttattgtcagtgatgaggaaatagaagaggctaggcaaaaagcacctttagaaatcactgaatatccatgtgtagaagttagaatagataaagagatcaaaggaaaagtagagaaagactcaactgggctagtgaactaccttactgatgatctgaatacctgtgtgcctcttcccaaagagcagctgcagacagttcaagataaggcagggaagaaatgtgaggctctggctgttggcaggagctctgaaaaggaagggaaagacatacccccagatgagacacagagtacacagaaacagcacaaaccaagcttgggaataaagaagccagtaagaaggaaattaaaagaaaagcagaaacaaaaagaggaaggtttacaagctagtgcagagaaagctgaacttaaaaaaggtagttcagaagagtcattaggtgaagacccaggtttagcccctgaaccccttcccactgtcaaggccacatctcctttgatagaagaaactcccattggttccataaaggacaaagtaaaggcccttcagaagcgagtggaagatgaacagaaaggtcgaagcaagttgcccatcagagtcaaaggcaaggaggacgtgccaaaaaagaccacccacaggccacatccagctgcgtcaccctctctgaagtcagagagacatgcgccagggtctccctcccctaaaacagaaagacactctactctttcctcttccgcaaaaactgaaaggcaccctccagtatcaccatcaagtaaaactgagaaacactcacctgtgtcaccctctgcaaaaacggaaagacattcacctgcgtcatcatcgagtaaaactgagaaacactcacctgtatcaccctcgacaaaaactgaaaggcactctcctgtgtcatctacaaaaacagaaagacacccacctgtttcgccttcaggcaaaacagacaaacgtccacctgtatcgccctccgggaggacagaaaaacacccgccagtatcgcctgggagaacagaaaaacgcttgcctgtttcaccctccggaagaacggacaagcaccaacctgtatcaacagctgggaaaactgagaagcacctgcctgtgtcaccttctggcaaaacagaaaagcaaccacctgtatcccccacttcaaaaacagagaggattgaggaaaccatgtctgttcgggagctgatgaaggctttccagtcaggtcaggacccttctaaacataaaactggactctttgagcacaaatcagcaaaacaaaagcagccacaagagaaaggtaaagttcgggtagaaaaagaaaaggggccgatactaacccagagagaagctcagaaaacagagaatcagacaatcaaacgaggccagagactcccggtaacgggcacagcagaatccaaaagaggagttcgtgtttcctccataggagttaagaaagaagatgcagctggaggaaaggagaaagttctcagccacaaaatacctgaacctgttcagtcagtgcctgaagaagaaagccacagagagagcgaagtgcccaaagaaaagatggctgatgagcagggagacatggatctacagatcagcccagataggaaaacctccactgacttctctgaggtcattaagcaagagttggaagacaatgacaaataccaacaattccgcctgagtgaggagacagaaaaggcacagcttcacttagaccaagtactcactagtcctttcaacacaacatttccactcgactacatgaaagatgagttccttccagctctgtctttacaaagcggtgctttagatggcagttctgaaagcctaaagaatgagggggtagccggctctccgtgtggcagcctgatggaggggacccctcagattagttcagaagaaagctataagcatgaaggcctagcagagacccctgagacgagcccagaaagcctttctttctcaccaaagaaaagtgaggagcaaactggggaaacaaaggaaagcaccaagacagaaaccaccacagaaattcgttcagaaaaagagcatcccacgaccaaagacattactggtggctctgaagagcgaggtgccacagtcactgaggactcagagacctctactgagagttttcagaaagaggccactctaggctctcccaaagacacaagccctaaaagacaagatgattgcacaggcagctgtagtgtagcattagctaaagagacacctacaggactgactgaggaggcagcctgtgatgaaggtcaacgtacctttggtagttcagcccacaagacacaaactgatagtgaggctcaggaatccacagccacctcagacgagacaaaggccttgccgctgcctgaggcttctgtaaagacagatacaggaactgaatcaaaacctcagggagtcattagaagtccccaagggttagaacttgcactccctagccgagatagcgaagtcctcagcgctgtggctgatgactcattagcagtgagccacaaagactctctggaagccagccctgtgctagaagataactcttcacacaaaacccctgattctctggagccaagtcctctgaaagaatccccttgccgtgactctctggaaagcagccctgttgaaccaaagatgaaggctggaatttttccaagtcactttcctcttcctgcagctgttgccaaaacagaactcttgacggaagtggcctctgtgcggtcccggctactccgagaccctgatggcagtgctgaggatgacagtcttgagcagacatcgctcatggagagctcagggaagagccccctttctcctgacacccccagctctgaagaagtcagctatgaggttacacccaaaaccacagatgtaagtacaccaaaaccagctgtgattcatgaatgtgcagaggaggatgattcagaaaacggggagaaaaagaggttcacacctgaagaggagatgtttaaaatggtaaccaaaatcaaaatgtttgatgaacttgaacaagaagcaaagcagaaaagggactacaaaaaagaacccaaacaagaagaatcttcttcatcttctgacccagatgctgactgttcagtagatgtggatgaaccaaaacatacaggcagtggggaggatgaaagtggtgtccctgtgttagtaacttcggagagcaggaaggtgtcttcctcctcagaaagtgaacctgagttggcacagcttaaaaaaggtgctgactcaggccttttaccagaaccagtgattcgagtacaacctccttctccacttccatcaagcatggactccaattccagtccagaagaagtacaattccagcctgtcgtttccaaacaatatactttcaagatgaatgaagatactcaggaagagccaggcaaatcagaagaagaaaaagattctgaatcccatttagctgaagaccgtcatgctgtttccactgaggctgaagacaggtcttatgataagctaaacagagacactgatcagccaaaaatctgtgatggccatggatgtgaggccatgagtcctagcagctcagctcgtcctgtctcttcaggtctacagagtccgactggtgatgatgttgatgaacagccagtcatctataaagaatcattagctctccaaggcactcatgaaaaagacacagagggagaagagcttgatgtttctagagcagaatctccacaagcagattgccccagtgaaagcttttcatcttcatcctctttgcctcattgtttggtatctgaaggaaaagaattagatgaagacatatctgccacatcttctattcaaaaaacagaggtcacaaaaactgatgaaacatttgagaacttaccaaaggactgcccctctcaagactcatccattactactcaaacagatagattttccatggatgttcccgtgtctgacctagctgagaatgatgaaatctatgatccacaaatcactagcccttatgaaaatgtcccttcccaatcttttttctctagtgaagaaagcaaaacccaaacagatgcaaatcacaccacaagttttcactcttctgaagtgtattctgttaccatcacatcccctgttgaagacgttgtagtggcaagctcctctagtggaactgttttaagcaaagaatctaattttgagggccaggacataaaaatggaatcccaactggaaagtaccttgtgggaaatgcaatcagacagtgtctcttcatctttcgagcctactatgtccgctacaacaacagttgttggtgaacaaataagcaaagtcatcatcacaaaaactgatgtggattctgattcttggagtgaaattcgggaagacgatgaagcctttgaggctcgtgtgaaagaggaagaacaaaagatatttggtttgatggtagacagacaatcacagggtaccacccctgacaccactcctgctaggaccccaactgaagaggggaccccaacaagtgagcaaaacccatttctgtttcaggaaggaaaattgtttgaaatgacccgaagtggtgccattgatatgaccaaaaggtcctatgcagatgaaagttttcactttttccaaattggtcaagaatccagggaagagactctctctgaagatgtgaaagaaggggctactggggctgatcccctaccgctggagacatcagctgaatcactagcactttcagaatcaaaagaaacagtggatgatgaggcagacttacttccagatagcgtgagtgaggaagtagaggaaatacctgcttcggatgctcaacttaactcccaaatggggatttcagcctccactgaaacacctacaaaagaggctgttagtgtagggaccaaggacctccccaccgtgcaaacgggtgatatacctcctctctctggtgtaaagcagatatcctgccccgactcttctgaaccagctgtacaagtccagttagatttttccacactcaccaggtctgtttattcagataggggtgatgattctcccgattcttccccagaagaacagaaatcagtaatcgagattcctactgcacccatggagaatgtgccttttactgaaagcaaatccaaaattcctgtaaggactatgcccacttccaccccagcacctccatctgcagagtatgagagttcagtttctgaagattttctatccagtgtagatgaggaaaataaggcggatgaagcaaaaccaaagtccaaactccctgtcaaagtacccctccaaagagttgaacagcagctctcagatctagacacctctgtccagaagacagtggctcctcagggacaggacatggcaagcatcgcaccagataatagaagcaaatctgaatctgatgctagttctttggattcaaagaccaaatgcccagtaaaaacccgaagttacactgagacagaaacagagagcagagagagggccgaggaacttgagttagaatcagaagaaggggccacaagaccaaagatacttacatcccgattgccagttaagagcagaagcactacatcttcctgcagggggggcacgagccccacaaaagaaagtaaggagcatttctttgacctttacagaaattccatagaattctttgaggagattagtgatgaggcttccaaattagtggataggctgacacagtcagagagggagcaggaaatagtttcagacgatgaaagtagtagtgccctggaagtatcagtaattgaaaatctgccacctgttgagaccgagcactcagttcctgaggacatctttgacacaaggcccatttgggatgagtctattgagactctgattgaacgcatccctgatgaaaatggccatgaccatgctgaagatccacaggatgagcaggaacggatcgaggaaaggctggcttatattgctgatcaccttggcttcagctggacagaattagcaagagaactggatttcactgaggagcaaattcatcaaattcgaattgaaaatcccaactctcttcaagaccagagtcatgcactgttgaagtactggctagagagggatgggaaacatgctacagataccaacctcgttgaatgtctcaccaagatcaaccgaatggatattgttcatctcatggagaccaacacagaacctctccaggagcgcatcagtcatagttatgcagaaattgaacagaccattacactggatcatagtgaagggttctcggtacttcaagaggagttatgcactgcacagcacaagcagaaagaggagcaagctgtttctaaagaaagtgagacctgcgatcaccctcctatcgtctcagaggaagacatttctgttggttattccacttttcaggatggcgtccccaaaactgagggggacagctcagcaacagcactctttccccaaactcacaaggagcaagttcaacaggatttctcagggaaaatgcaagacctgcctgaagagtcatctctggaatatcagcaggaatattttgtgacaactccaggaacagaaacatcagagactcagaaggctatgatagtacccagctctcccagcaagacacctgaggaagttagcacccctgcagaggaggagaagctgtacctccagaccccaacatccagcgagcggggaggctctcccatcatacaagaacccgaagagccctcagagcacagagaggagagctctccgcggaaaaccagcctcgtaatagtggagtctgccgataaccagcctgagacctgtgaaagactcgatgaagatgcagcttttgaaaaggagctaacagaggaattaggggagctggaggccagctcagatgaggaggcgatggtaactaccagggttgtccgccggcgagtgattattcagggagacgatatgcctgaaatacccccagaaacagtcacagaagaagaatacattgatgagcatggacacaccgtggtaaagaaggttactaggaaaatcattaggcggtatgtatcctctgaaggcacagagaaagaagagattatggtgcagggaatgccacaggaacctgtcaacatcgaggaaggggatggctattccaaagttataaagcgtgttgtattgaagagtgacaccgagcagtcagaggacaacaatgagtaaagccatcacacagaagagggctgtggtgaaggaccagcatggaaaacgcattgacttggagcacctggaggatgtaccagaagcactagaccaggacgacctccagcgcgatctccagcagctccttcggcatttctgcaaggaggacttgaagcaagaggccaagtgaggggctgcccagttctcacaccagaaaccacacattcactcaatatgcagcttcctgtttcagtaggggagtgacctaactggcctaattaatgggataccccgacatttccactgttagcaaatatacggcattttgctttagttttcccccatcctctttaactataaagctaatttgtgaccaaagatggcatccttcatactggatgctgtatccaatactttgttgtgtctgtgctaacctgggaactggccacctccattgttctttgcttctgcacaagatccatgaaaatccattgatcagaagaacttcacctgcagacctcttcaagtgacactatgtaggaatccttccaaggaatatctatgtacaatgtatatagctgaaatgctcagatgaacaacatattaaaattaaaaccactgcctattgtaactacactgggcatcagaataaaaggcctctagaaattgctgaacaatggttaattaagatattgctaacacaatcgagtgataatacagttttactgcaaaagaagcacttcaaacctattatgtccttagaacttccagagtagccactgctcccagttaaaggtgggtcagtagccttgcagaactgtcctgagaagttattgctggtgctggccagccatggcttaggactccaacagccactctgagggaggggagaagggagcagaggccacgcagaatgaaccgatggggtattcagttgctggcagctacattgtgtggcattctagcatcttcaggtctttagatcttggacaagttggcagggtattttaaaagctataactactgtagttttccagttttcattgctgctttagcaaaccacgctgtcttacagtggtactttcttctggccactgcactgtagataattcattggaaacaagatttacccactacataaaaggttaaactccttcagtatgttggagtggtttctttttttttttctttctttcttttttttcttcaggtttatatcttctctaatacctgcatgtggcgtttaaaaatcaagaccacggtcaaacccctcttctaatcacattaattgtttccattctttttaccctgagtgagcacttttcactttccagctaggtctgtttttcagcttgcagacaagattgagaaatccttgaaaatttggttttggttaaaatttttggtttatttatttgaaatccacactcccttggaaactcttaagtgcatttgtgcacttctgtttgtttgtctcaaagaagggactgtaacaatctgagtaatttccatgtcctcttccttattcctctagtggttgaagctgtgtagcattttaacatatatatattcacaaatatattcatataaacagtatacattttgaatcagtcatttgttaaagaaaagtatattcaatgaagatgaaatttaaataaaaaaggacagagtctatcctccagggattgaacattttccaattatctggtcttttcctgttgtgcaaaaatgactcattgctccgaatgtcaaaaacaaatgcgacaaacaatggcacttcatcatttaaagtaatgttgccaagagaaaaaatttcctgggagggaggtttcccacaagccaaatctcctaagcctcaaatgctagcactttttggcagttggataggaaatgagacattctttggcagccaaaataagagaggccgatggtgaaactttttgagacaccctatggccttcttgtcaaaaccttcactggagctcaagaaaagcatttctgttgtgttatttgcagtgcagatgatgtctgtgtaacaacataatggttattcacctttttttgattttgatttttgctgtgttatcaaaaacttgaatactgtgagaagaagtgaattttcagttgacgaatcagcatcttgttcccatggtgataacactaattgaatatatctatgagggcatgtattagttaatggaaaaaaaaatacaacactaacaatacatagctgcaatgtgtacaatggctgatttaattaaataaaatgtacaagtgttaaatgtgaaaaaaaaaaat

SEQ ID NO: 403594 - DNA, 4889 bp, Homo sapiens
ttcattcttttaaatttttttaaccaatatttcttttgaataggaagctctcacatggcaatctataggtggatgcagaagttgtcagtgtctatataacaggttgggaagggtgatgagtggtgactgctgagacctggaggggaagtaggaatatatttaaaatcctaaatcttgacatcacaaaacaaaaaagtcctatacttctttttccccaccacagttgttaaattttatatttgcttaatgaattattcttgtaaatagagatcagccatctagagaaaagctcatagcattaggtttgacattgtaaatttttattaaatgaataaaataaaatattatttgtatatttaaatatacatgttattccaagaattaaaatatagaaatgggtatatcaacccaaatgagcataatttcattgtattttgatggtgcagaatgtattttggggtttgtattgctgattagtagtgagtcagtggaggcagtatgccaataagaacgacaaagaaatatgtactgctgcgggcaagccacctgagtgttaaagaaagatgactgagctttggctgatttcagtgagctttcagtgtgctctaagagaaagcattaacttcattattacattttatttctaagtcaagacatatcagacacagctattaatgctgtgatagtccagtacaattttctaatttgtaactcaaaaagaaaaaaatcccagacattgtacattgaaaatataccttagtatttagtagctcttggctgggcaccatggcccacacctgtaatcccagcactttgggagaccaaggcaggaggattgcttgagtctagtagttcaagaccagcctgagcaacatagcaagaccttgtctctattaaaaaaaaaaaaaaagaaagaatttagtagctctttgttagaataatgcttctaaatattgcctgtgtattgaaaattttccaccatatgcttatttgtagcttttagtattttcaaccaatatctgtaatgattgggatattatcatcactatttctaaagacaaatgccatccagttcatttaaggtcaaactttgagactgccgtggtgacctagtatctggaattagtatatttataatgttggttcttttgtctcttgaatctataaactttgtacttaagccaatcttcttttctgcctgtcttctataaactgttagtaataaaaaaagagtatgttgactgtatgcttgcctgttgatgcttgttgaaagggtatttatttactctttccttttcttctaaatactctctactcttccttctctcttttttccatcttgcatggcatcttggggcggaaaggaatcagagtcagatcaagaacaggaggaagagatcgatatgacatcagaaaaaaatccacaggatgagcaggaacggatcgaggaaaggctggcttatattgctgatcaccttggcttcagctggacagaattagcaagagaactggatttcactgaggagcaaattcatcaaattcgaattgaaaatcccaactctcttcaagaccagagtcatgcactgttgaagtactggctagagagggatgggaaacatgctacagataccaacctcgttgaatgtctcaccaagatcaaccgaatggatattgttcatctcatggagaccaacacagaacctctccaggagcgcatcagtcatagttatgcagaaattgaacagaccattacactggatcatagtgaagggttctcggtacttcaagaggagttatgcactgcacagcacaagcagaaagaggagcaagctgtttctaaagaaagtgagacctgcgatcaccctcctatcgtctcagaggaagacatttctgttggttattccacttttcaggatggcgtccccaaaactgagggggacagctcagcaacagcactctttccccaaactcacaaggagcaagttcaacaggatttctcagggaaaatgcaagacctgcctgaagagtcatctctggaatatcagcaggaatattttgtgacaactccaggaacagaaacatcagagactcagaaggctatgatagtacccagctctcccagcaagacacctgaggaagttagcacccctgcagaggaggagaagctgtacctccagaccccaacatccagcgagcggggaggctctcccatcatacaagaacccgaagagccctcagagcacagagaggagagctctccgcggaaaaccagcctcgtaatagtggagtctgccgataaccagcctgagacctgtgaaagactcgatgaagatgcagcttttgaaaagggagacgatatgcctgaaatacccccagaaacagtcacagaagaagaatacattgatgagcatggacacaccgtggtaaagaaggttactaggaaaatcattaggcggtatgtatcctctgaaggcacagagaaagaagagattatggtgcagggaatgccacaggaacctgtcaacatcgaggaaggggatggctattccaaagttataaagcgtgttgtattgaagagtgacaccgagcagtcagaggacaacaatgagtaaagccatcacacagaagagggctgtggtgaaggaccagcatggaaaacgcattgacttggagcacctggaggatgtaccagaagcactagaccaggacgacctccagcgcgatctccagcagctccttcggcatttctgcaaggaggacttgaagcaagaggccaagtgaggggctgcccagttctcacaccagaaaccacacattcactcaatatgcagcttcctgtttcagtaggggagtgacctaactggcctaattaatgggataccccgacatttccactgttagcaaatatacggcattttgctttagttttcccccatcctctttaactataaagctaatttgtgaccaaagatggcatccttcatactggatgctgtatccaatactttgttgtgtctgtgctaacctgggaactggccacctccattgttctttgcttctgcacaagatccatgaaaatccattgatcagaagaacttcacctgcagacctcttcaagtgacactatgtaggaatccttccaaggaatatctatgtacaatgtatatagctgaaatgctcagatgaacaacatattaaaattaaaaccactgcctattgtaactacactgggcatcagaataaaaggcctctagaaattgctgaacaatggttaattaagatattgctaacacaatcgagtgataatacagttttactgcaaaagaagcacttcaaacctattatgtccttagaacttccagagtagccactgctcccagttaaaggtgggtcagtagccttgcagaactgtcctgagaagttattgctggtgctggccagccatggcttaggactccaacagccactctgagggaggggagaagggagcagaggccacgcagaatgaaccgatggggtattcagttgctggcagctacattgtgtggcattctagcatcttcaggtctttagatcttggacaagttggcagggtattttaaaagctataactactgtagttttccagttttcattgctgctttagcaaaccacgctgtcttacagtggtactttcttctggccactgcactgtagataattcattggaaacaagatttacccactacataaaaggttaaactccttcagtatgttggagtggtttctttttttttttctttctttcttttttttcttcaggtttatatcttctctaatacctgcatgtggcgtttaaaaatcaagaccacggtcaaacccctcttctaatcacattaattgtttccattctttttaccctgagtgagcacttttcactttccagctaggtctgtttttcagcttgcagacaagattgagaaatccttgaaaatttggttttggttaaaatttttggtttatttatttgaaatccacactcccttggaaactcttaagtgcatttgtgcacttctgtttgtttgtctcaaagaagggactgtaacaatctgagtaatttccatgtcctcttccttattcctctagtggttgaagctgtgtagcattttaacatatatatattcacaaatatattcatataaacagtatacattttgaatcagtcatttgttaaagaaaagtatattcaatgaagatgaaatttaaataaaaaaggacagagtctatcctccagggattgaacattttccaattatctggtcttttcctgttgtgcaaaaatgactcattgctccgaatgtcaaaaacaaatgcgacaaacaatggcacttcatcatttaaagtaatgttgccaagagaaaaaatttcctgggagggaggtttcccacaagccaaatctcctaagcctcaaatgctagcactttttggcagttggataggaaatgagacattctttggcagccaaaataagagaggccgatggtgaaactttttgagacaccctatggccttcttgtcaaaaccttcactggagctcaagaaaagcatttctgttgtgttatttgcagtgcagatgatgtctgtgtaacaacataatggttattcacctttttttgattttgatttttgctgtgttatcaaaaacttgaatactgtgagaagaagtgaattttcagttgacgaatcagcatcttgttcccatggtgataacactaattgaatatatctatgagggcatgtattagttaatggaaaaaaaaatacaacactaacaatacatagctgcaatgtgtacaatggctgatttaattaaataaaatgtacaagtgttaaatgtgaaaaaaaaaaat

SEQ ID NO: 403595 - DNA, 7130 bp, Homo sapiens
ctgtacaggcggcacggtttgatggcagagatattttctttccaaactgttcaaaatgatgaacgaagatgcagctcagaaaagcgacagtggagagaagttcaacggcagtagtcagaggagaaaaagacccaagaagtctgacagcaatgcaagcttcctccgtgctgccagagcaggcaacctggacaaagttgtggaatatctgaaggggggcatagacatcaatacctgcaatcagaatggactcaacgctctccatctggctgccaaggaaggccacgtggggctggtgcaggagctgctgggaagagggtcctctgtggattctgccactaagaagggaaataccgctcttcacattgcatctttggctggacaagcagaagttgtcaaagttcttgttaaggaaggagccaatattaatgcacagtctcagaatggctttactcctttatacatggctgcccaagagaatcacattgatgttgtaaaatatttgctggaaaatggagctaatcagagcactgctacagaggatggctttactcctctagctgtggcactccagcaaggacacaaccaggcggtggccatcctcttggagaatgacaccaaagggaaagtgaggctgccagctctgcatattgccgctaggaaagacgacaccaaatctgccgcacttctgcttcagaatgaccacaatgctgacgtacaatccaagatgatggtgaataggacaactgagagtggttttacccctttgcacatagctgcacattacggaaatgtcaacgtggcaactcttcttctaaaccggggagctgctgtggacttcacagccaggaatggaatcactcctctgcatgtggcttccaaaagaggaaatacaaacatggtgaagctcttactggatcgaggcggtcagatcgatgccaaaactagggatgggttgacaccacttcactgtgctgcacgaagtgggcatgaccaagtggtggaacttctgttggaacggggtgcccccttgctggcaaggactaagaatgggctgtctccactacacatggctgcccagggagaccacgtggaatgtgtgaagcacctgttacagcacaaggcacctgttgatgatgtcaccctagactacctgacagccctccacgttgctgcgcactgtggccactaccgtgtaaccaaactccttttagacaagagagccaatccgaacgccagagccctgaatggttttactccactgcacattgcctgcaagaaaaaccgcatcaaagtcatggaactgctggtgaaatatggggcttcaatccaagctataacagagtctggcctcacaccaatacatgtggctgccttcatgggccacttgaacattgtcctccttctgctgcagaacggagcctctccagatgtcactaacattcgtggtgagacggcactacacatggcagcccgagccgggcaggtggaagtggtccgatgcctcctgagaaatggtgcccttgttgatgccagagccagggaggaacagacacctttacatattgcctcccgcctgggtaagacagaaattgtccagctgcttctacaacatatggctcatccagatgcggccactacaaatgggtacacaccactgcacatctctgcccgggagggccaggtggatgtggcatcagtcctattggaagcaggagcagcccactccttagctaccaagaagggttttactcccctgcatgtagcagccaagtatggaagcctggatgtggcaaaacttctcttgcaacgccgtgctgccgcagattctgcagggaagaacggccttaccccgctccatgttgctgctcattatgacaaccagaaggtggcgctgctgttactggagaagggtgcttcccctcatgccactgccaagaatggctatactccgttacatattgctgccaagaagaatcaaatgcagatagcttccacactcctgaactatggagcagagacaaacattgtgacaaagcaaggagtaactccactccatctggcctcgcaggaggggcacacagatatggttaccttgcttctggataagggagccaatatccacatgtcaactaagagtggactcacatccttacaccttgcagcccaggaagataaagtgaatgttgctgatattctcaccaagcatggagctgatcaggatgctcatacaaagcttggttacacacctttaattgtggcctgtcactatggaaatgtgaaaatggtcaactttcttctgaagcagggagcaaatgttaacgcaaaaaccaagaacggctacacgcctttgcaccaggccgctcagcagggtcacacgcacatcatcaacgtcctgctccagcatggggccaagcccaacgccaccactgcgaatggcaacactgccttggcgattgctaagcgtctgggctacatctccgtggtcgacaccctgaaggttgtgactgaggaggtcaccaccaccaccacaactattacagaaaaacacaaactaaatgtacctgagacgatgactgaggttcttgatgtttctgatgaagagggtgatgacacaatgactggtgatgggggagaataccttaggcctgaggacctaaaagaactgggtgatgactcactacccagcagtcagttcctggatggtatgaattacctgcgatacagcttggagggaggacgatctgacagccttcgatccttcagttccgacaggtctcacactctgagccatgcctcctacctgagggacagtgccgtgatggatgactcagttgtgattcccagtcaccaggtgtcaactctagccaaggaggcagaaaggaattcttatcgcctaagctggggcactgagaacttagacaacgtggctctttcttctagtcctattcattcaggtttcctggttagttttatggtggatgcccgaggtggtgctatgcgaggatgcagacacaatgggctccgaatcattattccacctcggaaatgtactgctccaacgcgagtcacctgccgactggtcaagcgccacagactggcaacaatgcctccaatggtggaaggagaaggcctggccagtcgcctgatcgaagttggaccttctggtgctcagttccttgggcctgtgatcgtggagatccctcactttgcggcccttcgaggaaaggaaagggaactggtggtcctgcgcagtgagaatggggacagctggaaagagcatttctgtgactacactgaagatgaattgaatgaaattcttaacggcatggatgaagtactggatagcccagaagacctagaaaagaaacgaatctgccgcatcatcacccgagacttcccacagtactttgcagtggtgtctcgtatcaaacaggacagcaatctgattggcccagaaggaggtgtactgagcagcacagtggtgccccaggtgcaggccgtcttcccagagggggcactcaccaagcggatccgcgtaggcctgcaggctcaacctatgcacagtgagctggttaagaagatcctaggcaacaaagctaccttcagccctatagtcactttggaacctagaagaagaaaattccacaaaccaattaccatgaccattcctgtccccaaagcttcaagtgatgtcatgttgaatggttttgggggagatgcaccaaccttaagattactatgcagcataacaggtggaaccacccctgcccagtgggaagatattacaggaactacgccattaacatttgtcaatgaatgtgtttcctttacaacaaacgtgtctgccaggttctggctgatagattgtcgacagatccaggaatccgttacttttgcatcacaagtatacagagaaattatctgcgtaccttatatggccaaatttgtagtgtttgccaaatcacatgaccccattgaagccaggttgaggtgtttctgcatgactgatgataaagtggataagacccttgaacaacaagaaaattttgctgaggtggccagaagcagggatgtggaggtgttagaaggaaaacccatctacgttgattgtttcggcaacttggtaccattaactaaaagtggccagcatcatatattcagtttttttgccttcaaagaaaatagacttcctctatttgtcaaggtacgcgatacgactcaggaaccttgcggacgactatcatttatgaaggagccaaaatccacgagaggcctggtgcatcaagctatttgcaacttaaacatcactttgccgatttatacaaaggaatcagagtcagatcaagaacaggaggaagagatcgatatgacatcagaaaaaaatgatgagacagaatctacagaaacatctgtcctgaaaagtcacctggttaatgaagttcctgtcctagcaagtccggacttgctctctgaagtttctgagatgaaacaagatttgatcaaaatgaccgccatcttgaccacagatgtgtctgataaggcaggttctattaaagtgaaggagctggtgaaggctgctgaggaagagccaggagagccttttgaaatcgttgaaagagttaaagaggacttagagaaagtgaatgaaatcctgagaagtggaacctgcacaagagatgaaagcagtgtgcagagctctcggtctgagagaggattagttgaagaggaatgggttattgtcagtgatgaggaaatagaagaggctaggcaaaaagcacctttagaaatcactgaatatccatgtgtagaagttagaatagataaagagatcaaaggaaaagtagagaaagactcaactgggctagtgaactaccttactgatgatctgaatacctgtgtgcctcttcccaaagagcagctgcagacagttcaagataaggcagggaagaaatgtgaggctctggctgttggcaggagctctgaaaaggaagggaaagacatacccccagatgagacacagagtacacagaaacagcacaaaccaagcttgggaataaagaagccagtaagaaggaaattaaaagaaaagcagaaacaaaaagaggaaggtttacaagctagtgcagagaaagctgaacttaaaaaaggtagttcagaagagtcattaggtgaagacccaggtttagcccctgaaccccttcccactgtcaaggccacatctcctttgatagaagaaactcccattggttccataaaggacaaagtaaaggcccttcagaagcgagtggaagatgaacagaaaggtcgaagcaagttgcccatcagagtcaaaggcaaggaggacgtgccaaaaaagaccacccacaggccacatccagctgcgtcaccctctctgaagtcagagagacatgcgccagggtctccctcccctaaaacagaaagacactctactctttcctcttccgcaaaaactgaaaggcaccctccagtatcaccatcaagtaaaactgagaaacactcacctgtgtcaccctctgcaaaaacggaaagacattcacctgcgtcatcatcgagtaaaactgagaaacactcacctgtatcaccctcgacaaaaactgaaaggcactctcctgtgtcatctacaaaaacagaaagacacccacctgtttcgccttcaggcaaaacagacaaacgtccacctgtatcgccctccgggaggacagaaaaacacccgccagtatcgcctgggagaacagaaaaacgcttgcctgtttcaccctccggaagaacggacaagcaccaacctgtatcaacagctgggaaaactgagaagcacctgcctgtgtcaccttctggcaaaacagaaaagcaaccacctgtatcccccacttcaaaaacagagaggattgaggaaaccatgtctgttcgggagctgatgaaggctttccagtcaggtcaggacccttctaaacataaaactggactctttgagcacaaatcagcaaaacaaaagcagccacaagagaaaggtaaagttcgggtagaaaaagaaaaggggccgatactaacccagagagaagctcagaaaacagagaatcagacaatcaaacgaggccagagactcccggtaacgggcacagcagaatccaaaagaggagttcgtgtttcctccataggagttaagaaagaagatgcagctggaggaaaggagaaagttctcagccacaaaatacctgaacctgttcagtcagtgcctgaagaagaaagccacagagagagcgaagtgcccaaagaaaagatggctgatgagcagggagacatggatctacagatcagcccagataggaaaacctccactgacttctctgaggtcattaagcaagagttggaagacaatgacaaataccaacaattccgcctgagtgaggagacagaaaaggcacagcttcacttagaccaagtactcactagtcctttcaacacaacatttccactcgactacatgaaagatgagttccttccagctctgtctttacaaagcggtgctttagatggcagttctgaaagcctaaagaatgagggggtagccggctctccgtgtggcagcctgatggaggggacccctcagattagttcagaagaaagctataagcatgaaggcctagcagagacccctgagacgagcccagaaagcctttctttctcaccaaagaaaagtgaggagcaaactggggaaacaaaggaaagcaccaagacagaaaccaccacagaaattcgttcagaaaaagagcatcccacgaccaaagacattactggtggctctgaagagcgaggtgccacagtcactgaggactcagagacctctactgagagttttcagaaagaggccactctaggctctcccaaagacacaagccctaaaagacaagatgattgcacaggcagctgtagtgtagcattagctaaagagacacctacaggactgactgaggaggcagcctgtgatgaaggtcaacgtacctttggtagttcagcccacaagacacaaaaaaacactacatatcaaaacaaagaacgcagtgaaattacacagaggtatctcaagattgttcagatgttacagatcaatg

SEQ ID NO: 403596 - DNA, 778 bp, Homo sapiens
ctccttttagacaagagagccaatccgaacgccagagccctggtaaacttggcccagtccacattaactgaatacagattgagacaaacaaacccacattcattgaccaacatgcatacaccagcaatgcaaggttacagatatgtagttaatcctgctaaatttgtcatccttcacaatcagcctgtgtacttcatacattcatagtttgttagcaaatgctggtgagcaaagatgtatttaagagaacaccaatgtaacatttctgaaactagtgagttgcaaacagatagatatgaaacctttggagtgataagcagttttaaatggaaaatagaagttgaaaaataggaaattacaaaataaattctagatacctctagataaagttagaacacgagtatgaaaagttgaatttattaatctctttttggaaaaaaaattaatggtgaatatatttgactatgtaagggggtataaaatgtaagtctatgcagagttcaattgaaaattttcattgttgacttgattactcaaccataggctaatagaaaagttatgcctagtgtgttacggcttcagggagcattttatatacaccatttcaggaactgctcaagagaaaactgcaagaggctgtccctagagcagctttatgtctccccagttctgatattgaataagtcttccttgcttcacttattttctaacaataatcattggaagtattagacatgtactaatttatgcctcttgtgtcctaattcccaaactaaaa

SEQ ID NO: 403597 - DNA, 344 bp, Homo sapiens
gcccagaaggaggtgtactgagcagcacagtggtgccccaggtgcaggccgtcttcccagagggggcactcaccaagcggatccgcgtaggcctgcaggtatgcccatgttagatgcaaatgatcctaacaggattgtattctaatgattaaaaattagctttgtcaaggactgttacctttgttttataatcacaccaaaaaggaaggtagcattaatggtaaagctaaagtcaaaatccatatttattggttactaatctatttaaaaattcaacttatatttggacaattaaccaaaattaatctccagctacaaatgttttcttcttgtaaaaaaaaaaa

SEQ ID NO: 403598 - DNA, 332 bp, Homo sapiens
gagccctcagagcacagagaggagagctctccgcggaaaaccagcctcgtaatagtggagtctgccgataaccagcctgagacctgtgaaagactcgatgaagatgcagcttttgaaaaggtaagacattcctctccactttctcgcccacctgtaacaaagctacaaatcttccagtttccatttctatgatggtttattttttgcacttcaaaacaaaaaagttaaccaaattaattaacctggcacatggaaaccctcaatcccttttaaaatctgagagccgatgaatcttgaagaaatggcgcacagttccagtgctgttgatttga

SEQ ID NO: 403599 - DNA, 7897 bp, Homo sapiens
ctgtacaggcggcacggtttgatggcagagatattttctttccaaactgttcaaaatgatgaacgaagatgcagctcagaaaagcgacagtggagagaagttcaacggcagtagtcagaggagaaaaagacccaagaagtctgacagcaatgcaagcttcctccgtgctgccagagcaggcaacctggacaaagttgtggaatatctgaaggggggcatagacatcaatacctgcaatcagaatggactcaacgctctccatctggctgccaaggaaggccacgtggggctggtgcaggagctgctgggaagagggtcctctgtggattctgccactaagaagggaaataccgctcttcacattgcatctttggctggacaagcagaagttgtcaaagttcttgttaaggaaggagccaatattaatgcacagtctcagaatggctttactcctttatacatggctgcccaagagaatcacattgatgttgtaaaatatttgctggaaaatggagctaatcagagcactgctacagaggatggctttactcctctagctgtggcactccagcaaggacacaaccaggcggtggccatcctcttggagaatgacaccaaagggaaagtgaggctgccagctctgcatattgccgctaggaaagacgacaccaaatctgccgcacttctgcttcagaatgaccacaatgctgacgtacaatccaagatgatggtgaataggacaactgagagtggttttacccctttgcacatagctgcacattacggaaatgtcaacgtggcaactcttcttctaaaccggggagctgctgtggacttcacagccaggaatggaatcactcctctgcatgtggcttccaaaagaggaaatacaaacatggtgaagctcttactggatcgaggcggtcagatcgatgccaaaactagggatgggttgacaccacttcactgtgctgcacgaagtgggcatgaccaagtggtggaacttctgttggaacggggtgcccccttgctggcaaggactaagaatgggctgtctccactacacatggctgcccagggagaccacgtggaatgtgtgaagcacctgttacagcacaaggcacctgttgatgatgtcaccctagactacctgacagccctccacgttgctgcgcactgtggccactaccgtgtaaccaaactccttttagacaagagagccaatccgaacgccagagccctgaatggttttactccactgcacattgcctgcaagaaaaaccgcatcaaagtcatggaactgctggtgaaatatggggcttcaatccaagctataacagagtctggcctcacaccaatacatgtggctgccttcatgggccacttgaacattgtcctccttctgctgcagaacggagcctctccagatgtcactaacattcgtggtgagacggcactacacatggcagcccgagccgggcaggtggaagtggtccgatgcctcctgagaaatggtgcccttgttgatgccagagccagggaggaacagacacctttacatattgcctcccgcctgggtaagacagaaattgtccagctgcttctacaacatatggctcatccagatgcggccactacaaatgggtacacaccactgcacatctctgcccgggagggccaggtggatgtggcatcagtcctattggaagcaggagcagcccactccttagctaccaagaagggttttactcccctgcatgtagcagccaagtatggaagcctggatgtggcaaaacttctcttgcaacgccgtgctgccgcagattctgcagggaagaacggccttaccccgctccatgttgctgctcattatgacaaccagaaggtggcgctgctgttactggagaagggtgcttcccctcatgccactgccaagaatggctatactccgttacatattgctgccaagaagaatcaaatgcagatagcttccacactcctgaactatggagcagagacaaacattgtgacaaagcaaggagtaactccactccatctggcctcgcaggaggggcacacagatatggttaccttgcttctggataagggagccaatatccacatgtcaactaagagtggactcacatccttacaccttgcagcccaggaagataaagtgaatgttgctgatattctcaccaagcatggagctgatcaggatgctcatacaaagcttggttacacacctttaattgtggcctgtcactatggaaatgtgaaaatggtcaactttcttctgaagcagggagcaaatgttaacgcaaaaaccaagaacggctacacgcctttgcaccaggccgctcagcagggtcacacgcacatcatcaacgtcctgctccagcatggggccaagcccaacgccaccactgcgaatggcaacactgccttggcgattgctaagcgtctgggctacatctccgtggtcgacaccctgaaggttgtgactgaggaggtcaccaccaccaccacaactattacagaaaaacacaaactaaatgtacctgagacgatgactgaggttcttgatgtttctgatgaagagggtgatgacacaatgactggtgatgggggagaataccttaggcctgaggacctaaaagaactgggtgatgactcactacccagcagtcagttcctggatggtatgaattacctgcgatacagcttggagggaggacgatctgacagccttcgatccttcagttccgacaggtctcacactctgagccatgcctcctacctgagggacagtgccgtgatggatgactcagttgtgattcccagtcaccaggtgtcaactctagccaaggaggcagaaaggaattcttatcgcctaagctggggcactgagaacttagacaacgtggctctttcttctagtcctattcattcaggtttcctggttagttttatggtggatgcccgaggtggtgctatgcgaggatgcagacacaatgggctccgaatcattattccacctcggaaatgtactgctccaacgcgagtcacctgccgactggtcaagcgccacagactggcaacaatgcctccaatggtggaaggagaaggcctggccagtcgcctgatcgaagttggaccttctggtgctcagttccttggtaaacttcacctgccaacggctcctcccccacttaatgagggagaaagtttggtcagccgcattcttcagctggggcctcctggaaccaaattccttgggcctgtgatcgtggagatccctcactttgcggcccttcgaggaaaggaaagggaactggtggtcctgcgcagtgagaatggggacagctggaaagagcatttctgtgactacactgaagatgaattgaatgaaattcttaacggcatggatgaagtactggatagcccagaagacctagaaaagaaacgaatctgccgcatcatcacccgagacttcccacagtactttgcagtggtgtctcgtatcaaacaggacagcaatctgattggcccagaaggaggtgtactgagcagcacagtggtgccccaggtgcaggccgtcttcccagagggggcactcaccaagcggatccgcgtaggcctgcaggctcaacctatgcacagtgagctggttaagaagatcctaggcaacaaagctaccttcagccctatagtcactttggaacctagaagaagaaaattccacaaaccaattaccatgaccattcctgtccccaaagcttcaagtgatgtcatgttgaatggttttgggggagatgcaccaaccttaagattactatgcagcataacaggtggaaccacccctgcccagtgggaagatattacaggaactacgccattaacatttgtcaatgaatgtgtttcctttacaacaaacgtgtctgccaggttctggctgatagattgtcgacagatccaggaatccgttacttttgcatcacaagtatacagagaaattatctgcgtaccttatatggccaaatttgtagtgtttgccaaatcacatgaccccattgaagccaggttgaggtgtttctgcatgactgatgataaagtggataagacccttgaacaacaagaaaattttgctgaggtggccagaagcagggatgtggaggtgttagaaggaaaacccatctacgttgattgtttcggcaacttggtaccattaactaaaagtggccagcatcatatattcagtttttttgccttcaaagaaaatagacttcctctatttgtcaaggtacgcgatacgactcaggaaccttgcggacgactatcatttatgaaggagccaaaatccacgagaggcctggtgcatcaagctatttgcaacttaaacatcactttgccgatttatacaaaggaatcagagtcagatcaagaacaggaggaagagatcgatatgacatcagaaaaaaatccacaggatgagcaggaacggatcgaggaaaggctggcttatattgctgatcaccttggcttcagctggacagaattagcaagagaactggatttcactgaggagcaaattcatcaaattcgaattgaaaatcccaactctcttcaagaccagagtcatgcactgttgaagtactggctagagagggatgggaaacatgctacagataccaacctcgttgaatgtctcaccaagatcaaccgaatggatattgttcatctcatggagaccaacacagaacctctccaggagcgcatcagtcatagttatgcagaaattgaacagaccattacactggatcatagtgaagggttctcggtacttcaagaggagttatgcactgcacagcacaagcagaaagaggagcaagctgtttctaaagaaagtgagacctgcgatcaccctcctatcgtctcagaggaagacatttctgttggttattccacttttcaggatggcgtccccaaaactgagggggacagctcagcaacagcactctttccccaaactcacaaggagcaagttcaacaggatttctcagggaaaatgcaagacctgcctgaagagtcatctctggaatatcagcaggaatattttgtgacaactccaggaacagaaacatcagagactcagaaggctatgatagtacccagctctcccagcaagacacctgaggaagttagcacccctgcagaggaggagaagctgtacctccagaccccaacatccagcgagcggggaggctctcccatcatacaagaacccgaagagccctcagagcacagagaggagagctctccgcggaaaaccagcctcgtaatagtggagtctgccgataaccagcctgagacctgtgaaagactcgatgaagatgcagcttttgaaaagggagacgatatgcctgaaatacccccagaaacagtcacagaagaagaatacattgatgagcatggacacaccgtggtaaagaaggttactaggaaaatcattaggcggtatgtatcctctgaaggcacagagaaagaagagattatggtgcagggaatgccacaggaacctgtcaacatcgaggaaggggatggctattccaaagttataaagcgtgttgtattgaagagtgacaccgagcagtcagaggacaacaatgagtaaagccatcacacagaagagggctgtggtgaaggaccagcatggaaaacgcattgacttggagcacctggaggatgtaccagaagcactagaccaggacgacctccagcgcgatctccagcagctccttcggcatttctgcaaggaggacttgaagcaagaggccaagtgaggggctgcccagttctcacaccagaaaccacacattcactcaatatgcagcttcctgtttcagtaggggagtgacctaactggcctaattaatgggataccccgacatttccactgttagcaaatatacggcattttgctttagttttcccccatcctctttaactataaagctaatttgtgaccaaagatggcatccttcatactggatgctgtatccaatactttgttgtgtctgtgctaacctgggaactggccacctccattgttctttgcttctgcacaagatccatgaaaatccattgatcagaagaacttcacctgcagacctcttcaagtgacactatgtaggaatccttccaaggaatatctatgtacaatgtatatagctgaaatgctcagatgaacaacatattaaaattaaaaccactgcctattgtaactacactgggcatcagaaatcgagtgataatacagttttactgcaaaagaagcacttcaaacctattatgtccttagaacttccagagtagccactgctcccagttaaaggtgggtcagtagccttgcagaactgtcctgagaagttattgctggtgctggccagccatggcttaggactccaacagccactctgagggaggggagaagggagcagaggccacgcagaatgaaccgatggggtattcagttgctggcagctacattgtgtggcattctagcatcttcaggtctttagatcttggacaagttggcagggtattttaaaagctataactactgtagttttccagttttcattgctgctttagcaaaccacgctgtcttacagtggtactttcttctggccactgcactgtagataattcattggaaacaagatttacccactacataaaaggttaaactccttcagtatgttggagtggtttctttttttttttctttctttcttttttttcttcaggtttatatcttctctaatacctgcatgtggcgtttaaaaatcaagaccacggtcaaacccctcttctaatcacattaattgtttccattctttttaccctgagtgagcacttttcactttccagctaggtctgtttttcagcttgcagacaagattgagaaatccttgaaaatttggttttggttaaaatttttggtttatttatttgaaatccacactcccttggaaactcttaagtgcatttgtgcacttctgtttgtttgtctcaaagaagggactgtaacaatctgagtaatttccatgtcctcttccttattcctctagtggttgaagctgtgtagcattttaacatatatatattcacaaatatattcatataaacagtatacattttgaatcagtcatttgttaaagaaaagtatattcaatgaagatgaaatttaaataaaaaaggacagagtctatcctccagggattgaacattttccaattatctggtcttttcctgttgtgcaaaaatgactcattgctccgaatgtcaaaaacaaatgcgacaaacaatggcacttcatcatttaaagtaatgttgccaagagaaaaaatttcctgggagggaggtttcccacaagccaaatctcctaagcctcaaatgctagcactttttggcagttggataggaaatgagacattctttggcagccaaaataagagaggccgatggtgaaactttttgagacaccctatggccttcttgtcaaaaccttcactggagctcaagaaaagcatttctgttgtgttatttgcagtgcagatgatgtctgtgtaacaacataatggttattcacctttttttgattttgatttttgctgtgttatcaaaaacttgaatactgtgagaagaagtgaattttcagttgacgaatcagcatcttgttcccatggtgataacactaattgaatatatctatgagggcatgtattagttaatggaaaaaaaaatacaacactaacaatacatagctgcaatgtgtacaatggctgatttaattaaataaaatgtacaagtgttaaatgtgaaaaaaaaaaat

SEQ ID NO: 403600 - DNA, 14290 bp, Homo sapiens
ctgtacaggcggcacggtttgatggcagagatattttctttccaaactgttcaaaatgatgaacgaagatgcagctcagaaaagcgacagtggagagaagttcaacggcagtagtcagaggagaaaaagacccaagaagtctgacagcaatgcaagcttcctccgtgctgccagagcaggcaacctggacaaagttgtggaatatctgaaggggggcatagacatcaatacctgcaatcagaatggactcaacgctctccatctggctgccaaggaaggccacgtggggctggtgcaggagctgctgggaagagggtcctctgtggattctgccactaagaagggaaataccgctcttcacattgcatctttggctggacaagcagaagttgtcaaagttcttgttaaggaaggagccaatattaatgcacagtctcagaatggctttactcctttatacatggctgcccaagagaatcacattgatgttgtaaaatatttgctggaaaatggagctaatcagagcactgctacagaggatggctttactcctctagctgtggcactccagcaaggacacaaccaggcggtggccatcctcttggagaatgacaccaaagggaaagtgaggctgccagctctgcatattgccgctaggaaagacgacaccaaatctgccgcacttctgcttcagaatgaccacaatgctgacgtacaatccaagatgatggtgaataggacaactgagagtggttttacccctttgcacatagctgcacattacggaaatgtcaacgtggcaactcttcttctaaaccggggagctgctgtggacttcacagccaggaatggaatcactcctctgcatgtggcttccaaaagaggaaatacaaacatggtgaagctcttactggatcgaggcggtcagatcgatgccaaaactagggatgggttgacaccacttcactgtgctgcacgaagtgggcatgaccaagtggtggaacttctgttggaacggggtgcccccttgctggcaaggactaagaatgggctgtctccactacacatggctgcccagggagaccacgtggaatgtgtgaagcacctgttacagcacaaggcacctgttgatgatgtcaccctagactacctgacagccctccacgttgctgcgcactgtggccactaccgtgtaaccaaactccttttagacaagagagccaatccgaacgccagagccctgaatggttttactccactgcacattgcctgcaagaaaaaccgcatcaaagtcatggaactgctggtgaaatatggggcttcaatccaagctataacagagtctggcctcacaccaatacatgtggctgccttcatgggccacttgaacattgtcctccttctgctgcagaacggagcctctccagatgtcactaacattcgtggtgagacggcactacacatggcagcccgagccgggcaggtggaagtggtccgatgcctcctgagaaatggtgcccttgttgatgccagagccagggaggaacagacacctttacatattgcctcccgcctgggtaagacagaaattgtccagctgcttctacaacatatggctcatccagatgcggccactacaaatgggtacacaccactgcacatctctgcccgggagggccaggtggatgtggcatcagtcctattggaagcaggagcagcccactccttagctaccaagaagggttttactcccctgcatgtagcagccaagtatggaagcctggatgtggcaaaacttctcttgcaacgccgtgctgccgcagattctgcagggaagaacggccttaccccgctccatgttgctgctcattatgacaaccagaaggtggcgctgctgttactggagaagggtgcttcccctcatgccactgccaagaatggctatactccgttacatattgctgccaagaagaatcaaatgcagatagcttccacactcctgaactatggagcagagacaaacattgtgacaaagcaaggagtaactccactccatctggcctcgcaggaggggcacacagatatggttaccttgcttctggataagggagccaatatccacatgtcaactaagagtggactcacatccttacaccttgcagcccaggaagataaagtgaatgttgctgatattctcaccaagcatggagctgatcaggatgctcatacaaagcttggttacacacctttaattgtggcctgtcactatggaaatgtgaaaatggtcaactttcttctgaagcagggagcaaatgttaacgcaaaaaccaagaacggctacacgcctttgcaccaggccgctcagcagggtcacacgcacatcatcaacgtcctgctccagcatggggccaagcccaacgccaccactgcgaatggcaacactgccttggcgattgctaagcgtctgggctacatctccgtggtcgacaccctgaaggttgtgactgaggaggtcaccaccaccaccacaactattacagaaaaacacaaactaaatgtacctgagacgatgactgaggttcttgatgtttctgatgaagagggtgatgacacaatgactggtgatgggggagaataccttaggcctgaggacctaaaagaactgggtgatgactcactacccagcagtcagttcctggatggtatgaattacctgcgatacagcttggagggaggacgatctgacagccttcgatccttcagttccgacaggtctcacactctgagccatgcctcctacctgagggacagtgccgtgatggatgactcagttgtgattcccagtcaccaggtgtcaactctagccaaggaggcagaaaggaattcttatcgcctaagctggggcactgagaacttagacaacgtggctctttcttctagtcctattcattcaggtttcctggttagttttatggtggatgcccgaggtggtgctatgcgaggatgcagacacaatgggctccgaatcattattccacctcggaaatgtactgctccaacgcgagtcacctgccgactggtcaagcgccacagactggcaacaatgcctccaatggtggaaggagaaggcctggccagtcgcctgatcgaagttggaccttctggtgctcagttccttgggcctgtgatcgtggagatccctcactttgcggcccttcgaggaaaggaaagggaactggtggtcctgcgcagtgagaatggggacagctggaaagagcatttctgtgactacactgaagatgaattgaatgaaattcttaacggcatggatgaagtactggatagcccagaagacctagaaaagaaacgaatctgccgcatcatcacccgagacttcccacagtactttgcagtggtgtctcgtatcaaacaggacagcaatctgattggcccagaaggaggtgtactgagcagcacagtggtgccccaggtgcaggccgtcttcccagagggggcactcaccaagcggatccgcgtaggcctgcaggctcaacctatgcacagtgagctggttaagaagatcctaggcaacaaagctaccttcagccctatagtcactttggaacctagaagaagaaaattccacaaaccaattaccatgaccattcctgtccccaaagcttcaagtgatgtcatgttgaatggttttgggggagatgcaccaaccttaagattactatgcagcataacaggtggaaccacccctgcccagtgggaagatattacaggaactacgccattaacatttgtcaatgaatgtgtttcctttacaacaaacgtgtctgccaggttctggctgatagattgtcgacagatccaggaatccgttacttttgcatcacaagtatacagagaaattatctgcgtaccttatatggccaaatttgtagtgtttgccaaatcacatgaccccattgaagccaggttgaggtgtttctgcatgactgatgataaagtggataagacccttgaacaacaagaaaattttgctgaggtggccagaagcagggatgtggaggtgttagaaggaaaacccatctacgttgattgtttcggcaacttggtaccattaactaaaagtggccagcatcatatattcagtttttttgccttcaaagaaaatagacttcctctatttgtcaaggtacgcgatacgactcaggaaccttgcggacgactatcatttatgaaggagccaaaatccacgagaggcctggtgcatcaagctatttgcaacttaaacatcactttgccgatttatacaaaggaatcagagtcagatcaagaacaggaggaagagatcgatatgacatcagaaaaaaatgatgagacagaatctacagaaacatctgtcctgaaaagtcacctggttaatgaagttcctgtcctagcaagtccggacttgctctctgaagtttctgagatgaaacaagatttgatcaaaatgaccgccatcttgaccacagatgtgtctgataaggcaggttctattaaagtgaaggagctggtgaaggctgctgaggaagagccaggagagccttttgaaatcgttgaaagagttaaagaggacttagagaaagtgaatgaaatcctgagaagtggaacctgcacaagagatgaaagcagtgtgcagagctctcggtctgagagaggattagttgaagaggaatgggttattgtcagtgatgaggaaatagaagaggctaggcaaaaagcacctttagaaatcactgaatatccatgtgtagaagttagaatagataaagagatcaaaggaaaagtagagaaagactcaactgggctagtgaactaccttactgatgatctgaatacctgtgtgcctcttcccaaagagcagctgcagacagttcaagataaggcagggaagaaatgtgaggctctggctgttggcaggagctctgaaaaggaagggaaagacatacccccagatgagacacagagtacacagaaacagcacaaaccaagcttgggaataaagaagccagtaagaaggaaattaaaagaaaagcagaaacaaaaagaggaaggtttacaagctagtgcagagaaagctgaacttaaaaaaggtagttcagaagagtcattaggtgaagacccaggtttagcccctgaaccccttcccactgtcaaggccacatctcctttgatagaagaaactcccattggttccataaaggacaaagtaaaggcccttcagaagcgagtggaagatgaacagaaaggtcgaagcaagttgcccatcagagtcaaaggcaaggaggacgtgccaaaaaagaccacccacaggccacatccagctgcgtcaccctctctgaagtcagagagacatgcgccagggtctccctcccctaaaacagaaagacactctactctttcctcttccgcaaaaactgaaaggcaccctccagtatcaccatcaagtaaaactgagaaacactcacctgtgtcaccctctgcaaaaacggaaagacattcacctgcgtcatcatcgagtaaaactgagaaacactcacctgtatcaccctcgacaaaaactgaaaggcactctcctgtgtcatctacaaaaacagaaagacacccacctgtttcgccttcaggcaaaacagacaaacgtccacctgtatcgccctccgggaggacagaaaaacacccgccagtatcgcctgggagaacagaaaaacgcttgcctgtttcaccctccggaagaacggacaagcaccaacctgtatcaacagctgggaaaactgagaagcacctgcctgtgtcaccttctggcaaaacagaaaagcaaccacctgtatcccccacttcaaaaacagagaggattgaggaaaccatgtctgttcgggagctgatgaaggctttccagtcaggtcaggacccttctaaacataaaactggactctttgagcacaaatcagcaaaacaaaagcagccacaagagaaaggtaaagttcgggtagaaaaagaaaaggggccgatactaacccagagagaagctcagaaaacagagaatcagacaatcaaacgaggccagagactcccggtaacgggcacagcagaatccaaaagaggagttcgtgtttcctccataggagttaagaaagaagatgcagctggaggaaaggagaaagttctcagccacaaaatacctgaacctgttcagtcagtgcctgaagaagaaagccacagagagagcgaagtgcccaaagaaaagatggctgatgagcagggagacatggatctacagatcagcccagataggaaaacctccactgacttctctgaggtcattaagcaagagttggaagacaatgacaaataccaacaattccgcctgagtgaggagacagaaaaggcacagcttcacttagaccaagtactcactagtcctttcaacacaacatttccactcgactacatgaaagatgagttccttccagctctgtctttacaaagcggtgctttagatggcagttctgaaagcctaaagaatgagggggtagccggctctccgtgtggcagcctgatggaggggacccctcagattagttcagaagaaagctataagcatgaaggcctagcagagacccctgagacgagcccagaaagcctttctttctcaccaaagaaaagtgaggagcaaactggggaaacaaaggaaagcaccaagacagaaaccaccacagaaattcgttcagaaaaagagcatcccacgaccaaagacattactggtggctctgaagagcgaggtgccacagtcactgaggactcagagacctctactgagagttttcagaaagaggccactctaggctctcccaaagacacaagccctaaaagacaagatgattgcacaggcagctgtagtgtagcattagctaaagagacacctacaggactgactgaggaggcagcctgtgatgaaggtcaacgtacctttggtagttcagcccacaagacacaaactgatagtgaggctcaggaatccacagccacctcagacgagacaaaggccttgccgctgcctgaggcttctgtaaagacagatacaggaactgaatcaaaacctcagggagtcattagaagtccccaagggttagaacttgcactccctagccgagatagcgaagtcctcagcgctgtggctgatgactcattagcagtgagccacaaagactctctggaagccagccctgtgctagaagataactcttcacacaaaacccctgattctctggagccaagtcctctgaaagaatccccttgccgtgactctctggaaagcagccctgttgaaccaaagatgaaggctggaatttttccaagtcactttcctcttcctgcagctgttgccaaaacagaactcttgacggaagtggcctctgtgcggtcccggctactccgagaccctgatggcagtgctgaggatgacagtcttgagcagacatcgctcatggagagctcagggaagagccccctttctcctgacacccccagctctgaagaagtcagctatgaggttacacccaaaaccacagatgtaagtacaccaaaaccagctgtgattcatgaatgtgcagaggaggatgattcagaaaacggggagaaaaagaggttcacacctgaagaggagatgtttaaaatggtaaccaaaatcaaaatgtttgatgaacttgaacaagaagcaaagcagaaaagggactacaaaaaagaacccaaacaagaagaatcttcttcatcttctgacccagatgctgactgttcagtagatgtggatgaaccaaaacatacaggcagtggggaggatgaaagtggtgtccctgtgttagtaacttcggagagcaggaaggtgtcttcctcctcagaaagtgaacctgagttggcacagcttaaaaaaggtgctgactcaggccttttaccagaaccagtgattcgagtacaacctccttctccacttccatcaagcatggactccaattccagtccagaagaagtacaattccagcctgtcgtttccaaacaatatactttcaagatgaatgaagatactcaggaagagccaggcaaatcagaagaagaaaaagattctgaatcccatttagctgaagaccgtcatgctgtttccactgaggctgaagacaggtcttatgataagctaaacagagacactgatcagccaaaaatctgtgatggccatggatgtgaggccatgagtcctagcagctcagctcgtcctgtctcttcaggtctacagagtccgactggtgatgatgttgatgaacagccagtcatctataaagaatcattagctctccaaggcactcatgaaaaagacacagagggagaagagcttgatgtttctagagcagaatctccacaagcagattgccccagtgaaagcttttcatcttcatcctctttgcctcattgtttggtatctgaaggaaaagaattagatgaagacatatctgccacatcttctattcaaaaaacagaggtcacaaaaactgatgaaacatttgagaacttaccaaaggactgcccctctcaagactcatccattactactcaaacagatagattttccatggatgttcccgtgtctgacctagctgagaatgatgaaatctatgatccacaaatcactagcccttatgaaaatgtcccttcccaatcttttttctctagtgaagaaagcaaaacccaaacagatgcaaatcacaccacaagttttcactcttctgaagtgtattctgttaccatcacatcccctgttgaagacgttgtagtggcaagctcctctagtggaactgttttaagcaaagaatctaattttgagggccaggacataaaaatggaatcccaactggaaagtaccttgtgggaaatgcaatcagacagtgtctcttcatctttcgagcctactatgtccgctacaacaacagttgttggtgaacaaataagcaaagtcatcatcacaaaaactgatgtggattctgattcttggagtgaaattcgggaagacgatgaagcctttgaggctcgtgtgaaagaggaagaacaaaagatatttggtttgatggtagacagacaatcacagggtaccacccctgacaccactcctgctaggaccccaactgaagaggggaccccaacaagtgagcaaaacccatttctgtttcaggaaggaaaattgtttgaaatgacccgaagtggtgccattgatatgaccaaaaggtcctatgcagatgaaagttttcactttttccaaattggtcaagaatccagggaagagactctctctgaagatgtgaaagaaggggctactggggctgatcccctaccgctggagacatcagctgaatcactagcactttcagaatcaaaagaaacagtggatgatgaggcagacttacttccagatagcgtgagtgaggaagtagaggaaatacctgcttcggatgctcaacttaactcccaaatggggatttcagcctccactgaaacacctacaaaagaggctgttagtgtagggaccaaggacctccccaccgtgcaaacgggtgatatacctcctctctctggtgtaaagcagatatcctgccccgactcttctgaaccagctgtacaagtccagttagatttttccacactcaccaggtctgtttattcagataggggtgatgattctcccgattcttccccagaagaacagaaatcagtaatcgagattcctactgcacccatggagaatgtgccttttactgaaagcaaatccaaaattcctgtaaggactatgcccacttccaccccagcacctccatctgcagagtatgagagttcagtttctgaagattttctatccagtgtagatgaggaaaataaggcggatgaagcaaaaccaaagtccaaactccctgtcaaagtacccctccaaagagttgaacagcagctctcagatctagacacctctgtccagaagacagtggctcctcagggacaggacatggcaagcatcgcaccagataatagaagcaaatctgaatctgatgctagttctttggattcaaagaccaaatgcccagtaaaaacccgaagttacactgagacagaaacagagagcagagagagggccgaggaacttgagttagaatcagaagaaggggccacaagaccaaagatacttacatcccgattgccagttaagagcagaagcactacatcttcctgcagggggggcacgagccccacaaaagaaagtaaggagcatttctttgacctttacagaaattccatagaattctttgaggagattagtgatgaggcttccaaattagtggataggctgacacagtcagagagggagcaggaaatagtttcagacgatgaaagtagtagtgccctggaagtatcagtaattgaaaatctgccacctgttgagaccgagcactcagttcctgaggacatctttgacacaaggcccatttgggatgagtctattgagactctgattgaacgcatccctgatgaaaatggccatgaccatgctgaagatccacaggatgagcaggaacggatcgaggaaaggctggcttatattgctgatcaccttggcttcagctggacagaattagcaagagaactggatttcactgaggagcaaattcatcaaattcgaattgaaaatcccaactctcttcaagaccagagtcatgcactgttgaagtactggctagagagggatgggaaacatgctacagataccaacctcgttgaatgtctcaccaagatcaaccgaatggatattgttcatctcatggagaccaacacagaacctctccaggagcgcatcagtcatagttatgcagaaattgaacagaccattacactggatcatagtgaagggttctcggtacttcaagaggagttatgcactgcacagcacaagcagaaagaggagcaagctgtttctaaagaaagtgagacctgcgatcaccctcctatcgtctcagaggaagacatttctgttggttattccacttttcaggatggcgtccccaaaactgagggggacagctcagcaacagcactctttccccaaactcacaaggagcaagttcaacaggatttctcagggaaaatgcaagacctgcctgaagagtcatctctggaatatcagcaggaatattttgtgacaactccaggaacagaaacatcagagactcagaaggctatgatagtacccagctctcccagcaagacacctgaggaagttagcacccctgcagaggaggagaagctgtacctccagaccccaacatccagcgagcggggaggctctcccatcatacaagaacccgaagagccctcagagcacagagaggagagctctccgcggaaaaccagcctcgtaatagtggagtctgccgataaccagcctgagacctgtgaaagactcgatgaagatgcagcttttgaaaagggagacgatatgcctgaaatacccccagaaacagtcacagaagaagaatacattgatgagcatggacacaccgtggtaaagaaggttactaggaaaatcattaggcggtatgtatcctctgaaggcacagagaaagaagagattatggtgcagggaatgccacaggaacctgtcaacatcgaggaaggggatggctattccaaagttataaagcgtgttgtattgaagagtgacaccgagcagtcagaggtcactttgtgtgagcccagcattttgtccagtacctcacaatttcaggctgagccagtggaaggccgtagagtcagcaaagttgttaaaacaactgtggtacttggagagaggatggagaaacatctgggggattctagtttagccactgatcttccttcagccaaagatgactttgaagaggacaacaatgagtaaagccatcacacagaagagggctgtggtgaaggaccagcatggaaaacgcattgacttggagcacctggaggatgtaccagaagcactagaccaggacgacctccagcgcgatctccagcagctccttcggcatttctgcaaggaggacttgaagcaagaggccaagtgaggggctgcccagttctcacaccagaaaccacacattcactcaatatgcagcttcctgtttcagtaggggagtgacctaactggcctaattaatgggataccccgacatttccactgttagcaaatatacggcattttgctttagttttcccccatcctctttaactataaagctaatttgtgaccaaagatggcatccttcatactggatgctgtatccaatactttgttgtgtctgtgctaacctgggaactggccacctccattgttctttgcttctgcacaagatccatgaaaatccattgatcagaagaacttcacctgcagacctcttcaagtgacactatgtaggaatccttccaaggaatatctatgtacaatgtatatagctgaaatgctcagatgaacaacatattaaaattaaaaccactgcctattgtaactacactgggcatcagaataaaaggcctctagaaattgctgaacaatggttaattaagatattgctaacacaatcgagtgataatacagttttactgcaaaagaagcacttcaaacctattatgtccttagaacttccagagtagccactgctcccagttaaaggtgggtcagtagccttgcagaactgtcctgagaagttattgctggtgctggccagccatggcttaggactccaacagccactctgagggaggggagaagggagcagaggccacgcagaatgaaccgatggggtattcagttgctggcagctacattgtgtggcattctagcatcttcaggtctttagatcttggacaagttggcagggtattttaaaagctataactactgtagttttccagttttcattgctgctttagcaaaccacgctgtcttacagtggtactttcttctggccactgcactgtagataattcattggaaacaagatttacccactacataaaaggttaaactccttcagtatgttggagtggtttctttttttttttctttctttcttttttttcttcaggtttatatcttctctaatacctgcatgtggcgtttaaaaatcaagaccacggtcaaacccctcttctaatcacattaattgtttccattctttttaccctgagtgagcacttttcactttccagctaggtctgtttttcagcttgcagacaagattgagaaatccttgaaaatttggttttggttaaaatttttggtttatttatttgaaatccacactcccttggaaactcttaagtgcatttgtgcacttctgtttgtttgtctcaaagaagggactgtaacaatctgagtaatttccatgtcctcttccttattcctctagtggttgaagctgtgtagcattttaacatatatatattcacaaatatattcatataaacagtatacattttgaatcagtcatttgttaaagaaaagtatattcaatgaagatgaaatttaaataaaaaaggacagagtctatcctccagggattgaacattttccaattatctggtcttttcctgttgtgcaaaaatgactcattgctccgaatgtcaaaaacaaatgcgacaaacaatggcacttcatcatttaaagtaatgttgccaagagaaaaaatttcctgggagggaggtttcccacaagccaaatctcctaagcctcaaatgctagcactttttggcagttggataggaaatgagacattctttggcagccaaaataagagaggccgatggtgaaactttttgagacaccctatggccttcttgtcaaaaccttcactggagctcaagaaaagcatttctgttgtgttatttgcagtgcagatgatgtctgtgtaacaacataatggttattcacctttttttgattttgatttttgctgtgttatcaaaaacttgaatactgtgagaagaagtgaattttcagttgacgaatcagcatcttgttcccatggtgataacactaattgaatatatctatgagggcatgtattagttaatggaaaaaaaaatacaacactaacaatacatagctgcaatgtgtacaatggctgatttaattaaataaaatgtacaagtgttaaatgtgaaaaaaaaaaat

SEQ ID NO: 403601 - DNA, 11144 bp, Homo sapiens
ttcattcttttaaatttttttaaccaatatttcttttgaataggaagctctcacatggcaatctataggtggatgcagaagttgtcagtgtctatataacaggttgggaagggtgatgagtggtgactgctgagacctggaggggaagtaggaatatatttaaaatcctaaatcttgacatcacaaaacaaaaaagtcctatacttctttttccccaccacagttgttaaattttatatttgcttaatgaattattcttgtaaatagagatcagccatctagagaaaagctcatagcattaggtttgacattgtaaatttttattaaatgaataaaataaaatattatttgtatatttaaatatacatgttattccaagaattaaaatatagaaatgggtatatcaacccaaatgagcataatttcattgtattttgatggtgcagaatgtattttggggtttgtattgctgattagtagtgagtcagtggaggcagtatgccaataagaacgacaaagaaatatgtactgctgcgggcaagccacctgagtgttaaagaaagatgactgagctttggctgatttcagtgagctttcagtgtgctctaagagaaagcattaacttcattattacattttatttctaagtcaagacatatcagacacagctattaatgctgtgatagtccagtacaattttctaatttgtaactcaaaaagaaaaaaatcccagacattgtacattgaaaatataccttagtatttagtagctcttggctgggcaccatggcccacacctgtaatcccagcactttgggagaccaaggcaggaggattgcttgagtctagtagttcaagaccagcctgagcaacatagcaagaccttgtctctattaaaaaaaaaaaaaaagaaagaatttagtagctctttgttagaataatgcttctaaatattgcctgtgtattgaaaattttccaccatatgcttatttgtagcttttagtattttcaaccaatatctgtaatgattgggatattatcatcactatttctaaagacaaatgccatccagttcatttaaggtcaaactttgagactgccgtggtgacctagtatctggaattagtatatttataatgttggttcttttgtctcttgaatctataaactttgtacttaagccaatcttcttttctgcctgtcttctataaactgttagtaataaaaaaagagtatgttgactgtatgcttgcctgttgatgcttgttgaaagggtatttatttactctttccttttcttctaaatactctctactcttccttctctcttttttccatcttgcatggcatcttggggcggaaaggaatcagagtcagatcaagaacaggaggaagagatcgatatgacatcagaaaaaaatgatgagacagaatctacagaaacatctgtcctgaaaagtcacctggttaatgaagttcctgtcctagcaagtccggacttgctctctgaagtttctgagatgaaacaagatttgatcaaaatgaccgccatcttgaccacagatgtgtctgataaggcaggttctattaaagtgaaggagctggtgaaggctgctgaggaagagccaggagagccttttgaaatcgttgaaagagttaaagaggacttagagaaagtgaatgaaatcctgagaagtggaacctgcacaagagatgaaagcagtgtgcagagctctcggtctgagagaggattagttgaagaggaatgggttattgtcagtgatgaggaaatagaagaggctaggcaaaaagcacctttagaaatcactgaatatccatgtgtagaagttagaatagataaagagatcaaaggaaaagtagagaaagactcaactgggctagtgaactaccttactgatgatctgaatacctgtgtgcctcttcccaaagagcagctgcagacagttcaagataaggcagggaagaaatgtgaggctctggctgttggcaggagctctgaaaaggaagggaaagacatacccccagatgagacacagagtacacagaaacagcacaaaccaagcttgggaataaagaagccagtaagaaggaaattaaaagaaaagcagaaacaaaaagaggaaggtttacaagctagtgcagagaaagctgaacttaaaaaaggtagttcagaagagtcattaggtgaagacccaggtttagcccctgaaccccttcccactgtcaaggccacatctcctttgatagaagaaactcccattggttccataaaggacaaagtaaaggcccttcagaagcgagtggaagatgaacagaaaggtcgaagcaagttgcccatcagagtcaaaggcaaggaggacgtgccaaaaaagaccacccacaggccacatccagctgcgtcaccctctctgaagtcagagagacatgcgccagggtctccctcccctaaaacagaaagacactctactctttcctcttccgcaaaaactgaaaggcaccctccagtatcaccatcaagtaaaactgagaaacactcacctgtgtcaccctctgcaaaaacggaaagacattcacctgcgtcatcatcgagtaaaactgagaaacactcacctgtatcaccctcgacaaaaactgaaaggcactctcctgtgtcatctacaaaaacagaaagacacccacctgtttcgccttcaggcaaaacagacaaacgtccacctgtatcgccctccgggaggacagaaaaacacccgccagtatcgcctgggagaacagaaaaacgcttgcctgtttcaccctccggaagaacggacaagcaccaacctgtatcaacagctgggaaaactgagaagcacctgcctgtgtcaccttctggcaaaacagaaaagcaaccacctgtatcccccacttcaaaaacagagaggattgaggaaaccatgtctgttcgggagctgatgaaggctttccagtcaggtcaggacccttctaaacataaaactggactctttgagcacaaatcagcaaaacaaaagcagccacaagagaaaggtaaagttcgggtagaaaaagaaaaggggccgatactaacccagagagaagctcagaaaacagagaatcagacaatcaaacgaggccagagactcccggtaacgggcacagcagaatccaaaagaggagttcgtgtttcctccataggagttaagaaagaagatgcagctggaggaaaggagaaagttctcagccacaaaatacctgaacctgttcagtcagtgcctgaagaagaaagccacagagagagcgaagtgcccaaagaaaagatggctgatgagcagggagacatggatctacagatcagcccagataggaaaacctccactgacttctctgaggtcattaagcaagagttggaagacaatgacaaataccaacaattccgcctgagtgaggagacagaaaaggcacagcttcacttagaccaagtactcactagtcctttcaacacaacatttccactcgactacatgaaagatgagttccttccagctctgtctttacaaagcggtgctttagatggcagttctgaaagcctaaagaatgagggggtagccggctctccgtgtggcagcctgatggaggggacccctcagattagttcagaagaaagctataagcatgaaggcctagcagagacccctgagacgagcccagaaagcctttctttctcaccaaagaaaagtgaggagcaaactggggaaacaaaggaaagcaccaagacagaaaccaccacagaaattcgttcagaaaaagagcatcccacgaccaaagacattactggtggctctgaagagcgaggtgccacagtcactgaggactcagagacctctactgagagttttcagaaagaggccactctaggctctcccaaagacacaagccctaaaagacaagatgattgcacaggcagctgtagtgtagcattagctaaagagacacctacaggactgactgaggaggcagcctgtgatgaaggtcaacgtacctttggtagttcagcccacaagacacaaactgatagtgaggctcaggaatccacagccacctcagacgagacaaaggccttgccgctgcctgaggcttctgtaaagacagatacaggaactgaatcaaaacctcagggagtcattagaagtccccaagggttagaacttgcactccctagccgagatagcgaagtcctcagcgctgtggctgatgactcattagcagtgagccacaaagactctctggaagccagccctgtgctagaagataactcttcacacaaaacccctgattctctggagccaagtcctctgaaagaatccccttgccgtgactctctggaaagcagccctgttgaaccaaagatgaaggctggaatttttccaagtcactttcctcttcctgcagctgttgccaaaacagaactcttgacggaagtggcctctgtgcggtcccggctactccgagaccctgatggcagtgctgaggatgacagtcttgagcagacatcgctcatggagagctcagggaagagccccctttctcctgacacccccagctctgaagaagtcagctatgaggttacacccaaaaccacagatgtaagtacaccaaaaccagctgtgattcatgaatgtgcagaggaggatgattcagaaaacggggagaaaaagaggttcacacctgaagaggagatgtttaaaatggtaaccaaaatcaaaatgtttgatgaacttgaacaagaagcaaagcagaaaagggactacaaaaaagaacccaaacaagaagaatcttcttcatcttctgacccagatgctgactgttcagtagatgtggatgaaccaaaacatacaggcagtggggaggatgaaagtggtgtccctgtgttagtaacttcggagagcaggaaggtgtcttcctcctcagaaagtgaacctgagttggcacagcttaaaaaaggtgctgactcaggccttttaccagaaccagtgattcgagtacaacctccttctccacttccatcaagcatggactccaattccagtccagaagaagtacaattccagcctgtcgtttccaaacaatatactttcaagatgaatgaagatactcaggaagagccaggcaaatcagaagaagaaaaagattctgaatcccatttagctgaagaccgtcatgctgtttccactgaggctgaagacaggtcttatgataagctaaacagagacactgatcagccaaaaatctgtgatggccatggatgtgaggccatgagtcctagcagctcagctcgtcctgtctcttcaggtctacagagtccgactggtgatgatgttgatgaacagccagtcatctataaagaatcattagctctccaaggcactcatgaaaaagacacagagggagaagagcttgatgtttctagagcagaatctccacaagcagattgccccagtgaaagcttttcatcttcatcctctttgcctcattgtttggtatctgaaggaaaagaattagatgaagacatatctgccacatcttctattcaaaaaacagaggtcacaaaaactgatgaaacatttgagaacttaccaaaggactgcccctctcaagactcatccattactactcaaacagatagattttccatggatgttcccgtgtctgacctagctgagaatgatgaaatctatgatccacaaatcactagcccttatgaaaatgtcccttcccaatcttttttctctagtgaagaaagcaaaacccaaacagatgcaaatcacaccacaagttttcactcttctgaagtgtattctgttaccatcacatcccctgttgaagacgttgtagtggcaagctcctctagtggaactgttttaagcaaagaatctaattttgagggccaggacataaaaatggaatcccaactggaaagtaccttgtgggaaatgcaatcagacagtgtctcttcatctttcgagcctactatgtccgctacaacaacagttgttggtgaacaaataagcaaagtcatcatcacaaaaactgatgtggattctgattcttggagtgaaattcgggaagacgatgaagcctttgaggctcgtgtgaaagaggaagaacaaaagatatttggtttgatggtagacagacaatcacagggtaccacccctgacaccactcctgctaggaccccaactgaagaggggaccccaacaagtgagcaaaacccatttctgtttcaggaaggaaaattgtttgaaatgacccgaagtggtgccattgatatgaccaaaaggtcctatgcagatgaaagttttcactttttccaaattggtcaagaatccagggaagagactctctctgaagatgtgaaagaaggggctactggggctgatcccctaccgctggagacatcagctgaatcactagcactttcagaatcaaaagaaacagtggatgatgaggcagacttacttccagatagcgtgagtgaggaagtagaggaaatacctgcttcggatgctcaacttaactcccaaatggggatttcagcctccactgaaacacctacaaaagaggctgttagtgtagggaccaaggacctccccaccgtgcaaacgggtgatatacctcctctctctggtgtaaagcagatatcctgccccgactcttctgaaccagctgtacaagtccagttagatttttccacactcaccaggtctgtttattcagataggggtgatgattctcccgattcttccccagaagaacagaaatcagtaatcgagattcctactgcacccatggagaatgtgccttttactgaaagcaaatccaaaattcctgtaaggactatgcccacttccaccccagcacctccatctgcagagtatgagagttcagtttctgaagattttctatccagtgtagatgaggaaaataaggcggatgaagcaaaaccaaagtccaaactccctgtcaaagtacccctccaaagagttgaacagcagctctcagatctagacacctctgtccagaagacagtggctcctcagggacaggacatggcaagcatcgcaccagataatagaagcaaatctgaatctgatgctagttctttggattcaaagaccaaatgcccagtaaaaacccgaagttacactgagacagaaacagagagcagagagagggccgaggaacttgagttagaatcagaagaaggggccacaagaccaaagatacttacatcccgattgccagttaagagcagaagcactacatcttcctgcagggggggcacgagccccacaaaagaaagtaaggagcatttctttgacctttacagaaattccatagaattctttgaggagattagtgatgaggcttccaaattagtggataggctgacacagtcagagagggagcaggaaatagtttcagacgatgaaagtagtagtgccctggaagtatcagtaattgaaaatctgccacctgttgagaccgagcactcagttcctgaggacatctttgacacaaggcccatttgggatgagtctattgagactctgattgaacgcatccctgatgaaaatggccatgaccatgctgaagatccacaggatgagcaggaacggatcgaggaaaggctggcttatattgctgatcaccttggcttcagctggacagaattagcaagagaactggatttcactgaggagcaaattcatcaaattcgaattgaaaatcccaactctcttcaagaccagagtcatgcactgttgaagtactggctagagagggatgggaaacatgctacagataccaacctcgttgaatgtctcaccaagatcaaccgaatggatattgttcatctcatggagaccaacacagaacctctccaggagcgcatcagtcatagttatgcagaaattgaacagaccattacactggatcatagtgaagggttctcggtacttcaagaggagttatgcactgcacagcacaagcagaaagaggagcaagctgtttctaaagaaagtgagacctgcgatcaccctcctatcgtctcagaggaagacatttctgttggttattccacttttcaggatggcgtccccaaaactgagggggacagctcagcaacagcactctttccccaaactcacaaggagcaagttcaacaggatttctcagggaaaatgcaagacctgcctgaagagtcatctctggaatatcagcaggaatattttgtgacaactccaggaacagaaacatcagagactcagaaggctatgatagtacccagctctcccagcaagacacctgaggaagttagcacccctgcagaggaggagaagctgtacctccagaccccaacatccagcgagcggggaggctctcccatcatacaagaacccgaagagccctcagagcacagagaggagagctctccgcggaaaaccagcctcgtaatagtggagtctgccgataaccagcctgagacctgtgaaagactcgatgaagatgcagcttttgaaaagggagacgatatgcctgaaatacccccagaaacagtcacagaagaagaatacattgatgagcatggacacaccgtggtaaagaaggttactaggaaaatcattaggcggtatgtatcctctgaaggcacagagaaagaagagattatggtgcagggaatgccacaggaacctgtcaacatcgaggaaggggatggctattccaaagttataaagcgtgttgtattgaagagtgacaccgagcagtcagaggacaacaatgagtaaagccatcacacagaagagggctgtggtgaaggaccagcatggaaaacgcattgacttggagcacctggaggatgtaccagaagcactagaccaggacgacctccagcgcgatctccagcagctccttcggcatttctgcaaggaggacttgaagcaagaggccaagtgaggggctgcccagttctcacaccagaaaccacacattcactcaatatgcagcttcctgtttcagtaggggagtgacctaactggcctaattaatgggataccccgacatttccactgttagcaaatatacggcattttgctttagttttcccccatcctctttaactataaagctaatttgtgaccaaagatggcatccttcatactggatgctgtatccaatactttgttgtgtctgtgctaacctgggaactggccacctccattgttctttgcttctgcacaagatccatgaaaatccattgatcagaagaacttcacctgcagacctcttcaagtgacactatgtaggaatccttccaaggaatatctatgtacaatgtatatagctgaaatgctcagatgaacaacatattaaaattaaaaccactgcctattgtaactacactgggcatcagaataaaaggcctctagaaattgctgaacaatggttaattaagatattgctaacacaatcgagtgataatacagttttactgcaaaagaagcacttcaaacctattatgtccttagaacttccagagtagccactgctcccagttaaaggtgggtcagtagccttgcagaactgtcctgagaagttattgctggtgctggccagccatggcttaggactccaacagccactctgagggaggggagaagggagcagaggccacgcagaatgaaccgatggggtattcagttgctggcagctacattgtgtggcattctagcatcttcaggtctttagatcttggacaagttggcagggtattttaaaagctataactactgtagttttccagttttcattgctgctttagcaaaccacgctgtcttacagtggtactttcttctggccactgcactgtagataattcattggaaacaagatttacccactacataaaaggttaaactccttcagtatgttggagtggtttctttttttttttctttctttcttttttttcttcaggtttatatcttctctaatacctgcatgtggcgtttaaaaatcaagaccacggtcaaacccctcttctaatcacattaattgtttccattctttttaccctgagtgagcacttttcactttccagctaggtctgtttttcagcttgcagacaagattgagaaatccttgaaaatttggttttggttaaaatttttggtttatttatttgaaatccacactcccttggaaactcttaagtgcatttgtgcacttctgtttgtttgtctcaaagaagggactgtaacaatctgagtaatttccatgtcctcttccttattcctctagtggttgaagctgtgtagcattttaacatatatatattcacaaatatattcatataaacagtatacattttgaatcagtcatttgttaaagaaaagtatattcaatgaagatgaaatttaaataaaaaaggacagagtctatcctccagggattgaacattttccaattatctggtcttttcctgttgtgcaaaaatgactcattgctccgaatgtcaaaaacaaatgcgacaaacaatggcacttcatcatttaaagtaatgttgccaagagaaaaaatttcctgggagggaggtttcccacaagccaaatctcctaagcctcaaatgctagcactttttggcagttggataggaaatgagacattctttggcagccaaaataagagaggccgatggtgaaactttttgagacaccctatggccttcttgtcaaaaccttcactggagctcaagaaaagcatttctgttgtgttatttgcagtgcagatgatgtctgtgtaacaacataatggttattcacctttttttgattttgatttttgctgtgttatcaaaaacttgaatactgtgagaagaagtgaattttcagttgacgaatcagcatcttgttcccatggtgataacactaattgaatatatctatgagggcatgtattagttaatggaaaaaaaaatacaacactaacaatacatagctgcaatgtgtacaatggctgatttaattaaataaaatgtacaagtgttaaatgtgaaaaaaaaaaat

SEQ ID NO: 403602 - DNA, 5649 bp, Homo sapiens
ctgtacaggcggcacggtttgatggcagagatattttctttccaaactgttcaaaatgatgaacgaagatgcagctcagaaaagcgacagtggagagaagttcaacggcagtagtcagaggagaaaaagacccaagaagtctgacagcaatgcaagcttcctccgtgctgccagagcaggcaacctggacaaagttgtggaatatctgaaggggggcatagacatcaatacctgcaatcagaatggactcaacgctctccatctggctgccaaggaaggccacgtggggctggtgcaggagctgctgggaagagggtcctctgtggattctgccactaagaagggaaataccgctcttcacattgcatctttggctggacaagcagaagttgtcaaagttcttgttaaggaaggagccaatattaatgcacagtctcagaatggctttactcctttatacatggctgcccaagagaatcacattgatgttgtaaaatatttgctggaaaatggagctaatcagagcactgctacagaggatggctttactcctctagctgtggcactccagcaaggacacaaccaggcggtggccatcctcttggagaatgacaccaaagggaaagtgaggctgccagctctgcatattgccgctaggaaagacgacaccaaatctgccgcacttctgcttcagaatgaccacaatgctgacgtacaatccaagatgatggtgaataggacaactgagagtggttttacccctttgcacatagctgcacattacggaaatgtcaacgtggcaactcttcttctaaaccggggagctgctgtggacttcacagccaggaatggaatcactcctctgcatgtggcttccaaaagaggaaatacaaacatggtgaagctcttactggatcgaggcggtcagatcgatgccaaaactagggatgggttgacaccacttcactgtgctgcacgaagtgggcatgaccaagtggtggaacttctgttggaacggggtgcccccttgctggcaaggactaagaatgggctgtctccactacacatggctgcccagggagaccacgtggaatgtgtgaagcacctgttacagcacaaggcacctgttgatgatgtcaccctagactacctgacagccctccacgttgctgcgcactgtggccactaccgtgtaaccaaactccttttagacaagagagccaatccgaacgccagagccctgaatggttttactccactgcacattgcctgcaagaaaaaccgcatcaaagtcatggaactgctggtgaaatatggggcttcaatccaagctataacagagtctggcctcacaccaatacatgtggctgccttcatgggccacttgaacattgtcctccttctgctgcagaacggagcctctccagatgtcactaacattcgtggtgagacggcactacacatggcagcccgagccgggcaggtggaagtggtccgatgcctcctgagaaatggtgcccttgttgatgccagagccagggaggaacagacacctttacatattgcctcccgcctgggtaagacagaaattgtccagctgcttctacaacatatggctcatccagatgcggccactacaaatgggtacacaccactgcacatctctgcccgggagggccaggtggatgtggcatcagtcctattggaagcaggagcagcccactccttagctaccaagaagggttttactcccctgcatgtagcagccaagtatggaagcctggatgtggcaaaacttctcttgcaacgccgtgctgccgcagattctgcagggaagaacggccttaccccgctccatgttgctgctcattatgacaaccagaaggtggcgctgctgttactggagaagggtgcttcccctcatgccactgccaagaatggctatactccgttacatattgctgccaagaagaatcaaatgcagatagcttccacactcctgaactatggagcagagacaaacattgtgacaaagcaaggagtaactccactccatctggcctcgcaggaggggcacacagatatggttaccttgcttctggataagggagccaatatccacatgtcaactaagagtggactcacatccttacaccttgcagcccaggaagataaagtgaatgttgctgatattctcaccaagcatggagctgatcaggatgctcatacaaagcttggttacacacctttaattgtggcctgtcactatggaaatgtgaaaatggtcaactttcttctgaagcagggagcaaatgttaacgcaaaaaccaagaacggctacacgcctttgcaccaggccgctcagcagggtcacacgcacatcatcaacgtcctgctccagcatggggccaagcccaacgccaccactgcgaatggcaacactgccttggcgattgctaagcgtctgggctacatctccgtggtcgacaccctgaaggttgtgactgaggaggtcaccaccaccaccacaactattacagaaaaacacaaactaaatgtacctgagacgatgactgaggttcttgatgtttctgatgaagagggtgatgacacaatgactggtgatgggggagaataccttaggcctgaggacctaaaagaactgggtgatgactcactacccagcagtcagttcctggatggtatgaattacctgcgatacagcttggagggaggacgatctgacagccttcgatccttcagttccgacaggtctcacactctgagccatgcctcctacctgagggacagtgccgtgatggatgactcagttgtgattcccagtcaccaggtgtcaactctagccaaggaggcagaaaggaattcttatcgcctaagctggggcactgagaacttagacaacgtggctctttcttctagtcctattcattcaggtttcctggttagttttatggtggatgcccgaggtggtgctatgcgaggatgcagacacaatgggctccgaatcattattccacctcggaaatgtactgctccaacgcgagtcacctgccgactggtcaagcgccacagactggcaacaatgcctccaatggtggaaggagaaggcctggccagtcgcctgatcgaagttggaccttctggtgctcagttccttgggcctgtgatcgtggagatccctcactttgcggcccttcgaggaaaggaaagggaactggtggtcctgcgcagtgagaatggggacagctggaaagagcatttctgtgactacactgaagatgaattgaatgaaattcttaacggcatggatgaagtactggatagcccagaagacctagaaaagaaacgaatctgccgcatcatcacccgagacttcccacagtactttgcagtggtgtctcgtatcaaacaggacagcaatctgattggcccagaaggaggtgtactgagcagcacagtggtgccccaggtgcaggccgtcttcccagagggggcactcaccaagcggatccgcgtaggcctgcaggctcaacctatgcacagtgagctggttaagaagatcctaggcaacaaagctaccttcagccctatagtcactttggaacctagaagaagaaaattccacaaaccaattaccatgaccattcctgtccccaaagcttcaagtgatgtcatgttgaatggttttgggggagatgcaccaaccttaagattactatgcagcataacaggtggaaccacccctgcccagtgggaagatattacaggaactacgccattaacatttgtcaatgaatgtgtttcctttacaacaaacgtgtctgccaggttctggctgatagattgtcgacagatccaggaatccgttacttttgcatcacaagtatacagagaaattatctgcgtaccttatatggccaaatttgtagtgtttgccaaatcacatgaccccattgaagccaggttgaggtgtttctgcatgactgatgataaagtggataagacccttgaacaacaagaaaattttgctgaggtggccagaagcagggatgtggaggtgttagaaggaaaacccatctacgttgattgtttcggcaacttggtaccattaactaaaagtggccagcatcatatattcagtttttttgccttcaaagaaaatagacttcctctatttgtcaaggtacgcgatacgactcaggaaccttgcggacgactatcatttatgaaggagccaaaatccacgagaggcctggtgcatcaagctatttgcaacttaaacatcactttgccgatttatacaaaggaatcagagtcagatcaagaacaggaggaagagatcgatatgacatcagaaaaaaatgatgagacagaatctacagaaacatctgtcctgaaaagtcacctggttaatgaagttcctgtcctagcaagtccggacttgctctctgaagtttctgagatgaaacaagatttgatcaaaatgaccgccatcttgaccacagatgtgtctgataaggcaggttctattaaagtgaaggagctggtgaaggctgctgaggaagagccaggagagccttttgaaatcgttgaaagagttaaagaggacttagagaaagtgaatgaaatcctgagaagtggaacctgcacaagagatgaaagcagtgtgcagagctctcggtctgagagaggattagttgaagaggaatgggttattgtcagtgatgaggaaatagaagaggctaggcaaaaagcacctttagaaatcactgaatatccatgtgtagaagttagaatagataaagagatcaaaggaaaagtagagaaagactcaactgggctagtgaactaccttactgatgatctgaatacctgtgtgcctcttcccaaagagcagctgcagacagttcaagataaggcagggaagaaatgtgaggctctggctgttggcaggagctctgaaaaggaagggaaagacatacccccagatgagacacagagtacacagaaacagcacaaaccaagcttgggaataaagaagccagtaagaaggaaattaaaagaaaagcagaaacaaaaagaggaaggtttacaagctagtgcagagaaagctgaacttaaaaaaggtagttcagaagagtcattaggtgaagacccaggtttagcccctgaaccccttcccactgtcaaggccacatctcctttgatagaagaaactcccattggttccataaaggacaaagtaaaggcccttcagaagcgagtggaagatgaacagaaaggtcgaagcaagttgcccatcagagtcaaaggcaaggaggacgtgccaaaaaagaccacccacaggccacatccagctgcgtcaccctctctgaagtcagagagacatgcgccagggtctccctcccctaaaacagaaagacactctactctttcctcttccgcaaaaactgaaaggcaccctccagtatcaccatcaagtaaaactgagaaacactcacctgtgtcaccctctgcaaaaacggaaagacatacccccagatgagacacagagtacacagaaacagcacaaaccaagcttgggaataaagaagccagtaagaaggaaattaaaagaaaagcagaaac

SEQ ID NO: 403603 - DNA, 265 bp, Homo sapiens
gatgtcctgagacccacccccaccaagagtatgcctgcagaaaaacaggtagtctgacttggctaaggtccgagctacttgccttgctggtttggattgagtatacacactgggtgagtctaacggtggacgtggaggagtaggagaaccagagccagttcaggtgcagggaggctgggagaaggcaggcttggaagaaagaatgaggaagggaaaagaaagggcaagagagacagagagagcaggtgctgtggggagaggaact

SEQ ID NO: 403604 - DNA, 163 bp, Homo sapiens
tggctctgtgacccggggagtctacctgtctgagcctcgactttctcattggtgaaacggtgatgataacagctcatatctcagaactgggtgtgaggatcaaattaggaaaatccgttaataatggcaaatacttatttggcacttactgcatatcaggccc

SEQ ID NO: 403605 - DNA, 213 bp, Homo sapiens
ctctataggtatcttttatacacatatactgagtgacgtgattacaacagtcaagcaaattaacactatataagacttcctggtttaagaagttgcaaatatcttctcccaacatacaggctattaactttgtctatgtgaggtctaacaatgaatcaaaattcttagctttgatgtgataaaatctaccaggcttttatttttttttgtaat

SEQ ID NO: 403606 - DNA, 176 bp, Homo sapiens
cgggagaagctgaccctcaccacatctatcttttacaaccttttacgctggcaactgtgtcctaccagagagaacccaagaggcctatgtggccaaaccactttaggttggtccacaacaaacatgccacttggtgaatctgaaatgggtagacttcaggaagggatcccttagta

SEQ ID NO: 403607 - DNA, 520 bp, Homo sapiens
acctgtaaatgttaccttataagggaaaagtgcctttgcatacgtgattaagtagcttgaaatggagagattatcgtgaattatctaggtgggtcctaaatgcaaacgcaaaggtcctaagagagagagagaagcagatttgatataggccgaagagaaggcaatgtgaccacagaggcagatattggagtgatgtggccacaagtcaccaaatgcctggcaaccagcagagctagaagaggcaaggaactgattctcttgcagagcctccagagggagggagggagccctgccaacaccatgctttcttccccatgagactgattttggattcctggcctccagaattatgaaagaataagttgctattgttttaagctaccgagttttgataatttgttatggaaactgtagggaactaatacatatgagcgtgctcataaatcacatacatgctgtactgatgaatagtttacaggtcttcagctggggcaatagtggggtacagtagtggagatca

SEQ ID NO: 403608 - DNA, 396 bp, Homo sapiens
gagaaaaagcatcccacctggggaggaaaggaagggctgggaaagaccccagaacggcacccctccaacaaggcaggaagggagaaggacagcccctccggctgggtggaggatgccaggaaggggctgaaccacggcctgctgggaatcacggcccttcctttcctcagatcgccttgcggcctggcactggagctggtgctgacagggacgctggccaacagggtggtatttttcacccgggtgatctgagctgctggcaggtagggggtgggctgggggaggcgggtgagggctggtcttagataggaatgcagcccagaagggaccaagcacttgcccatcctcactggctttcaaaaaataaacagtaaaaataaaagtcccatgaacctt

SEQ ID NO: 403609 - DNA, 235 bp, Homo sapiens
cagtgatcataaataaaatcttgtcgtactattataggatgtttggcaaggacaagaattaaggcacctttacaactccctaaggaatctggtgatatttctaacatgatctcacacattctgtcctgcccgaccttccttgtatcaccttcctgagttatagcttgtatccgttaccctctcctccttccacagcctctccccaaaataaagaattgctgacctgaagaaaaca

SEQ ID NO: 403610 - DNA, 212 bp, Homo sapiens
tacctacaaagcatttcacctatagctataatattaccattaaaagcatatttatgtttaagcaacttttatttagcttaattatgaatattccattgaactgccatcatttaatgtagtgtctgttataagagttggaaatgttgcaagaagtatgtgtaacctcaataacattctaagacaaatgcaatcactgttaacattttaggagt

SEQ ID NO: 403611 - DNA, 496 bp, Homo sapiens
aagaattgtcaagggtgcctccgggcttcatgatgtttacggtcatatttctaaatctatactccgcctatagaaggatcttaacatggctacaagtcccaacattgggtgcctgaagttaatttattatcttagtcaagatttacatgtcacttttgagacctgaatctactccaagaatttctgttactgagtcatcatgataatactgtctgatagatagaaagctgtcttgtatgcagttgctattcagttaatgttgaataaattattttagaactatggatatttcacttgacccttccatcctctttttatatgtagagtgaaataagaaatttctgtagttatacaagtaaatgtagttcttaggccaggtacagtagctcatgcctataatcccagcactttaggaggctgatacaggaggattgcttggagccaggaattcaagaccaccctgagcgacatagtgagacccccatctctaccaaaa

SEQ ID NO: 403612 - DNA, 186 bp, Homo sapiens
aatcctcctaactggttataaacacatctcaaactaattcctctctagaaccctctgctctctgaaaggtgaaacaaatggcaagacaaggatgcattaggggctgcatggtggctcacaccaggaatctgtatttttaagaagtgccactagataatgctgaagtattaggaactattggtttat

SEQ ID NO: 403613 - DNA, 858 bp, Homo sapiens
aaaaaaatcagagaagggggaaaataaggaagcagcagctaaatatctgaatgtgcccccaaagatattcctggaataaccagctttatagcatagattcaaaaaaagttagtgccagcatgaagcagcatcatgcacccaggagtcagtgtgctggcagcaccattcctctatatatatcccaggcaccgaacctcttggtctcactatcccaaaagtaggaagaacagacgggccactagctgaagagaactgcttaattagtgccagcaatgtgccaggcactaacatattttgcatttaaccctcactatcacccaaggggtgggtgttatttcctcacctgataagttaagtaatcttcctgtgtttacatagataagtggcagagctgggatttgaactccttcccctgattcctacctaaatttgaacagtggttctgtacattttccatttgtagatcctctttgaatcttcctgcccacataactaaaagaattttcttccctaatttttttgtttacttttttggaagactcactattgttaaaatgtcagtgaaatcagttgctttgatttatacagtcaaagaaatcccaatcaagatcccagcagcctgttttgtagaaattgataagctggttgtaaaatttatttaaaaagcaaaggctctagactaaccagaaaaaattgaaaaagaaggacaaagttggagaatttaccctacctgatttcaaaactttacaaagctagagtaaaatttacaaagctagagtaaactttacaaagctagagtaaactttacaaagctagagtaaactttacaaagctagagtaaactttacaaagctagag

SEQ ID NO: 403614 - DNA, 118 bp, Homo sapiens
ctgttccattcgccactcacaagatctcctacctccaccccctaccctggcacaaaggccacttctgatggctcagaacacatctggcagagtgacaaagtgaaaggcctttaaaaag

SEQ ID NO: 403615 - DNA, 382 bp, Homo sapiens
gtagagatgaggtttcgccaagttggccacgctggtcttgaactcctgacctcaagtgatccgcctacccaaagtgctgggattacaggcgtgagtgactgcgcctgctgccccccacatttcttaattctcccctagaagacaaagttgggaaagtatctgatttctgtgtaattgctgcttttagaatcatgaacctaaacgttttccagaaacgactctcccagatctcatgcacttatttcatttgtagaatccctaaaacacagcaaaggggatatcagaaggccataagcagtaaagggcacaggaatggggcaagcctagggcacactggagccaactgttttggtagactatacagaaaacgtagcacacttac

SEQ ID NO: 403616 - DNA, 157 bp, Homo sapiens
catcttacagatgaagaaatagtacctagttaatgacagaactaggattcaaacccaggtacttgggctcctcagcatggcttgagagacagacagaaagagagagagagagaaagaaagaaagagaaagaaagaaagaaagagaaagaaagaaatg

SEQ ID NO: 403617 - DNA, 528 bp, Homo sapiens
ttcattctgacaagttgcactaaactgaggcctgaagcatactgtgagaacctctctgtggatcccataaagtactcaggaaatatgcacttgacatctggtttgctggattcctgctgagaaatggaggatttggtgtgaggctgtcggtccggactggcagattggctgtgcatataactgtgcatgaatccacacaaaggggtcatgttcaggcaatacttgggcatgttccaacagaatctcaagaaggcatatgagcagagattgaacagttggattcttgtacagaaaaggcagtggtaacttatggatgggagtgttaggcatgcacctctaagaaatagggaatgtgaggtgcgtgctgcagaatatgattcaaataccaagatactttaaagtacatatacttggaggaaagggggaaaaataataagaccttggtaattgttagcagaattgtaaaactgcacttctcagtgctttttgggtagatcacaataaaatacttttaaatattttaaattt

SEQ ID NO: 403618 - DNA, 365 bp, Homo sapiens
aatgtgcaaagtacctagcacatagataatacccaattaatgctagctatttttattattaaggttaaacagagacccaagggctggaatcattctacactggtgtaattattaatacatcaaacctattctagttttccatgatatatatgagtccatgataaccttttaactagtaccatcacaggcagttaaaacgatctatcagaaggtacataaatccaaaaacagcagtgtagtgattacattgtacagatgaagcagcagtcttaaggcagaaagaaacatgttcatggaatatagaaatagaaaatctgtatcaatttctttttttcaaattcagtgagtaaaaaatgtaccctttt

SEQ ID NO: 403619 - DNA, 334 bp, Homo sapiens
ctacgcaatagattacaactgtaatttccagtttcagaggagctataagacatctttaaaaagtgatgtaagaaatcagaatttgaaaatctcaaattaggtgacaggcttcaggaagaattaataaataaaagctcatttcagaattgaagactgaacctgaaggaagacaagaacaaatagatgcaaagataatgttggtaagaggaatagaaggggagcaggaggaaaattgtaaaaatcacaaagcaataagaacaaaaagattaaggttaagtgataaatactgaagacaggcaaagataattcagtctaccaataaagagtccctgag

SEQ ID NO: 403620 - DNA, 1011 bp, Homo sapiens
cagcccctggagcttctccgggcagaagaggaggtgggctggactgtcaaagaaagtggctggcttccgtgggcaatccgaggttcctagtggccctctgcagaaagctgaactcccagttcccccaggcctccgtcccgcggcggactcctaggcttcctccctccctgtcgccgccagcctctcgctctccccgtcttccgcccgcactctctgggcagggctgcggccaggacccgcccccgcgtcccgcccgaccctccgccaggggtcacttcccctgtccaggtttcagcttccacatgtgtcaagcggctggctcagcccagagtccctgtctcccgcccgccggcccgagccgccgcccctcccccgcctcccgtgcgcccgggacaatcctcgccttgtctgtggcgccggcatctggagctttctgtagcctccggatacgcctttttttcagggcgtagccccagccaagctgctccccgcggcggccgcacagcagcccgagcgccccctttccagagctcccctccggagctgggatccaggcgcgtagcggagatcccaggatcctgggtgctgtctgggcccgctccccaccatgacctcctcggggcctggaccccggttcctgctgctgctgccgctgctgctgccccctgcggcctcagcctccgaccggccccggggccgagacccggtcaacccaggtgagatcccggggaggcccggcacggccgagggggcagaggctgacgtgcctgccagcctggcccggagagggtcggaggctcgaggaggtgtctggcccgtcccccgcccagcgtgctcttgaggctgagtcgcgccaagcccctcgcccatcactaccctgaactggggtttccagcctccctatgcaaagggactcggaattcctgggcaccactcccaccctgccctccttggggtcagagtgttcctgggtgagaagagtttaagaatgggaaggaagaaagggaggga

SEQ ID NO: 403621 - DNA, 2417 bp, Homo sapiens
tttattcatgccgggctgatctttgttgttacttgctgtgcccgcggccgacctgcgtttcctgcgctctgcggagttcttcaactacactgtgcggaccctgggcctgggagaggagtggcgagggggtgatgtggctcgaacagttggtggaggacagaaggtccggtggttaaagaaggaaatggagaaatacgctgaccgggaggatatgatcatcatgtttgtggatagctacgacgtgattctggccggcagccccacagagctgctgaagaagttcgtccagagtggcagccgcctgctcttctctgcagagagcttctgctggcccgagtgggggctggcggagcagtaccctgaggtgggcacggggaagcgcttcctcaattctggtggattcatcggttttgccaccaccatccaccaaatcgtgcgccagtggaagtacaaggatgatgacgacgaccagctgttctacacacggctctacctggacccaggactgagggagaaactcagccttaatctggatcataagtctcggatctttcagaacctcaacggggctttagatgaagtggttttaaagtttgatcggaaccgtgtgcgtatccggaacgtggcctacgacacgctccccattgtggtccatggaaacggtcccactaagctgcagctcaactacctgggaaactacgtccccaatggctggactcctgagggaggctgtggcttctgcaaccaggaccggaggacactcccgggggggcagcctcccccccgggtgtttctggccgtgtttgtggaacagcctactccgtttctgccccgcttcctgcagcggctgctactcctggactatccccccgacagggtcacccttttcctgcacaacaacgaggtcttccatgaaccccacatcgctgactcctggccgcagctccaggaccacttctcagctgtgaagctcgtggggccggaggaggctctgagcccaggcgaggccagggacatggccatggacctgtgtcggcaggaccccgagtgtgagttctacttcagcctggacgccgacgctgtcctcaccaacctgcagaccctgcgtatcctcattgaggagaacaggaaggtgatcgcccccatgctgtcccgccacggcaagctgtggtccaacttctggggcgccctgagccccgatgagtactacgcccgctccgaggactacgtggagctggtgcagcggaagcgagtgggtgtgtggaatgtaccatacatctcccaggcctatgtgatccggggtgataccctgcggatggagctgccccagagggatgtgttctcgggcagtgacacagacccggacatggccttctgtaagagctttcgagacaagggcatcttcctccatctgagcaatcagcatgaatttggccggctcctggccacttccagatacgacacggagcacctgcaccccgacctctggcagatcttcgacaaccccgtcgactggaaggagcagtacatccacgagaactacagccgggccctggaaggggaaggaatcgtggagcagccatgcccggacgtgtactggttcccactgctgtcagaacaaatgtgtgatgagctggtggcagagatggagcactacggccagtggtcaggcggccggcatgaggattcaaggctggctggaggctacgagaatgtgcccaccgtggacatccacatgaagcaggtggggtacgaggaccagtggctgcagctgctgcggacgtatgtgggccccatgaccgagagcctgtttcccggttaccacaccaaggcgcgggcggtgatgaactttgtggttcgctaccggccagacgagcagccgtctctgcggccacaccacgactcatccaccttcaccctcaacgttgccctcaaccacaagggcctggactatgagggaggtggctgccgcttcctgcgctacgactgtgtgatctcctccccgaggaagggctgggcactcctgcaccccggccgcctcacccactaccacgaggggctgccaacgacctggggcacacgctacatcatggtgtcctttgtcgacccctgacactcaaccactctgccaaacctgccctgccattgtgcctttttagggggcctggcccccgtcctgggagttgggggatgggtctctctgtctccccacttcctgagttcatgttccgcgtgcctgaactgaatatgtcaccttgctcccaagacacggccctctcaggaagctcccggagtccccgcctctctcctccgcccacaggggttcgtgggcacagggcttctggggactccccgcgtgataaattattaatgttccgcagtctcactctgaataaaggacagtttgtaagtcttga

SEQ ID NO: 403622 - DNA, 3002 bp, Homo sapiens
cagcccctggagcttctccgggcagaagaggaggtgggctggactgtcaaagaaagtggctggcttccgtgggcaatccgaggttcctagtggccctctgcagaaagctgaactcccagttcccccaggcctccgtcccgcggcggactcctaggcttcctccctccctgtcgccgccagcctctcgctctccccgtcttccgcccgcactctctgggcagggctgcggccaggacccgcccccgcgtcccgcccgaccctccgccaggggtcacttcccctgtccaggtttcagcttccacatgtgtcaagcggctggctcagcccagagtccctgtctcccgcccgccggcccgagccgccgcccctcccccgcctcccgtgcgcccgggacaatcctcgccttgtctgtggcgccggcatctggagctttctgtagcctccggatacgcctttttttcagggcgtagccccagccaagctgctccccgcggcggccgcacagcagcccgagcgccccctttccagagctcccctccggagctgggatccaggcgcgtagcggagatcccaggatcctgggtgctgtctgggcccgctccccaccatgacctcctcggggcctggaccccggttcctgctgctgctgccgctgctgctgccccctgcggcctcagcctccgaccggccccggggccgagacccggtcaacccagagaagctgctggtgatcactgtggccacagctgaaaccgaggggtacctgcgtttcctgcgctctgcggagttcttcaactacactgtgcggaccctgggcctgggagaggagtggcgagggggtgatgtggctcgaacagttggtggaggacagaaggtccggtggttaaagaaggaaatggagaaatacgctgaccgggaggatatgatcatcatgtttgtggatagctacgacgtgattctggccggcagccccacagagctgctgaagaagttcgtccagagtggcagccgcctgctcttctctgcagagagcttctgctggcccgagtgggggctggcggagcagtaccctgaggtgggcacggggaagcgcttcctcaattctggtggattcatcggttttgccaccaccatccaccaaatcgtgcgccagtggaagtacaaggatgatgacgacgaccagctgttctacacacggctctacctggacccaggactgagggagaaactcagccttaatctggatcataagtctcggatctttcagaacctcaacggggctttagatgaagtggttttaaagtttgatcggaaccgtgtgcgtatccggaacgtggcctacgacacgctccccattgtggtccatggaaacggtcccactaagctgcagctcaactacctgggaaactacgtccccaatggctggactcctgagggaggctgtggcttctgcaaccaggaccggaggacactcccgggggggcaggaggtcttccatgaaccccacatcgctgactcctggccgcagctccaggaccacttctcagctgtgaagctcgtggggccggaggaggctctgagcccaggcgaggccagggacatggccatggacctgtgtcggcaggaccccgagtgtgagttctacttcagcctggacgccgacgctgtcctcaccaacctgcagaccctgcgtatcctcattgaggagaacaggaaggtgatcgcccccatgctgtcccgccacggcaagctgtggtccaacttctggggcgccctgagccccgatgagtactacgcccgctccgaggactacgtggagctggtgcagcggaagcgagtgggtgtgtggaatgtaccatacatctcccaggcctatgtgatccggggtgataccctgcggatggagctgccccagagggatgtgttctcgggcagtgacacagacccggacatggccttctgtaagagctttcgagacaagggcatcttcctccatctgagcaatcagcatgaatttggccggctcctggccacttccagatacgacacggagcacctgcaccccgacctctggcagatcttcgacaaccccgtcgactggaaggagcagtacatccacgagaactacagccgggccctggaaggggaaggaatcgtggagcagccatgcccggacgtgtactggttcccactgctgtcagaacaaatgtgtgatgagctggtggcagagatggagcactacggccagtggtcaggcggccggcatgaggattcaaggctggctggaggctacgagaatgtgcccaccgtggacatccacatgaagcaggtggggtacgaggaccagtggctgcagctgctgcggacgtatgtgggccccatgaccgagagcctgtttcccggttaccacaccaaggcgcgggcggtgatgaactttgtggttcgctaccggccagacgagcagccgtctctgcggccacaccacgactcatccaccttcaccctcaacgttgccctcaaccacaagggcctggactatgagggaggtggctgccgcttcctgcgctacgactgtgtgatctcctccccgaggaagggctgggcactcctgcaccccggccgcctcacccactaccacgaggggctgccaacgacctggggcacacgctacatcatggtgtcctttgtcgacccctgacactcaaccactctgccaaacctgccctgccattgtgcctttttagggggcctggcccccgtcctgggagttgggggatgggtctctctgtctccccacttcctgagttcatgttccgcgtgcctgaactgaatatgtcaccttgctcccaagacacggccctctcaggaagctcccggagtccccgcctctctcctccgcccacaggggttcgtgggcacagggcttctggggactccccgcgtgataaattattaatgttccgcagtctcactctgaataaaggacagtttgtaagtcttga

SEQ ID NO: 403623 - DNA, 4012 bp, Homo sapiens
cagcccctggagcttctccgggcagaagaggaggtgggctggactgtcaaagaaagtggctggcttccgtgggcaatccgaggttcctagtggccctctgcagaaagctgaactcccagttcccccaggcctccgtcccgcggcggactcctaggcttcctccctccctgtcgccgccagcctctcgctctccccgtcttccgcccgcactctctgggcagggctgcggccaggacccgcccccgcgtcccgcccgaccctccgccaggggtcacttcccctgtccaggtttcagcttccacatgtgtcaagcggctggctcagcccagagtccctgtctcccgcccgccggcccgagccgccgcccctcccccgcctcccgtgcgcccgggacaatcctcgccttgtctgtggcgccggcatctggagctttctgtagcctccggatacgcctttttttcagggcgtagccccagccaagctgctccccgcggcggccgcacagcagcccgagcgccccctttccagagctcccctccggagctgggatccaggcgcgtagcggagatcccaggatcctgggtgctgtctgggcccgctccccaccatgacctcctcggggcctggaccccggttcctgctgctgctgccgctgctgctgccccctgcggcctcagcctccgaccggccccggggccgagacccggtcaacccagagaagctgctggtgatcactgtggccacagctgaaaccgaggggtacctgcgtttcctgcgctctgcggagttcttcaactacactgtgcggaccctgggcctgggagaggagtggcgagggggtgatgtggctcgaacagttggtggaggacagaaggtccggtggttaaagaaggaaatggagaaatacgctgaccgggaggatatgatcatcatgtttgtggatagctacgacgtgattctggccggcagccccacagagctgctgaagaagttcgtccagagtggcagccgcctgctcttctctgcagagagcttctgctggcccgagtgggggctggcggagcagtaccctgaggtgggcacggggaagcgcttcctcaattctggtggattcatcggttttgccaccaccatccaccaaatcgtgcgccagtggaagtacaaggatgatgacgacgaccagctgttctacacacggctctacctggacccaggactgagggagaaactcagccttaatctggatcataagtctcggatctttcagaacctcaacggggctttagatgaagtggttttaaagtttgatcggaaccgtgtgcgtatccggaacgtggcctacgacacgctccccattgtggtccatggaaacggtcccactaagctgcagctcaactacctgggaaactacgtccccaatggctggactcctgagggaggctgtggcttctgcaaccaggaccggaggacactcccgggggggcagcctcccccccgggtgtttctggccgtgtttgtggaacagcctactccgtttctgccccgcttcctgcagcggctgctactcctggactatccccccgacagggtcacccttttcctgcacaacaacgaggtcttccatgaaccccacatcgctgactcctggccgcagctccaggaccacttctcagctgtgaagctcgtggggccggaggaggctctgagcccaggcgaggccagggacatggccatggacctgtgtcggcaggaccccgagtgtgagttctacttcagcctggacgccgacgctgtcctcaccaacctgcagaccctgcgtatcctcattgaggagaacaggaaggtgatcgcccccatgctgtcccgccacggcaagctgtggtccaacttctggggcgccctgagccccgatgagtactacgcccgctccgaggactacgtggagctggtgcagcggaagcgagtgggtgtgtggaatgtaccatacatctcccaggcctatgtgatccggggtgataccctgcggatggagctgccccagagggatgtgttctcgggcagtgacacagacccggacatggccttctgtaagagctttcgagacaagggcatcttcctccatctgagcaatcagcatgaatttggccggctcctggccacttccagatacgacacggagcacctgcaccccgacctctggcagatcttcgacaaccccgtcgactggaaggagcagtacatccacgagaactacagccgggccctggaaggggaaggaatcgtggagcagccatgcccggacgtgtactggttcccactgctgtcagaacaaatgtgtgatgagctggtggcagagatggagcactacggccagtggtcaggcggccggcatgaggattcaaggctggctggaggctacgagaatgtgcccaccgtggacatccacatgaagcaggtggggtacgaggaccagtggctgcagctgctgcggacgtatgtgggccccatgaccgagagcctgtttcccggttaccacaccaaggcgcgggcggtgatgaactttgtggttcgctaccggccagacgagcagccgtctctgcggccacaccacgactcatccaccttcaccctcaacgttgccctcaaccacaagggcctggactatgagggaggtggctgccgcttcctgcgctacgactgtgtgatctcctccccgaggaagggctgggcactcctgcaccccggccgcctcacccactaccacgaggggctgccaacgacctggggcacacgctacatcatggtgtcctttgtcgacccctgacactcaaccactctgccaaacctgccctgccattgtgcctttttagggggcctggcccccgtcctgggagttgggggatgggtctctctgtctccccacttcctgagttcatgttccgcgtgcctgaactgaatatgtcaccttgctcccaagacacggccctctcaggaagctcccggagtccccgcctctctcctccgcccacaggggttcgtgggcacagggcttctggggactccccgcgtgataaattattaatgttccgcagtctcactctgaataaaggacagtttgtaagtcttgaaaaacaaaaacaaaaaaaaaaaaaaaaaaaaaaaaaaaaaaaacaacaaaaaaaaaaaagggggggcccccacaaaatcccccgcggagggcccacagacagtcacaggtcacaccacgaatatcagtagacaccaagagggccccccaaaaagggagcgcacacacaaaacacagccgagaaccacgcgcgcccctcataaaaaaagagggcgcggggagagggagaaacaaacgtgtcgaaggggggaaacacccgcgagagcaacaacgcccactaaacccactgggcggcgaggagaaacacactgcgggccgcgacaaccccctctcccgacgggagacgaattaccaacgaccacgagagaggccgacacaactaagcaccacatccgccacacacacaccaaaacaggggtgctaacaacacaacgcgaagaaaaactacctcgactgcccgccgacaaaagcaatacggcacacaccggcggacgcacggcagctcagttccaagacagaacataattagctaccagggagagcgccggcacagaataaacaccaagcaacagacaaccaagagagagacacaggcgacaaacacgagccgacgacagcagagaacacacgccagcgcacgcagagacgcaggtgcgcagccggggaggagtggcggagtcgccgcccaggatagggggggaggacggggagctacgacgcgagagtgagcaggaggcacgaagaagcacgacagtctcgaggagagagcgagcaggacgcacgaagtcggtcggactgtgcaccggtagagggcggacgcagccacgggcggcgcgctcggaccgcgacgcaacagggcgggggcggatcgacacgacgcgtccg

SEQ ID NO: 403624 - DNA, 1700 bp, Homo sapiens
  misc_feature (50)..(50): n is a, c, g, or t
ttggctaggtggaggctggggtcagtcggccgaggggaggacactcccgngggggcagcctcccccccgggtgtttctggccgtgtttgtggaacagcctactccgtttctgccccgcttcctgcagcggctgctactcctggactatccccccgacagggtcacccttttcctgcacaacaacgaggtcttccatgaaccccacatcgctgactcctggccgcagctccaggaccacttctcagctgtgaagctcgtggggccggaggaggctctgagcccaggcgaggccagggacatggccatggacctgtgtcggcaggaccccgagtgtgagttctacttcagcctggacgccgacgctgtcctcaccaacctgcagaccctgcgtatcctcattgaggagaacaggaaggtgatcgcccccatgctgtcccgccacggcaagctgtggtccaacttctggggcgccctgagccccgatgagtactacgcccgctccgaggactacgtggagctggtgcagcggaagcgagtgggtgtgtggaatgtaccatacatctcccaggcctatgtgatccggggtgataccctgcggatggagctgccccagagggatgtgttctcgggcagtgacacagacccggacatggccttctgtaagagctttcgagacaagggcatcttcctccatctgagcaatcagcatgaatttggccggctcctggccacttccagatacgacacggagcacctgcaccccgacctctggcagatcttcgacaaccccgtcgactggaaggagcagtacatccacgagaactacagccgggccctggaaggggaaggaatcgtggagcagccatgcccggacgtgtactggttcccactgctgtcagaacaaatgtgtgatgagctggtggcagagatggagcactacggccagtggtcaggcggccggcatgaggattcaaggctggctggaggctacgagaatgtgcccaccgtggacatccacatgaagcaggtggggtacgaggaccagtggctgcagctgctgcggacgtatgtgggccccatgaccgagagcctgtttcccggttaccacaccaaggcgcgggcggtgatgaactttgtggttcgctaccggccagacgagcagccgtctctgcggccacaccacgactcatccaccttcaccctcaacgttgccctcaaccacaagggcctggactatgagggaggtggctgccgcttcctgcgctacgactgtgtgatctcctccccgaggaagggctgggcactcctgcaccccggccgcctcacccactaccacgaggggctgccaacgacctggggcacacgctacatcatggtgtcctttgtcgacccctgacactcaaccactctgccaaacctgccctgccattgtgcctttttagggggcctggcccccgtcctgggagttgggggatgggtctctctgtctccccacttcctgagttcatgttccgcgtgcctgaactgaatatgtcaccttgctcccaagacacggccctctcaggaagctcccggagtccccgcctctctcctccgcccacaggggttcgtgggcacagggcttctggggactccccgcgtgataaattattaatgttccgcagtctcactctgaataaaggacagtttgtaagtcttga

SEQ ID NO: 403625 - DNA, 2555 bp, Homo sapiens
cagcccctggagcttctccgggcagaagaggaggtgggctggactgtcaaagaaagtggctggcttccgtgggcaatccgaggttcctagtggccctctgcagaaagctgaactcccagttcccccaggcctccgtcccgcggcggactcctaggcttcctccctccctgtcgccgccagcctctcgctctccccgtcttccgcccgcactctctgggcagggctgcggccaggacccgcccccgcgtcccgcccgaccctccgccaggggtcacttcccctgtccaggtttcagcttccacatgtgtcaagcggctggctcagcccagagtccctgtctcccgcccgccggcccgagccgccgcccctcccccgcctcccgtgcgcccgggacaatcctcgccttgtctgtggcgccggcatctggagctttctgtagcctccggatacgcctttttttcagggcgtagccccagccaagctgctccccgcggcggccgcacagcagcccgagcgccccctttccagagctcccctccggagctgggatccaggcgcgtagcggagatcccaggatcctgggtgctgtctgggcccgctccccaccatgacctcctcggggcctggaccccggttcctgctgctgctgccgctgctgctgccccctgcggcctcagcctccgaccggccccggggccgagacccggtcaacccagagaagctgctggtgatcactgtggccacagctgaaaccgaggggtacctgcgtttcctgcgctctgcggagttcttcaactacactgtgcggaccctgggcctgggagaggagtggcgagggggtgatgtggctcgaacagttggtggaggacagaaggtccggtggttaaagaaggaaatggagaaatacgctgaccgggaggatatgatcatcatgtttgtggatagctacgacgtgattctggccggcagccccacagagctgctgaagaagttcgtccagagtggcagccgcctgctcttctctgcagagagcttctgctggcccgagtgggggctggcggagcagtaccctgaggtgggcacggggaagcgcttcctcaattctggtggattcatcggttttgccaccaccatccaccaaatcgtgcgccagtggaagtacaaggatgatgacgacgaccagctgttctacacacggctctacctggacgccgacgctgtcctcaccaacctgcagaccctgcgtatcctcattgaggagaacaggaaggtgatcgcccccatgctgtcccgccacggcaagctgtggtccaacttctggggcgccctgagccccgatgagtactacgcccgctccgaggactacgtggagctggtgcagcggaagcgagtgggtgtgtggaatgtaccatacatctcccaggcctatgtgatccggggtgataccctgcggatggagctgccccagagggatgtgttctcgggcagtgacacagacccggacatggccttctgtaagagctttcgagacaagggcatcttcctccatctgagcaatcagcatgaatttggccggctcctggccacttccagatacgacacggagcacctgcaccccgacctctggcagatcttcgacaaccccgtcgactggaaggagcagtacatccacgagaactacagccgggccctggaaggggaaggaatcgtggagcagccatgcccggacgtgtactggttcccactgctgtcagaacaaatgtgtgatgagctggtggcagagatggagcactacggccagtggtcaggcggccggcatgaggattcaaggctggctggaggctacgagaatgtgcccaccgtggacatccacatgaagcaggtggggtacgaggaccagtggctgcagctgctgcggacgtatgtgggccccatgaccgagagcctgtttcccggttaccacaccaaggcgcgggcggtgatgaactttgtggttcgctaccggccagacgagcagccgtctctgcggccacaccacgactcatccaccttcaccctcaacgttgccctcaaccacaagggcctggactatgagggaggtggctgccgcttcctgcgctacgactgtgtgatctcctccccgaggaagggctgggcactcctgcaccccggccgcctcacccactaccacgaggggctgccaacgacctggggcacacgctacatcatggtgtcctttgtcgacccctgacactcaaccactctgccaaacctgccctgccattgtgcctttttagggggcctggcccccgtcctgggagttgggggatgggtctctctgtctccccacttcctgagttcatgttccgcgtgcctgaactgaatatgtcaccttgctcccaagacacggccctctcaggaagctcccggagtccccgcctctctcctccgcccacaggggttcgtgggcacagggcttctggggactccccgcgtgataaattattaatgttccgcagtctcactctgaataaaggacagtttgtaagtcttga

SEQ ID NO: 403626 - DNA, 2506 bp, Homo sapiens
  misc_feature (2414)..(2414): n is a, c, g, or t
  misc_feature (2416)..(2416): n is a, c, g, or t
  misc_feature (2420)..(2420): n is a, c, g, or t
  misc_feature (2423)..(2423): n is a, c, g, or t
  misc_feature (2432)..(2432): n is a, c, g, or t
  misc_feature (2435)..(2435): n is a, c, g, or t
cagcccctggagcttctccgggcagaagaggaggtgggctggactgtcaaagaaagtggctggcttccgtgggcaatccgaggttcctagtggccctctgcagaaagctgaactcccagttcccccaggcctccgtcccgcggcggactcctaggcttcctccctccctgtcgccgccagcctctcgctctccccgtcttccgcccgcactctctgggcagggctgcggccaggacccgcccccgcgtcccgcccgaccctccgccaggggtcacttcccctgtccaggtttcagcttccacatgtgtcaagcggctggctcagcccagagtccctgtctcccgcccgccggcccgagccgccgcccctcccccgcctcccgtgcgcccgggacaatcctcgccttgtctgtggcgccggcatctggagctttctgtagcctccggatacgcctttttttcagggcgtagccccagccaagctgctccccgcggcggccgcacagcagcccgagcgccccctttccagagctcccctccggagctgggatccaggcgcgtagcggagatcccaggatcctgggtgctgtctgggcccgctccccaccatgacctcctcggggcctggaccccggttcctgctgctgctgccgctgctgctgccccctgcggcctcagcctccgaccggccccggggccgagacccggtcaacccagagaagctgctggtgatcactgtggccacagctgaaaccgaggggtacctgcgtttcctgcgctctgcggagttcttcaactacactgtgcggaccctgggcctgggagaggagtggcgagggggtgatgtggctcgaacagttggtggaggacagaaggtccggtggttaaagaaggaaatggagaaatacgctgaccgggaggatatgatcatcatgtttgtggatagctacgacgtgattctggccggcagccccacagagctgctgaagaagttcgtccagagtggcagccgcctgctcttctctgcagagagcttctgctggcccgagtgggggctggcggagcagtaccctgaggtgggcacggggaagcgcttcctcaattctggtggattcatcggttttgccaccaccatccaccaaatcgtgcgccagtggaagtacaaggatgatgacgacgaccagctgttctacacacggctctacctggacccaggactgagggagaaactcagccttaatctggatcataagtctcggatctttcagaacctcaacggggctttagatgaagtggttttaaagtttgatcggaaccgtgtgcgtatccggaacgtggcctacgacacgctccccattgtggtccatggaaacggtcccactaagctgcagctcaactacctgggaaactacgtccccaatggctggactcctgagggaggctgtggcttctgcaaccaggaccggaggacactcccgggggggcagcctcccccccgggtgtttctggccgtgtttgtggaacagcctactccgtttctgccccgcttcctgcagcggctgctactcctggactatccccccgacagggtcacccttttcctgcacaacaacgaggtcttccatgaaccccacatcgctgactcctggccgcagctccaggaccacttctcagctgtgaagctcgtggggccggaggaggctctgagcccaggcgaggccagggacatggccatggacctgtgtcggcaggaccccgagtgtgagttctacttcagcctggacgccgacgctgtcctcaccaacctgcagaccctgcgtatcctcattgaggagaacaggaaggtgatcgcccccatgctgtcccgccacggcaagctgtggtccaacttctggggcgccctgagccccgatgagtactacgcccgctccgaggactacgtggagctggtgcagcggaagcgagtgggtgtgtggaatgtaccatacatctcccaggcctatgtgatccggggtgataccctgcggatggagctgccccagagggatgtgttctcgggcagtgacacagacccggacatggccttctgtaagagctttcgagacaagggcatcttcctccatctgagcaatcagcatgaatttggccggctcctggccacttccagatacgacacggagcacctgcaccccgacctctggcagatcttcgacaaccccgtcgactggaaggagcagtacatccacgagaactacagccgggccctggaaggggaaggaatcgtggagcagccatgcccggacgtgtactggttcccactgctgtcagaacaaatgtgtgatgagctggtggcagagatggagcactacggccagtggtcaggcggccggcatgagattcaaggctgctggaggntncganatntgcccccgnggnctccctgaagcagtgggttccccgaccctggttcctgctcgactttggccctaacgaacgttgcggtacac

SEQ ID NO: 403627 - DNA, 2943 bp, Homo sapiens
  misc_feature (2554)..(2554): n is a, c, g, or t
cagcccctggagcttctccgggcagaagaggaggtgggctggactgtcaaagaaagtggctggcttccgtgggcaatccgaggttcctagtggccctctgcagaaagctgaactcccagttcccccaggcctccgtcccgcggcggactcctaggcttcctccctccctgtcgccgccagcctctcgctctccccgtcttccgcccgcactctctgggcagggctgcggccaggacccgcccccgcgtcccgcccgaccctccgccaggggtcacttcccctgtccaggtttcagcttccacatgtgtcaagcggctggctcagcccagagtccctgtctcccgcccgccggcccgagccgccgcccctcccccgcctcccgtgcgcccgggacaatcctcgccttgtctgtggcgccggcatctggagctttctgtagcctccggatacgcctttttttcagggcgtagccccagccaagctgctccccgcggcggccgcacagcagcccgagcgccccctttccagagctcccctccggagctgggatccaggcgcgtagcggagatcccaggatcctgggtgctgtctgggcccgctccccaccatgacctcctcggggcctggaccccggttcctgctgctgctgccgctgctgctgccccctgcggcctcagcctccgaccggccccggggccgagacccggtcaacccagagaagctgctggtgatcactgtggccacagctgaaaccgaggggtacctgcgtttcctgcgctctgcggagttcttcaactacactgtgcggaccctgggcctgggagaggagtggcgagggggtgatgtggctcgaacagttggtggaggacagaaggtccggtggttaaagaaggaaatggagaaatacgctgaccgggaggatatgatcatcatgtttgtggatagctacgacgtgattctggccggcagccccacagagctgctgaagaagttcgtccagagtggcagccgcctgctcttctctgcagagagcttctgctggcccgagtgggggctggcggagcagtaccctgaggtgggcacggggaagcgcttcctcaattctggtggattcatcggttttgccaccaccatccaccaaatcgtgcgccagtggaagtacaaggatgatgacgacgaccagctgttctacacacggctctacctggacccaggactgagggagaaactcagccttaatctggatcataagtctcggatctttcagaacctcaacggggctttagatgaagtggttttaaagtttgatcggaaccgtgtgcgtatccggaacgtggcctacgacacgctccccattgtggtccatggaaacggtcccactaagctgcagctcaactacctgggaaactacgtccccaatggctggactcctgagggaggctgtggcttctgcaaccaggaccggaggacactcccgggggggcagcctcccccccgggtgtttctggccgtgtttgtggaacagcctactccgtttctgccccgcttcctgcagcggctgctactcctggactatccccccgacagggtcacccttttcctgcacaacaacgaggtcttccatgaaccccacatcgctgactcctggccgcagctccaggaccacttctcagctgtgaagctcgtggggccggaggaggctctgagcccaggcgaggccagggacatggccatggacctgtgtcggcaggaccccgagtgtgagttctacttcagcctggacgccgacgctgtcctcaccaacctgcagaccctgcgtatcctcattgaggagaacaggaaggtgatcgcccccatgctgtcccgccacggcaagctgtggtccaacttctggggcgccctgagccccgatgagtactacgcccgctccgaggactacgtggagctggtgcagcggaagcgagtgggtgtgtggaatgtaccatacatctcccaggcctatgtgatccggggtgataccctgcggatggagctgccccagagggatgtgttctcgggcagtgacacagacccggacatggccttctgtaagagctttcgagacaagggcatcttcctccatctgagcaatcagcatgaatttggccggctcctggccacttccagatacgacacggagcacctgcaccccgacctctggcagatcttcgacaaccccgtcgcacgtggaaggcagcagctaacactccacgagcacactacagccgggcccctgccacaggcggaaggaactcgatcggcagcaacgacccatgccccgggaccgcatgatacctcggtcacccaactagccatgctcagcaacaaaactgctgtgcatgagacatgggatggacacgcaagatcgacagacaaccacaacgcgccccagctgcgcccagagccgcgccgcacccaagaaggcactacaaaagcgcctcggcataggaagcagacctaccgacaacaatgctggcgcacaaacacagcgcgagacagatcaccacgacacagnacacgcaccagtcggcaggtcaccgcagagcacccacgatgcgcctagacccccatagcctgccagggaccgtactcaggtgggcacaccccacatggaaccacgcagcaacgcaatggtcaccccacgcgatactaagccatacacaaaagtggcacccacgggccagcgccgcactgacaccttcatgctggcggaccgcagtacaccagggcccacgacgcgacgcccagccagatctcaactcacagaggccactcacccacccgaatcacaatcccacactcacacacaccatcacacaggaaaggcacttcacacccaacacgagcctgcacacactgacacgaggcacaatcacacggaaccacacccgacaccgcacggcg

SEQ ID NO: 403628 - DNA, 2824 bp, Homo sapiens
cagcccctggagcttctccgggcagaagaggaggtgggctggactgtcaaagaaagtggctggcttccgtgggcaatccgaggttcctagtggccctctgcagaaagctgaactcccagttcccccaggcctccgtcccgcggcggactcctaggcttcctccctccctgtcgccgccagcctctcgctctccccgtcttccgcccgcactctctgggcagggctgcggccaggacccgcccccgcgtcccgcccgaccctccgccaggggtcacttcccctgtccaggtttcagcttccacatgtgtcaagcggctggctcagcccagagtccctgtctcccgcccgccggcccgagccgccgcccctcccccgcctcccgtgcgcccgggacaatcctcgccttgtctgtggcgccggcatctggagctttctgtagcctccggatacgcctttttttcagggcgtagccccagccaagctgctccccgcggcggccgcacagcagcccgagcgccccctttccagagctcccctccggagctgggatccaggcgcgtagcggagatcccaggatcctgggtgctgtctgggcccgctccccaccatgacctcctcggggcctggaccccggttcctgctgctgctgccgctgctgctgccccctgcggcctcagcctccgaccggccccggggccgagacccggtcaacccagagaagctgctggtgatcactgtggccacagctgaaaccgaggggtacctgcgtttcctgcgctctgcggagttcttcaactacactgtgcggaccctgggcctgggagaggagtggcgagggggtgatgtggctcgaacagttggtggaggacagaaggtccggtggttaaagaaggaaatggagaaatacgctgaccgggaggatatgatcatcatgtttgtggatagctacgacgtgattctggccggcagccccacagagctgctgaagaagttcgtccagagtggcagccgcctgctcttctctgcagagagcttctgctggcccgagtgggggctggcggagcagtaccctgaggtgggcacggggaagcgcttcctcaattctggtggattcatcggttttgccaccaccatccaccaaatcgtgcgccagtggaagtacaaggatgatgacgacgaccagctgttctacacacggctctacctggacccaggactgagggagaaactcagccttaatctggatcataagtctcggatctttcagaacctcaacggggctttagatgaagtggttttaaagtttgatcggaaccgtgtgcgtatccggaacgtggcctacgacacgctccccattgtggtccatggaaacggtcccactaagctgcagctcaactacctgggaaactacgtccccaatggctggactcctgagggaggctgtggcttctgcaaccaggaccggaggacactcccgggggggcagcctcccccccgggtgtttctggccgtgtttgtggaacagcctactccgtttctgccccgcttcctgcagcggctgctactcctggactatccccccgacagggtcacccttttcctgcacaacaacgaggtcttccatgaaccccacatcgctgactcctggccgcagctccaggaccacttctcagctgtgaagctcgtggggccggaggaggctctgagcccaggcgaggccagggacatggccatggacctgtgtcggcaggaccccgagtgtgagttctacttcagcctggacgccgacgctgtcctcaccaacctgcagaccctgcgtatcctcattgaggagaacaggaaggtgatcgcccccatgctgtcccgccacggcaagctgtggtccaacttctggggcgccctgagccccgatgagtactacgcccgctccgaggactacgtggagctggtgcagcggaagcgagtgggtgtgtggaatgtaccatacatctcccaggcctatgtgatccggggtgataccctgcggatggagctgccccagagggatgtgttctcgggcagtgacacagacccggacatggccttctgtaagagctttcgagacaagggcatcttcctccatctgagcaatcagcatgaatttggccggctcctggccacttccagatacgacacggagcacctgcaccccgacctctggcagatcttcgacaaccccgtcgtgagtggggaccccacgcccagagcacacaggttccccgccttgtgctaaggaagacaccaaacgtgatggctgctgccagcgcaggacactgagtgggagggggcggtcccctgggggctgggagcgaggggggcacagatctgatgtgccccccaccctctcacaggactggaaggagcagtacatccacgagaactacagccgggccctggaaggggaaggaatcgtggagcagccatgcccggacgtgtactggttcccactgctgtcagaacaaatgtgtgatgagctggtggcagagatggagcactacggccagtggtcaggcggccggcatgaggtaagggcctgggcgaggagggcagaggccttcccagaggaggaggtgcaggatctggtaaacaaacaatggaatcaggaaaatgggagcaaagaggggttcccaggggggaggcagaccctggggtcacaactgcattcattcatgtattcaagaaatatttactgctgggcacagtggctcatgcctgtaatcctagcactttgggaggctgaggcgggaggattgctcgagcagggggagtttgaggccagcctggg

SEQ ID NO: 403629 - DNA, 2317 bp, Homo sapiens
cagcccctggagcttctccgggcagaagaggaggtgggctggactgtcaaagaaagtggctggcttccgtgggcaatccgaggttcctagtggccctctgcagaaagctgaactcccagttcccccaggcctccgtcccgcggcggactcctaggcttcctccctccctgtcgccgccagcctctcgctctccccgtcttccgcccgcactctctgggcagggctgcggccaggacccgcccccgcgtcccgcccgaccctccgccaggggtcacttcccctgtccaggtttcagcttccacatgtgtcaagcggctggctcagcccagagtccctgtctcccgcccgccggcccgagccgccgcccctcccccgcctcccgtgcgcccgggacaatcctcgccttgtctgtggcgccggcatctggagctttctgtagcctccggatacgcctttttttcagggcgtagccccagccaagctgctccccgcggcggccgcacagcagcccgagcgccccctttccagagctcccctccggagctgggatccaggcgcgtagcggagatcccaggatcctgggtgctgtctgggcccgctccccaccatgacctcctcggggcctggaccccggttcctgctgctgctgccgctgctgctgccccctgcggcctcagcctccgaccggccccggggccgagacccggtcaacccagagaagctgctggtgatcactgtggccacagctgaaaccgaggggtacctgcgtttcctgcgctctgcggagttcttcaactacactgtgcggaccctgggcctgggagaggagtggcgagggggtgatgtggctcgaacagttggtggaggacagaaggtccggtggttaaagaaggaaatggagaaatacgctgaccgggaggatatgatcatcatgtttgtggatagctacgacgtgattctggccggcagccccacagagctgctgaagaagttcgtccagagtggcagccgcctgctcttctctgcagagagcttctgctggcccgagtgggggctggcggagcagtaccctgaggtgggcacggggaagcgcttcctcaattctggtggattcatcggttttgccaccaccatccaccaaatcgtgcgccagtggaagtacaaggatgatgacgacgaccagctgttctacacacggctctacctggacccaggactgagggagaaactcagccttaatctggatcataagtctcggatctttcagaacctcaacggggctttagatgaagtggttttaaagtttgatcggaaccgtgtgcgtatccggaacgtggcctacgacacgctccccattgtggtccatggaaacggtcccactaagctgcagctcaactacctgggaaactacgtccccaatggctggactcctgagggaggctgtggcttctgcaaccaggaccggaggacactcccgggggggcagcctcccccccgggtgtttctggccgtgtttgtggaacagcctactccgtttctgccccgcttcctgcagcggctgctactcctggactatccccccgacagggtcacccttttcctgcacaacaacgaggtcttccatgaaccccacatcgctgactcctggccgcagctccaggaccacttctcagctgtgaagctcgtggggccggaggaggctctgagcccaggcgaggccagggacatggccatggacctgtgtcggcaggaccccgagtgtgagttctacttcagcctggacgccgacgctgtcctcaccaacctgcagaccctgcgtatcctcattgaggagaacaggaaggtgatcgcccccatgctgtcccgccacggcaagctgtggtccaacttctggggcgccctgagccccgatgagtactacgcccgctccgaggactacgtggagctggtgcagcggaagcgagtgggtgtgtggaatgtaccatacatctcccaggcctatgtgatccggggtgataccctgcggatggagctgccccagagggatgtgttctcgggcagtgacacagacccggacatggccttctgtaagagctttcgagacaagggcatcttcctccatctgagcaatcagcatgaatttggccggctcctggccacttccacacacccactcgcttccgctgcaccagctccacgtagtcctcggagcgggcgtagtactcatcggggctcaggacgccccagaagttggaccacagcttgccgtggcgggacagcatgggggcgatcaccttcctgttctcctcaatgagga

SEQ ID NO: 403630 - DNA, 223 bp, Homo sapiens
ctcgggaggctgaggcatgagaattgcttgaaaccgggaggcagaggttgcagtgagccaagatcgagccaagatcgcaccactgcactccagcctgagtgacagagcgagactatctcaaaagaataataataatacaaaataaaagaccccctgcgcccgcagctgtccctgcagcctcttccctcctctcccccaggcgcgggcggtgatgaactttgtg

SEQ ID NO: 403631 - DNA, 565 bp, Homo sapiens
agtacatccacgagaactacagccgggccctggaaggggaaggaatcgtggagcaggtgagcccacgcagcctccccacccaccccctgccctcatggccatcgcctcttgggggcccccgcctggattcaaagttttcacactgagttccccagagatctgagggttttctgttcagacaagatgaaggcagaggccgaacagaaaggactcttgcccccaaagccagcattgatcagacagcctcttctcctgtgtattgggtatactggtgttatgcttgaaatcacatcttaaaagaagaatggggctgggctcagtggctcatgcctgtaatcccagcactttgggaggccaaggtgggtggatcggttgaggccagaagtccaagaccagcctgggcaacatagcgagaatctgtctctacaacaacaacaaaaaaattaaataagaaatgaggccaggagtggtgctcatgcttgtaatcccagtacattgagaggccgaggcaggcagatcacctgaggtcaggagttcgagaccagcctggccaacatggcaaatc

SEQ ID NO: 403632 - DNA, 3128 bp, Homo sapiens
cagcccctggagcttctccgggcagaagaggaggtgggctggactgtcaaagaaagtggctggcttccgtgggcaatccgaggttcctagtggccctctgcagaaagctgaactcccagttcccccaggcctccgtcccgcggcggactcctaggcttcctccctccctgtcgccgccagcctctcgctctccccgtcttccgcccgcactctctgggcagggctgcggccaggacccgcccccgcgtcccgcccgaccctccgccaggggtcacttcccctgtccaggtttcagcttccacatgtgtcaagcggctggctcagcccagagtccctgtctcccgcccgccggcccgagccgccgcccctcccccgcctcccgtgcgcccgggacaatcctcgccttgtctgtggcgccggcatctggagctttctgtagcctccggatacgcctttttttcagggcgtagccccagccaagctgctccccgcggcggccgcacagcagcccgagcgccccctttccagagctcccctccggagctgggatccaggcgcgtagcggagatcccaggatcctgggtgctgtctgggcccgctccccaccatgacctcctcggggcctggaccccggttcctgctgctgctgccgctgctgctgccccctgcggcctcagcctccgaccggccccggggccgagacccggtcaacccagagaagctgctggtgatcactgtggccacagctgaaaccgaggggtacctgcgtttcctgcgctctgcggagttcttcaactacactgtgcggaccctgggcctgggagaggagtggcgagggggtgatgtggctcgaacagttggtggaggacagaaggtccggtggttaaagaaggaaatggagaaatacgctgaccgggaggatatgatcatcatgtttgtggatagctacgacgtgattctggccggcagccccacagagctgctgaagaagttcgtccagagtggcagccgcctgctcttctctgcagagagcttctgctggcccgagtgggggctggcggagcagtaccctgaggtgggcacggggaagcgcttcctcaattctggtggattcatcggttttgccaccaccatccaccaaatcgtgcgccagtggaagtacaaggatgatgacgacgaccagctgttctacacacggctctacctggacccaggactgagggagaaactcagccttaatctggatcataagtctcggatctttcagaacctcaacggggctttagatgaagtggttttaaagtttgatcggaaccgtgtgcgtatccggaacgtggcctacgacacgctccccattgtggtccatggaaacggtcccactaagctgcagctcaactacctgggaaactacgtccccaatggctggactcctgagggaggctgtggcttctgcaaccaggaccggaggacactcccgggggggcagcctcccccccgggtgtttctggccgtgtttgtggaacagcctactccgtttctgccccgcttcctgcagcggctgctactcctggactatccccccgacagggtcacccttttcctgcacaacaacgaggtcttccatgaaccccacatcgctgactcctggccgcagctccaggaccacttctcagctgtgaagctcgtggggccggaggaggctctgagcccaggcgaggccagggacatggccatggacctgtgtcggcaggaccccgagtgtgagttctacttcagcctggacgccgacgctgtcctcaccaacctgcagaccctgcgtatcctcattgaggagaacaggaaggtgatcgcccccatgctgtcccgccacggcaagctgtggtccaacttctggggcgccctgagccccgatgagtactacgcccgctccgaggactacgtggagctggtgcagcggaagcgagtgggtgtgtggaatgtaccatacatctcccaggcctatgtgatccggggtgataccctgcggatggagctgccccagagggatgtgttctcgggcagtgacacagacccggacatggccttctgtaagagctttcgagacaagggcatcttcctccatctgagcaatcagcatgaatttggccggctcctggccacttccagatacgacacggagcacctgcaccccgacctctggcagatcttcgacaaccccgtcgactggaaggagcagtacatccacgagaactacagccgggccctggaaggggaaggaatcgtggagcagccatgcccggacgtgtactggttcccactgctgtcagaacaaatgtgtgatgagctggtggcagagatggagcactacggccagtggtcaggcggccggcatgaggattcaaggctggctggaggctacgagaatgtgcccaccgtggacatccacatgaagcaggtggggtacgaggaccagtggctgcagctgctgcggacgtatgtgggccccatgaccgagagcctgtttcccggttaccacaccaaggcgcgggcggtgatgaactttgtggttcgctaccggccagacgagcagccgtctctgcggccacaccacgactcatccaccttcaccctcaacgttgccctcaaccacaagggcctggactatgagggaggtggctgccgcttcctgcgctacgactgtgtgatctcctccccgaggaagggctgggcactcctgcaccccggccgcctcacccactaccacgaggggctgccaacgacctggggcacacgctacatcatggtgtcctttgtcgacccctgacactcaaccactctgccaaacctgccctgccattgtgcctttttagggggcctggcccccgtcctgggagttgggggatgggtctctctgtctccccacttcctgagttcatgttccgcgtgcctgaactgaatatgtcaccttgctcccaagacacggccctctcaggaagctcccggagtccccgcctctctcctccgcccacaggggttcgtgggcacagggcttctggggactccccgcgtgataaattattaatgttccgcagtctcactctgaataaaggacagtttgtaagtcttga

SEQ ID NO: 403633 - DNA, 2981 bp, Homo sapiens
cagcccctggagcttctccgggcagaagaggaggtgggctggactgtcaaagaaagtggctggcttccgtgggcaatccgaggttcctagtggccctctgcagaaagctgaactcccagttcccccaggcctccgtcccgcggcggactcctaggcttcctccctccctgtcgccgccagcctctcgctctccccgtcttccgcccgcactctctgggcagggctgcggccaggacccgcccccgcgtcccgcccgaccctccgccaggggtcacttcccctgtccaggtttcagcttccacatgtgtcaagcggctggctcagcccagagtccctgtctcccgcccgccggcccgagccgccgcccctcccccgcctcccgtgcgcccgggacaatcctcgccttgtctgtggcgccggcatctggagctttctgtagcctccggatacgcctttttttcagggcgtagccccagccaagctgctccccgcggcggccgcacagcagcccgagcgccccctttccagagctcccctccggagctgggatccaggcgcgtagcggagatcccaggatcctgggtgctgtctgggcccgctccccaccatgacctcctcggggcctggaccccggttcctgctgctgctgccgctgctgctgccccctgcggcctcagcctccgaccggccccggggccgagacccggtcaacccagagaagctgctggtgatcactgtggccacagctgaaaccgaggggtacctgcgtttcctgcgctctgcggagttcttcaactacactgtgcggaccctgggcctgggagaggagtggcgagggggtgatgtggctcgaacagttggtggaggacagaaggtccggtggttaaagaaggaaatggagaaatacgctgaccgggaggatatgatcatcatgtttgtggatagctacgacgtgattctggccggcagccccacagagctgctgaagaagttcgtccagagtggcagccgcctgctcttctctgcagagagcttctgctggcccgagtgggggctggcggagcagtaccctgaggtgggcacggggaagcgcttcctcaattctggtggattcatcggttttgccaccaccatccaccaaatcgtgcgccagtggaagtacaaggatgatgacgacgaccagctgttctacacacggctctacctggacccaggactgagggagaaactcagccttaatctggatcataagtctcggatctttcagaacctcaacggggctttagatgaagtggttttaaagtttgatcggaaccgtgtgcgtatccggaacgtggcctacgacacgctccccattgtggtccatggaaacggtcccactaagctgcagctcaactacctgggaaactacgtccccaatggctggactcctgagggaggctgtggcttctgcaaccaggaccggaggacactcccgggggggcagcctcccccccgggtgtttctggccgtgtttgtggaacagcctactccgtttctgccccgcttcctgcagcggctgctactcctggactatccccccgacagggtcacccttttcctgcacaacaacgaggtcttccatgaaccccacatcgctgactcctggccgcagctccaggaccacttctcagctgtgaagctcgtggggccggaggaggctctgagcccaggcgaggccagggacatggccatggacctgtgtcggcaggaccccgagtgtgagttctacttcagcctggacgccgacgctgtcctcaccaacctgcagaccctgcgtatcctcattgaggagaacaggaaggtgatcgcccccatgctgtcccgccacggcaagctgtggtccaacttctggggcgccctgagccccgatgagtactacgcccgctccgaggactacgtggagctggtgcagcggaagcgagtgggtgtgtggaatgtaccatacatctcccaggcctatgtgatccggggtgataccctgcggatggagctgccccagagggatgtgttctcgggcagtgacacagacccggacatggccttctgtaagagctttcgagacaagggcatcttcctccatctgagcaatcagcatgaatttggccggctcctggccacttccagatacgacacggagcacctgcaccccgacctctggcagatcttcgacaaccccgtcgactggaaggagcagtacatccacgagaactacagccgggccctggaaggggaaggaatcgtggagcagccatgcccggacgtgtactggttcccactgctgtcagaacaaatgtgtgatgagctggtggcagagatggagcactacggccagtggtcaggcggccggcatgaggcgcgggcggtgatgaactttgtggttcgctaccggccagacgagcagccgtctctgcggccacaccacgactcatccaccttcaccctcaacgttgccctcaaccacaagggcctggactatgagggaggtggctgccgcttcctgcgctacgactgtgtgatctcctccccgaggaagggctgggcactcctgcaccccggccgcctcacccactaccacgaggggctgccaacgacctggggcacacgctacatcatggtgtcctttgtcgacccctgacactcaaccactctgccaaacctgccctgccattgtgcctttttagggggcctggcccccgtcctgggagttgggggatgggtctctctgtctccccacttcctgagttcatgttccgcgtgcctgaactgaatatgtcaccttgctcccaagacacggccctctcaggaagctcccggagtccccgcctctctcctccgcccacaggggttcgtgggcacagggcttctggggactccccgcgtgataaattattaatgttccgcagtctcactctgaataaaggacagtttgtaagtcttga

SEQ ID NO: 403634 - DNA, 1585 bp, Homo sapiens
cacttctcaagctgtgaagtggtcctggagctgcggccaggagtcagcgatgtggggttcatggaagacctcgttgttgtgcaggaaaagggtgaccctgtcggggggatactccaggaccacttctcagctgtgaagctcgtggggccggaggaggctctgagcccaggcgaggccagggacatggccatggacctgtgtcggcaggaccccgagtgtgagttctacttcagcctggacgccgacgctgtcctcaccaacctgcagaccctgcgtatcctcattgaggagaacaggaaggtgatcgcccccatgctgtcccgccacggcaagctgtggtccaacttctggggcgccctgagccccgatgagtactacgcccgctccgaggactacgtggagctggtgcagcggaagcgagtgggtgtgtggaatgtaccatacatctcccaggcctatgtgatccggggtgataccctgcggatggagctgccccagagggatgtgttctcgggcagtgacacagacccggacatggccttctgtaagagctttcgagacaagggcatcttcctccatctgagcaatcagcatgaatttggccggctcctggccacttccagatacgacacggagcacctgcaccccgacctctggcagatcttcgacaaccccgtcgactggaaggagcagtacatccacgagaactacagccgggccctggaaggggaaggaatcgtggagcagccatgcccggacgtgtactggttcccactgctgtcagaacaaatgtgtgatgagctggtggcagagatggagcactacggccagtggtcaggcggccggcatgaggattcaaggctggctggaggctacgagaatgtgcccaccgtggacatccacatgaagcaggtggggtacgaggaccagtggctgcagctgctgcggacgtatgtgggccccatgaccgagagcctgtttcccggttaccacaccaaggcgcgggcggtgatgaactttgtggttcgctaccggccagacgagcagccgtctctgcggccacaccacgactcatccaccttcaccctcaacgttgccctcaaccacaagggcctggactatgagggaggtggctgccgcttcctgcgctacgactgtgtgatctcctccccgaggaagggctgggcactcctgcaccccggccgcctcacccactaccacgaggggctgccaacgacctggggcacacgctacatcatggtgtcctttgtcgacccctgacactcaaccactctgccaaacctgccctgccattgtgcctttttagggggcctggcccccgtcctgggagttgggggatgggtctctctgtctccccacttcctgagttcatgttccgcgtgcctgaactgaatatgtcaccttgctcccaagacacggccctctcaggaagctcccggagtccccgcctctctcctccgcccacaggggttcgtgggcacagggcttctggggactccccgcgtgataaattattaatgttccgcagtctcactctgaataaaggacagtttgtaagtcttga

SEQ ID NO: 403635 - DNA, 1613 bp, Homo sapiens
cacctgtcacccatccagcccctcctgggcctccccattcgcatccttgcagcccccatgctgtcactcctgcccttgccagctcacccagacagcagagagcctggggaaggaaggatagacactgcctccctcctcttctcctgggggcatgggccagttaccccatccacaccgcctccccacctgccgccgtctcagctcgcctctcacctccagggacctgtgtcggcaggaccccgagtgtgagttctacttcagcctggacgccgacgctgtcctcaccaacctgcagaccctgcgtatcctcattgaggagaacaggaaggtgatcgcccccatgctgtcccgccacggcaagctgtggtccaacttctggggcgccctgagccccgatgagtactacgcccgctccgaggactacgtggagctggtgcagcggaagcgagtgggtgtgtggaatgtaccatacatctcccaggcctatgtgatccggggtgataccctgcggatggagctgccccagagggatgtgttctcgggcagtgacacagacccggacatggccttctgtaagagctttcgagacaagggcatcttcctccatctgagcaatcagcatgaatttggccggctcctggccacttccagatacgacacggagcacctgcaccccgacctctggcagatcttcgacaaccccgtcgactggaaggagcagtacatccacgagaactacagccgggccctggaaggggaaggaatcgtggagcagccatgcccggacgtgtactggttcccactgctgtcagaacaaatgtgtgatgagctggtggcagagatggagcactacggccagtggtcaggcggccggcatgaggattcaaggctggctggaggctacgagaatgtgcccaccgtggacatccacatgaagcaggtggggtacgaggaccagtggctgcagctgctgcggacgtatgtgggccccatgaccgagagcctgtttcccggttaccacaccaaggcgcgggcggtgatgaactttgtggttcgctaccggccagacgagcagccgtctctgcggccacaccacgactcatccaccttcaccctcaacgttgccctcaaccacaagggcctggactatgagggaggtggctgccgcttcctgcgctacgactgtgtgatctcctccccgaggaagggctgggcactcctgcaccccggccgcctcacccactaccacgaggggctgccaacgacctggggcacacgctacatcatggtgtcctttgtcgacccctgacactcaaccactctgccaaacctgccctgccattgtgcctttttagggggcctggcccccgtcctgggagttgggggatgggtctctctgtctccccacttcctgagttcatgttccgcgtgcctgaactgaatatgtcaccttgctcccaagacacggccctctcaggaagctcccggagtccccgcctctctcctccgcccacaggggttcgtgggcacagggcttctggggactccccgcgtgataaattattaatgttccgcagtctcactctgaataaaggacagtttgtaagtcttga

SEQ ID NO: 403636 - DNA, 1829 bp, Homo sapiens
cagcccctggagcttctccgggcagaagaggaggtgggctggactgtcaaagaaagtggctggcttccgtgggcaatccgaggttcctagtggccctctgcagaaagctgaactcccagttcccccaggcctccgtcccgcggcggactcctaggcttcctccctccctgtcgccgccagcctctcgctctccccgtcttccgcccgcactctctgggcagggctgcggccaggacccgcccccgcgtcccgcccgaccctccgccaggggtcacttcccctgtccaggtttcagcttccacatgtgtcaagcggctggctcagcccagagtccctgtctcccgcccgccggcccgagccgccgcccctcccccgcctcccgtgcgcccgggacaatcctcgccttgtctgtggcgccggcatctggagctttctgtagcctccggatacgcctttttttcagggcgtagccccagccaagctgctccccgcggcggccgcacagcagcccgagcgccccctttccagagctcccctccggagctgggatccaggcgcgtagcggagatcccaggatcctgggtgctgtctgggcccgctccccaccatgacctcctcggggcctggaccccggttcctgctgctgctgccgctgctgctgccccctgcggcctcagcctccgaccggccccggggccgagacccggtcaacccagagaagctgctggtgatcactgtggccacagctgaaaccgaggggtacctgcgtttcctgcgctctgcggagttcttcaactacactgtgcggggcatcttcctccatctgagcaatcagcatgaatttggccggctcctggccacttccagatacgacacggagcacctgcaccccgacctctggcagatcttcgacaaccccgtcgactggaaggagcagtacatccacgagaactacagccgggccctggaaggggaaggaatcgtggagcagccatgcccggacgtgtactggttcccactgctgtcagaacaaatgtgtgatgagctggtggcagagatggagcactacggccagtggtcaggcggccggcatgaggattcaaggctggctggaggctacgagaatgtgcccaccgtggacatccacatgaagcaggtggggtacgaggaccagtggctgcagctgctgcggacgtatgtgggccccatgaccgagagcctgtttcccggttaccacaccaaggcgcgggcggtgatgaactttgtggttcgctaccggccagacgagcagccgtctctgcggccacaccacgactcatccaccttcaccctcaacgttgccctcaaccacaagggcctggactatgagggaggtggctgccgcttcctgcgctacgactgtgtgatctcctccccgaggaagggctgggcactcctgcaccccggccgcctcacccactaccacgaggggctgccaacgacctggggcacacgctacatcatggtgtcctttgtcgacccctgacactcaaccactctgccaaacctgccctgccattgtgcctttttagggggcctggcccccgtcctgggagttgggggatgggtctctctgtctccccacttcctgagttcatgttccgcgtgcctgaactgaatatgtcaccttgctcccaagacacggccctctcaggaagctcccggagtccccgcctctctcctccgcccacaggggttcgtgggcacagggcttctggggactccccgcgtgataaattattaatgttccgcagtctcactctgaataaaggacagtttgtaagtcttga

SEQ ID NO: 403637 - DNA, 2728 bp, Homo sapiens
cagcccctggagcttctccgggcagaagaggaggtgggctggactgtcaaagaaagtggctggcttccgtgggcaatccgaggttcctagtggccctctgcagaaagctgaactcccagttcccccaggcctccgtcccgcggcggactcctaggcttcctccctccctgtcgccgccagcctctcgctctccccgtcttccgcccgcactctctgggcagggctgcggccaggacccgcccccgcgtcccgcccgaccctccgccaggggtcacttcccctgtccaggtttcagcttccacatgtgtcaagcggctggctcagcccagagtccctgtctcccgcccgccggcccgagccgccgcccctcccccgcctcccgtgcgcccgggacaatcctcgccttgtctgtggcgccggcatctggagctttctgtagcctccggatacgcctttttttcagggcgtagccccagccaagctgctccccgcggcggccgcacagcagcccgagcgccccctttccagagctcccctccggagctgggatccaggcgcgtagcggagatcccaggatcctgggtgctgtctgggcccgctccccaccatgacctcctcggggcctggaccccggttcctgctgctgctgccgctgctgctgccccctgcggcctcagcctccgaccggccccggggccgagacccggtcaacccagagaagctgctggtgatcactgtggccacagctgaaaccgaggggtacctgcgtttcctgcgctctgcggagttcttcaactacactgtgcggaccctgggcctgggagaggagtggcgagggggtgatgtggctcgaacagttggtggaggacagaaggtccggtggttaaagaaggaaatggagaaatacgctgaccgggaggatatgatcatcatgtttgtggatagctacgacgtgattctggccggcagccccacagagctgctgaagaagttcgtccagagtggcagccgcctgctcttctctgcagagagcttctgctggcccgagtgggggctggcggagcagtaccctgaggtgggcacggggaagcgcttcctcaattctggtggattcatcggttttgccaccaccatccaccaaatcgtgcgccagtggaagtacaaggatgatgacgacgaccagctgttctacacacggctctacctggacccaggactgagggagaaactcagccttaatctggatcataagtctcggatctttcagaacctcaacggggctttagatgaagtggttttaaagtttgatcggaaccgtgtgcgtatccggaacgtggcctacgacacgctccccattgtggtccatggaaacggtcccactaagctgcagctcaactacctgggaaactacgtccccaatggctggactcctgagggaggctgtggcttctgcaaccaggaccggaggacactcccgggggggcagcctcccccccgggtgtttctggccgtgtttgtggaacagcctactccgtttctgccccgcttcctgcagcggctgctactcctggactatccccccgacagggtcacccttttcctgcacaacaacgaggtcttccatgaaccccacatcgctgactcctggccgcagctccaggaccacttctcagctgtgaagctcgtggggccggaggaggctctgagcccaggcgaggccagggacatggccatggacctgtgtcggcaggaccccgagtgtgagttctacttcagcctggacgccgacgctgtcctcaccaacctgcagaccctgcgtatcctcattgaggagaacaggaaggtgatcgcccccatgctgtcccgccacggcaagctgtggtccaacttctggggcgccctgagccccgatgagtactacgcccgctccgaggactacgtggagctggtgcagcggaagcgagtgggtgtgtggaatgtaccatacatctcccaggcctatgtgatccggggtgataccctgcggatggagctgccccagagggatgtgttctcgggcagtgacacagacccggacatggccttctgtaagagctttcgagacaagggcatcttcctccatctgagcaatcagcatgaatttggccggctcctggccacttccagatacgacacggagcacctgcaccccgacctctggcagatcttcgacaaccccgtcgtgagtggggaccccacgcccagagcacacaggttccccgccttgtgctaaggaagacaccaaacgtgatggctgctgccagcgcaggacactgagtgggagggggcggtcccctgggggctgggagcgaggggggcacagatctgatgtgccccccaccctctcacaggactggaaggagcagtacatccacgagaactacagccgggccctggaaggggaaggaatcgtggagcaggtgagcccacgcagcctccccacccaccccctgccctcatggccatcgcctcttgggggcccccgcctggattcaaagttttcacactgagttccccagagatctgagggttttctgttcagacaagatgaaggcagaggccgaacagaaaggactcttgcccccaaagccagcattgatcagacagcctcttctcctgtgtattgggtatactggtgttatgcttgaaatcacattttgggaggccaaggtgggtggatcggttgagg

SEQ ID NO: 403638 - DNA, 431 bp, Homo sapiens
tctctcaggaagtgattgtagagcagaaggacagaggatgagagacctaagtggaacctgttgcctaaagaaacatgacagacattaagctagtgatgagagcagagaattggttatttaaaacctacaatattttttataccttctcctgaattaacagtcttaataatttctgatggttggaataacattgtcccaataactctatcattgtctgggtgacctcatagcatacacttggcccattcaaaattaaattggttcttattttcagtaaatgtatgtatctcataaaattagaggaaataatatgcatatagtgtctggatctggaaaaagcagaacttttttttagctttttctgtctagcttaacacagcctttcaacattcttaagaagtacctttagggtattattctagttatataga

SEQ ID NO: 403639 - DNA, 460 bp, Homo sapiens
gagataaaagtcaggaatcctgattcttcaactgggatttagtttatgtggtctcatactgatatgaaaataagtgatctgatgcaagcttagaaagatggtgaaaatagcagttaatgtattttattcacatgcccgcgttaagtcagcctatcttgacacaatggttatttagtatgatgttaggaacattcttttaagccaaatctaaaatgcatttgtttttacagacagaaataaatttgaaatttgcaaaagcccattttaaaaataaatttgttgaggtcttcctactgcaagtttgtacatgattgcatattttaccagtgctgtatattgtaatattaaatgttagattttttttaacatgccagacttcattttatcagcctaagcatttgcacttaaataatatcaggctttggttaaataaaaattttagcagaaatagatcgaccca

SEQ ID NO: 403640 - DNA, 411 bp, Homo sapiens
caactatagacaggatgctgtctgagtgctctcagatggcaagtttgtcggaaaaagaattcaagactcaagtcttagccacataacggggaaatacaatcagcagtcaagagaaagaggagacccaaccagccatccaaaacaagagtgttcagaggatgcctgaaagctacaggtatggagacaggacaagctagagaagctgatcatgtttcagcaggggcaggtgaattacgttaatataaaaaatgtcaattttttcaaaattaacccaaagctggaatgcactgtcaatcagagttctaatattgcatttcggggaattggatacaattattttgaagaatgaacaaaagaactgataagaatagtagtagtacaccaacaacagtcaaaccaagagctaaatca

SEQ ID NO: 403641 - DNA, 894 bp, Homo sapiens
  misc_feature (10)..(10): n is a, c, g, or t
  misc_feature (174)..(174): n is a, c, g, or t
  misc_feature (683)..(683): n is a, c, g, or t
cagtgcccangaagatgatcctaactttcccaatgaggacagattacagtgtcagcaggatgaatgtgcctgtgtaatgcatcaggaatgtcaaatccagccctctgagctctcagtgactcaggaacccaggccttctgccatgacatccttggcatcactgctttgattatntcacaagctttgtctgcttgtctagaaagtggaaacctcccagaagaagggtcagcgaccacgctgaggcaggaggtagtgctcaggctccaagacctggcaataaagtgcagcctctctaaagcctgtagcaaattgaagttaggctgaagtgagatttgatctagattggtggtatctaaaattcatgtttatttcactcatgtattcagttggcttaaccttctctgacttctctgaggatgaaagccttacaatttcatcatttcgggtagtgggtactgtctcctggtatcgacaaccaaatggagacccctcatatccagctcctctcatttttttttttttttgcctttggccagagattcattttgcattcttcatctttagtactttattgaaattctgccactttctacctgttttggataagccttggtgtggtggttgctactattcttggacaggatacagttattgcctcctccatctctaaacaatgtttgtgnttttttttttttttttcactcatgagtaagatacctgtctctttctgaagtgtgcctctgatgttctctagccatctttattgaaacataggctggatgcagtggctcatgcctgtaatctcagcactttgggaggatgaagtgggagaaggatcacttgagcctaggagttcaagaccagcctgggcaacattctgagacccctgtctct

SEQ ID NO: 403642 - DNA, 471 bp, Homo sapiens
atggtgacttctgcaattcatttggctccttcgattgttgtgaaaaatagaatgtcctatggcatcctctgtgtagttgattccctgtcaaaacactggggagtgagagaggatttttcctaatatcaatagctcatgtatgtcaaaaggacacaaatgacattagactagtataagaaaggcttcttaaggacataagaatatatgctaaagggacataacatatgctgtagttattaaacaggtatgcacatacaagtgcacaatgaacagtccttatgagttgtgacattctgatataagcccgctttaaacacgtggctagttactattcctaacaggctccttctctcttcttggcctttttcttttggcttgaacttggataagaaccttgggtaccttattgtacatctgtcactgcctctagcttcagctgatccaaatctgccactaaaaattgaagttttc

SEQ ID NO: 403643 - DNA, 500 bp, Homo sapiens
ttcccctcctctccatcaaccacaagagtaccttgcaaccacaagagtgcaggagagggagacagactgtgcttctaacaagaaataagggactaaaactaagaccaccaagagttaagcggagaatcaaaccatgactagtgtaggcagatcaggatgcactccacagccaagctagtcttcctaacaaaaactcaaagacccgccttggccaggtgcagtggctcacgcctgtaatcccagcactttgggaggttgaggcgggtggatcacctaaggtcaggagttcaagacagcctggccaacatggtgaaaccccatctctaccaaaaatacaaaaattagctgggcgtggtggcaaacgcctagagtcccagctactcaggaggctgaagcaggagaactgagaatcatttgaacctgggagacagagggtgcagtgagccaagatcgcgccactgcactccagcctgggtgacagagaaactccatctcaaaaa

SEQ ID NO: 403644 - DNA, 324 bp, Homo sapiens
cttcatgtctatttgtctcccactttccataatgacttccatatggtgataaacatgatttatagctgtgttttttagttaatatgtgtgaattgtggctctctaacacgcctccttgtttttactttgcaatctttcataggaagcgtgttgttctctggcactgagcaccccccaaacgctgggcaaaatgaggctgaattcacagccgctgagtttcccacaggccaaccacaccattgctccaaaagaccttgaagttccctccttccacctcctccacctcttaccttccttcttcctctcacacgctgacttggccag

SEQ ID NO: 403645 - DNA, 246 bp, Homo sapiens
ggagagaccctgaagttggagagagcctgaacccagagagatctgcagacaggcctggggtggggaaggatttcagcaaaaagagctgtgaccaatgaaatgctgcccagtttatttcatattcctctctgtgttactttgatctttgttgttttaaatgtggtcaactagcttttacattactgacttagtaatgttttctctagaattttaaccttttttgggggatgtggggaggttttatag

SEQ ID NO: 403646 - DNA, 348 bp, Homo sapiens
cttctttcagatctgattgtcagctccttgataactggtatcacatggacatcctccagttgggctccctcattcaaagcctggctctacattcacaagctgtattatgttgagaagttacaatcgaagtagaacctgtttcaccatctgttaaaggggggaaatactaccatctacatcatggggtggtagccagaatcaaataagatgatagatgagaagtgctggctctaccctgctatctaattcttgtcactttctggctgaaaggcaatggggccagcaacctaggttttgaagtttgctttactcattggaaaaataaatgtaacactcaacccttgggaa

SEQ ID NO: 403647 - DNA, 428 bp, Homo sapiens
tgttggcattacagctcatccaacgccatcaagttagagtgctcgtgtctcctctcagctatttaactgtgcccctgcaaaattgttcagaatgaaaccagaaaaatctgcctcttttgcactgtagatgtctcttccatgtgccaaatgtggagattagatgctacaaatgaaagccaaataaaaaagaagtatctgacaaaagcatgggttagagggctttcctaatctgtgtgaggtcaatccaagggatgtttacatactgtagataacctacttgaacaaaaatcagtattatagagaataaatggatgtaagaaaattacatgtacaagttttgtatatttgttaataattttggtaataaatatgatgtactgcatctcagtaccttagcacttcttttaataaaagttaaatagaaggaa

SEQ ID NO: 403648 - DNA, 266 bp, Homo sapiens
aaaaaaaaaaaaagaaagagattagatgccccttgccatgcagaaagttagggaaatagtgttctagttacaggaagcttttaggcagtgctgagcttgatgagttcaaagaatcaaaagaagtccagtgtgtggctggaacacactgaaggaggggaggggtgacaatgagattgtcaagttgagcacagaccagccttgtaaatcatgttaaagaatttaactttaagtgtttttgtaaataattgaaatattttaagctgggt

SEQ ID NO: 403649 - DNA, 553 bp, Homo sapiens
gatgagtgtattagtcttctcagacttccataacaaaatagcacaaactgggtggcctaaaaagcccacagttctggaggctaaaagtccaagattaaggtgctggtagggttgacttttggcttgttaatggctgccttcttactatgtcctcacatgacctcttgtctgtgtgtgccggaaaagagagcgcatgatcttgggtgtctcttccttttataaggacaccagtcctattggattagcccctacccttatgacctcatttaaccttagttacctccctaaaggccctgtttccatatacagttcacattaagggttgggacttcaacatatgaattggggtggggggggcacaattcaatctatagcaatgggaataaaaaaagaattaggtaatgtatggagaaatgtattattttaaagtaaagaagatatactcagatgataacatccctcatttctgtgactagtcatgtggccatagccaatatttataatttccttcccctactatgcatttcatattctctttgcctttggcaagcat

SEQ ID NO: 403650 - DNA, 456 bp, Homo sapiens
atgggttcctgagctctctactgttaatagaacttgctctctcgcaggccaatgcctcaccaggtgattgaagcagagaaacttaggtggtgaaaggagaagatggggcctgtcctgagagtttctgttcctgagatgctagaggcagagggtccctaaactttcctgagtcggcagacatcccctctggagaagaggttggccccagagtcgaacatcctctgatctacctgatcctgctgcccttccattccacttccccacatctgttctttctggtcgtgtttactcccctattaaaaaaacaaaaccagaaaacgtgtttgcctagatcttgagactctggaagatcttaacagtcagaggttccccctatttgcaatgatctcctttcctgccccttcctatccttgcaataatccttttgaataaagtctctccttactaaatccagtt

SEQ ID NO: 403651 - DNA, 486 bp, Homo sapiens
atatgatccttaattagtcctaaaaatcctaacttcagtaacaacagaatgtggacaaattgaaagcctgccagtgctctcaaaaacagtggatggtgtggtggaaagcccttggaaggagatgggtggatgcatgggagatgcaggctacactgcagggctgctggcttgcaggagagaaccgagaatgagggagagctggggaaagttctcttgtggttgaaacaaatgccagacactcttcaatggagcccatgtttgtttggttcagtctgtgaagtaattcaaacctcagtgcatgattgaaaatagtacaattttccatctgcaagtggcagccctggatgactggatggtctataattgggacacgtatctagactcaacgatgcctggatggaaaatgtgcaggctgctccactgatgtcagctgtttcatcacagttttatgatttaataaaagtcatattttttttcatttttgca

SEQ ID NO: 403652 - DNA, 365 bp, Homo sapiens
gacctactatttgatagcacaatgggatgactatagtcaataataacttaattgtacattttaaaataacttgatgtaattggattgtttgtgactcaaaggataaatgaggggatggatacaccattctctatggtgtgcttatttcccattgcatacctgtatcaaaacatctcacataccacataaatatatacacctactatttacccacaacaattttaaaaaaaatacaaagattaaaaataaaacaattaaacaaaaaaatgacctcaggagaaatgattagacagagtatgtcaatcaggacaactaacgaaggtttagaaacagtttaccttttaaaatgtttctttacaaatgac

SEQ ID NO: 403653 - DNA, 217 bp, Homo sapiens
agaaaccttggtatcttatttttgctgcagctacttgttttagagaaaagagaaaacattttcatttcctaacacacttctcatttcctatactctttcttcttgtagatctgagtctccatattgtatcctcttcagcctgaagaaatttatttatttatttatttatttatttattttgagatacagtttcactcgtcgcctaggctggagtgca

SEQ ID NO: 403654 - DNA, 625 bp, Homo sapiens
tctttttttaaagagacaaaataaggctcagagaggttaagcaaattccccaaggtcacacagctaggaaatggccaagctggcatgtgaactgagacagactaatacctgtgctttcagctgccatacatttttactctagctatcacttgcattattaagaatctaggctaagtcactaaagatatatcattacttatttcttgttcattcatttgtttattcagtcatttattcattcagcaaatatttactaagcgcccactatgtgccagccactgctctaagtcccgataatacaacaatgaaaaaaacaaagttgttgccctaatgcaggttacattcaaatgaaggagggggaaatgaaaaatcagggtaagaggataaagaatgacatagtggggagatgggacctctttagaaaaggtgaccagagaaagcctctctgagttgatgacatttaaggagagatgtgcaggatgtaaaggaacaagtagagtgctgcaggctgaaagaagaacatttgcaaaggcccttaggtagaaacaagcttggcatattatggaaacagcaaagtccatgtagctggagcctatgaatgggaggaaagggcagagcatagcag

SEQ ID NO: 403655 - DNA, 679 bp, Homo sapiens
tctttttttaaagagacaaaataaggctcagagaggttaagcaaattccccaaggtcacacagctaggaaatggccaagctggcatgtgaactgagacagactaatacctgtgctttcagctgccatacatttttactctagctatcacttgcattattaagaatctaggctaagtcactaaagatatatcattacttatttcttgttcattcatttgtttattcagtcatttattcattcagcaaatatttactaagcgcccactatgtgccagccactgctctaagtcccgataatacaacaatgaaaaaaacaaagttgttgccctaatgcaggttacattcaaatgaaggagacatacaataaaaaacaaatatgcaacatgatgtcagattatgatagctgttttggggaaatgaaaaatcagggtaagaggataaagaatgacatagtggggagatgggacctctttagaaaaggtgaccagagaaagcctctctgagttgatgacatttaaggagagatgtgcaggatgtaaaggaacaagtagagtgctgcaggctgaaagaagaacatttgcaaaggcccttaggtagaaacaagcttggcatattatggaaacagcaaagtccatgtagctggagcctatgaatgggaggaaagggcagagcatagcag

SEQ ID NO: 403656 - DNA, 147 bp, Homo sapiens
attaacttctgtcatcatttttagcatggaacttcaacagtttagtcctaaagaacaactttaggaaagttgttctttcttttaggtcatatatggtgttcattccaacatcattcttctgtaagaagtttctcacttacattattg

SEQ ID NO: 403657 - DNA, 149 bp, Homo sapiens
tgcaagggactgaccagttatgataaactgcttcacctctatgaatctcaatttcctcagctgagaagtcatttggaataggttggcagatctcaaccctcactgcacattagaatcagcctgggcaacaagagtgaaactccatctca

SEQ ID NO: 403658 - DNA, 466 bp, Homo sapiens
aagctagtatcattgcaactttggtttgtaactccacatttttcctacataacaagagactaatgcatttaaacgaattgtttatgttttggggcacagcatgaataaagatgtagttttgtgacatcagcaaatgaaaggggtgggaacagatatgtaaaggagcagagtttttctgtgttactgaagttaagctggcataaatttaaattagaatgttattactttaggatgttaaatgtaatccccatggtaaccacaaagaaaatagctatagaacatacacaaaaggaaatgagaaaagaatttaaacattccactataaaaaatcaactaaatataaaagaagacagtagtgcaagaaatgagggacgaaaaaagctataatacgtgtagcaaacatagcaaaatgacagaagtaaatcctcatcaatagttgttttaaatgtaaacagatgaagatttc

SEQ ID NO: 403659 - DNA, 465 bp, Homo sapiens
taatatagatttatttttgcacccatgctgttgattgctaaatgtaatagtctgatcatgatgctgaataaacaacctttttttctttaatatgctgtttaaagttagtctactctgaagccatcttggtaaatttcccccaacagtgtgaagttagaattccttcagggtgatgccaggttatatttggaatttatatacaacctgcttggatggagaagccattgtcttgagaaaccttggtgtcgttgaactgacagttactgttgcgacctgaagttcaccattaaaagggattacccaagcaaaatcatggaattattggttataaaaataattgttggcacatcctatgcaatatatctaaattgattaatggtaccagataaaattatagatgggaatgaagcttgtgtatcatccattatcatgtgtaatcaataaacaatttaattctcttggaaa

SEQ ID NO: 403660 - DNA, 449 bp, Homo sapiens
tagaactttccactgaccaggactgtgaagaagtgaaatcttgaaacgacaaatccagaagcaaagagatagtaggacccaagggaaaggaagggaagagtgctccaagacttggaccaggcacacacacacctccagatcaccttggcaactccagggcgctccgttcaagaatgctgacgaaaagcaatatccaaagtcttgtcaatcaggatgcagtttctccatcggtatggcagtctgtggccttggcagctgggaagttgaaagctgatttccactcctatgtccatgtagacatacacttcagaagctcctaaaacagagactgaaaggccacctttaggatttcttagtttcatttcaattctttccatgtctcatcattcttgtttttggcatgttgtttgatttctttggcaatttttttaaagattatttgtagttta

SEQ ID NO: 403661 - DNA, 3112 bp, Homo sapiens
  misc_feature (1626)..(1626): n is a, c, g, or t
  misc_feature (1981)..(1981): n is a, c, g, or t
  misc_feature (2412)..(2412): n is a, c, g, or t
ctaggtttgagtcctggttctaccacttacaacccagtgaggatccccagagggatcagtcccattgtacatatgagacaacaggttcagaggtgctaagtgtctcagccaaggtcacagagctagttaggggcagagctgggatttgcacataggccaactgtctaaagacccagtgggctcatatgccactatgggcagaacttttccggaacagcccccagttttcctggcagccgtaaagggaacctgtagttttctaggggcaatatcagttgttacaagatctgaatctttgatgtctaatgagctgggcctagcctcagtagaggactcctgctccacattccaccaagggaaacaggcattacggcccctacccaggacagctggtgccaggaatccaactttccccataggacaatggacctcccttaaacttgtctatttatttatttattttaaatagagacagagtctcactcactatgttgcccaggctagtcctgaacttctgggctcaagcagtcctcctgcctcagcctcccaaagtgacaggattacaggggtcagccactgtgcctggcccctccttaaacttcttttccagagactctagaatctttctttttggtggaaaacaataaaagatttggcactccacatggaatgcggcaggagactgcagtgggtgaactcccccggtcccttccagccctgggccctgctgcctgccctgccctgcacaccagccctgtaaggcatctgctgtcccaggggacctttgacaggccctccagcccatagtcagctcttccctgccctcccttgtaaagatagatgagactggcagctgcagtgcctggtatcaggaagtccctaggtggctggagggagtgggccagagccccagttcttggtgggacagcttcatgggaaatgcaggggaatgttcaggggctctgagacatggtggaggcgggtggggggactgatgcaggatgcggatggacaggtggtaaggagtttgtgcatgagagtgggactgggagatgtcacatatttccctggggctttcctggtaaatataactttggtcaaggagaaaccagcagtaggccacagcctaggccaaggtaaaaatgctgtcttctaatgagctccagatccacacagactgtagctttaatgtcctaggggactttagccaaggcctagaaaaagtctcctagaagcagagtttggagaccccatagatcctaccctcagccaggagctcgagctaggggcattccggatgcctccagatgaaaagactgcacaggtatcaccaggccacattgaggggacgtagcaagggtggcatcaaaccgtcggaactgccatcacctcggtcttgctttgggaaaggaacaaatacttctgaattcacggcagtggtatcacctgtgagggtgcagtcaatgctagtcagccctgccctccttggctctgccctctcctaggcgagtgcctggaaagtgacctctgcaagcacaggcagactcatcttccaacctcctgctggagccattctccccagggtctgtctgcagacttcctcccttgcagctacatgggtccaantgactctgcagagagggagatgcctcctcctcaggtgatgggtcacaggaaggaagaaggtgacctcagtgggggacggtgtgggctggcaaggtatcagtgggctgtggttgccgaatgcagcacacagaggctctggcccttgctctcagcaagttctcattttaaactttctggatagacaaataatccttttcctctcatcttttgccaatggaggtggtgaaatgttctctcctctgtttaatcagataagacttctaaagaaagcagcatcagaagggccaaggtaagggagaaaatgctgtgctctgcccatctgaacctatcaagggcattaaacttggatcctaangcacgtggcagacacagagcaacatcatgtagccataaggcctggaggagatgggggcaaggagccgtttcttactctgagcccaatcactaggtacctcaatgtgtcacaggtcagtaccggctttcagaggtcatcctttccattcccctgcctccaaccagggactcccaaaccacccctgcgggcttcccctaaccctaatgcttttcgcaaagggaaaaaataactgttgctacctagttttctcatcaagaggcctgtggacctttactgcatggaagttctttgttatatctaacctaaattcctcctgctataagggatagacagttgagtaaggtctagcgacagaaacacaggcaaaaataacctctggaggtcaccgggatgtaccatcaattctggaagcaagaagaagttttcctagnctccctttcagattagcacgaaggaagcagctctgctatgtgccggctccgaggagctcagctcaacagaaatcccagccctgggaggactctgggctccttctccttttaaggcaacgtttgagtgctcagggctacacaagcggcaacaagctccagcccctctcattcctggctatttggaggaaactgatgattaatcaaccctttccctcccacccccagcctgtttttcattaggttctttttaaagtgttggcacacctcctcaagaacagacacttggcagatccttgccaactaggaccccagggtaggggaggtaactaggaaggagtggggagtagtcctggattaggataaaggggagaagtcaggatgtgcggtgtcagggaagaaagaaggttaaattgaggctgggcgtggtggctcgcgcctgtaatcacagcactttgggaggccgaggcaggtggatcacctgaggtcaggagttcgggaccagcctgaccaacatggagaaaccccgtctctaccaaaaatacaaaattagctaggcatggtggcatatgcctgtaatcccagctacttgggaggctgaggcaggagaatcgcttgaactcagaaggcagaggttgcagtgagccgagattgcggcattgcactccagcctgggcaacaacagtgaaactccatctcaaag

SEQ ID NO: 403662 - DNA, 637 bp, Homo sapiens
  misc_feature (434)..(434): n is a, c, g, or t
  misc_feature (456)..(456): n is a, c, g, or t
  misc_feature (469)..(469): n is a, c, g, or t
  misc_feature (519)..(519): n is a, c, g, or t
gtgctacagaggatgcaacaggacttaatagtgtccactggttttagtaacagaggtaattaatgttccagaaaacatcctggaccttaaacttccccagagttggttcttaaccttcccttatatgctcacctcctatgtcaaactagtggattccatcttgtggtataaactgtctattcgctgaagactactgaatttatatctctagcttggatctctcccctaagcacacactctcgtgtccagtggtcttgctttctccctgtggatgtcagaaggttcaaggccagtttctttatttccagtgctccaaactggttccttctgtagtataccttatttgtaattgctcttatcaaaaactgaagtcatttctgattcctctctagggacctgctgcttgccataccttcccaagccactaccatctnctgcatggattattgccatcgncactcgcctttgngaagaggtgaaagccaccagccttgaggaaatcgacggggacaggctcgncgacttgcccctaattttcgatgggccatacccaataggcagatcaatgatgggatgcggtgagattggagagattatgaatattcaatgaggagatgagagaattcagacgaaacct

SEQ ID NO: 403663 - DNA, 222 bp, Homo sapiens
agagttaatggttgttgcctgggcaacgtagtgagatgttgtctcttaaaaaaagtacgaaaagtgttagctggacatggttgcttgtacctgtagtcctagctacgtgggaggctgaagagggagcattgcctgagccctgggaattggaggctgcggttagttatggttgtgtcactgcactctcaccgaggtgacagagtgagaccccctttctttaaa

SEQ ID NO: 403664 - DNA, 952 bp, Homo sapiens
tcctgaggctgccagcagccagcagtgactgcccgccctatctgggacccaggatcgctctgtgagcaacttggagccagagaggagatcaacaaggaggaggagagagccggcccctcagccctgctgcccagcagcagcctgtgctcgccctgcccaacgcagacagccagacccagggcggcccctctggcggctctgctcctcccgaaggatgcttggggagtgaggcgaagctgggccgctcctctcccctacagcagcccccttcctccatccctctgttctcctgagccttcaggagcctgcaccagtcctgcctgtccttctactcagctgttacccactctgggaccagcagtctttctgataactgggagagggcagtaaggaggacttcctggagggggtgactgtccagagcctggaactgtgcccacaccagaagccatcagcagcaagtgcccagccctggataggcagtgcggctgaaaaaatgtcctggtgaaagggaggaggagctcactgaagaccttctgctcccaagtgtgagactagaacccaggcctccagccttctcacaggtgcccttccaggacatcgtgtggctactccaggcagcattcctccattgcaagcagggaggagtatctctgcttccctctgtgacctcccaattgcacagaggcctctagtgacaagttctgaagtcatgcagtcctcccctgtctccaagcaggagaccctgaatccacagccttcagggacatacagtccctgaacacctacctcatgcaggcatagagcctggtacttcacacaccttggagtcctcatggcaagtttttgaaatcagtgttattacctactttttgtagatgaggaagctgagatctggagaggctaagtgactttcccagggccatacggtgagttaaggtggtgtttaggc

SEQ ID NO: 403665 - DNA, 1126 bp, Homo sapiens
tcagctcgtccggaagcgtgaatggccaattcccaggccctaaacaaaccttgggcacttgagccagtcctgctgtttccttatggcccagtctgcttccccttcatagaagggagtttttcctactgctgctaggttatgtcatgaccagggaccacatcccctctgtggagagggtcccaggcccagagaggatattggctgcagcagcagtggccagggaaaggaggaaggggatgctcttcctcaaagcttggggtggagaggacagtgctggaagagagctgtggctgactgttcctccctcctcagcttcccccaaatgtgggtacaggaagagcaagagagaaatgcatccctccttcagggagaatcaagagcccaaagggacccctagagttaatgaggccacccaggcccctagtcaaaggcaacaggctaagcaattcatcagactgagggggctgaaaccagggctcctcaggggtgggagagacctcagcagccttcccacctagtgctggggctcacgccttagcccacccaggacctccaccctgacccacaccgcaggccccacggaacccaccagctacgagcctttccctcagcctcccctccattaaacataccgtgtcccccaagtgctctctcggggccagaagaggtttcctggtaccactcctgacccctggagggttgagaactgaggaccctgggtcccaccatgctcagggaatggaagctctttggtcagtcccagcagtcagaggccctccccacaggagaccacttctgcaggtcccctggatagctctgcctcaggcaagggccttactatggcttgagagatggtgtagtccctgtacaacagcctggcttattctgccactgcggccacctcctcttcctcaccctcctcctctgtctctgtcttgatctgagcaacccaaggcggtagagggtgtcacgaatgaccacctcaccaggctggcagctctgtacaatgtcatggatctgacgattgacaatttcgcggctggtgaggaagtccatgaggcggttgtagaggtaatagtgagtggcattgtcgaaggcaatgggccgctggcggacaccgtttggt

SEQ ID NO: 403666 - DNA, 10163 bp, Homo sapiens
tcctgaggctgccagcagccagcagtgactgcccgccctatctgggacccaggatcgctctgtgagcaacttggagccagagaggagatcaacaaggaggaggagagagccggcccctcagccctgctgcccagcagcagcctgtgctcgccctgcccaacgcagacagccagacccagggcggcccctctggcggctctgctcctcccgaaggatgcttggggagtgaggcgaagctgggccgctcctctcccctacagcagcccccttcctccatccctctgttctcctgagccttcaggagcctgcaccagtcctgcctgtccttctactcagctgttacccactctgggaccagcagtctttctgataactgggagagggcagtaaggaggacttcctggagggggtgactgtccagagcctggaactgtgcccacaccagaagccatcagcagcaaggacaccatgcggcttccgggtgcgatgccagctctggccctcaaaggcgagctgctgttgctgtctctcctgttacttctggaaccacagatctctcagggcctggtcgtcacacccccggggccagagcttgtcctcaatgtctccagcaccttcgttctgacctgctcgggttcagctccggtggtgtgggaacggatgtcccaggagcccccacaggaaatggccaaggcccaggatggcaccttctccagcgtgctcacactgaccaacctcactgggctagacacgggagaatacttttgcacccacaatgactcccgtggactggagaccgatgagcggaaacggctctacatctttgtgccagatcccaccgtgggcttcctccctaatgatgccgaggaactattcatctttctcacggaaataactgagatcaccattccatgccgagtaacagacccacagctggtggtgacactgcacgagaagaaaggggacgttgcactgcctgtcccctatgatcaccaacgtggcttttctggtatctttgaggacagaagctacatctgcaaaaccaccattggggacagggaggtggattctgatgcctactatgtctacagactccaggtgtcatccatcaacgtctctgtgaacgcagtgcagactgtggtccgccagggtgagaacatcaccctcatgtgcattgtgatcgggaatgaggtggtcaacttcgagtggacatacccccgcaaagaaagtgggcggctggtggagccggtgactgacttcctcttggatatgccttaccacatccgctccatcctgcacatccccagtgccgagttagaagactcggggacctacacctgcaatgtgacggagagtgtgaatgaccatcaggatgaaaaggccatcaacatcaccgtggttgagagcggctacgtgcggctcctgggagaggtgggcacactacaatttgctgagctgcatcggagccggacactgcaggtagtgttcgaggcctacccaccgcccactgtcctgtggttcaaagacaaccgcaccctgggcgactccagcgctggcgaaatcgccctgtccacgcgcaacgtgtcggagacccggtatgtgtcagagctgacactggttcgcgtgaaggtggcagaggctggccactacaccatgcgggccttccatgaggatgctgaggtccagctctccttccagctacagatcaatgtccctgtccgagtgctggagctaagtgagagccaccctgacagtggggaacagacagtccgctgtcgtggccggggcatgccccagccgaacatcatctggtctgcctgcagagacctcaaaaggtgtccacgtgagctgccgcccacgctgctggggaacagttccgaagaggagagccagctggagactaacgtgacgtactgggaggaggagcaggagtttgaggtggtgagcacactgcgtctgcagcacgtggatcggccactgtcggtgcgctgcacgctgcgcaacgctgtgggccaggacacgcaggaggtcatcgtggtgccacactccttgccctttaaggtggtggtgatctcagccatcctggccctggtggtgctcaccatcatctcccttatcatcctcatcatgctttggcagaagaagccacgttacgagatccgatggaaggtgattgagtctgtgagctctgacggccatgagtacatctacgtggaccccatgcagctgccctatgactccacgtgggagctgccgcgggaccagcttgtgctgggacgcaccctcggctctggggcctttgggcaggtggtggaggccacggctcatggcctgagccattctcaggccacgatgaaagtggccgtcaagatgcttaaatccacagcccgcagcagtgagaagcaagcccttatgtcggagctgaagatcatgagtcaccttgggccccacctgaacgtggtcaacctgttgggggcctgcaccaaaggaggacccatctatatcatcactgagtactgccgctacggagacctggtggactacctgcaccgcaacaaacacaccttcctgcagcaccactccgacaagcgccgcccgcccagcgcggagctctacagcaatgctctgcccgttgggctccccctgcccagccatgtgtccttgaccggggagagcgacggtggctacatggacatgagcaaggacgagtcggtggactatgtgcccatgctggacatgaaaggagacgtcaaatatgcagacatcgagtcctccaactacatggccccttacgataactacgttccctctgcccctgagaggacctgccgagcaactttgatcaacgagtctccagtgctaagctacatggacctcgtgggcttcagctaccaggtggccaatggcatggagtttctggcctccaagaactgcgtccacagagacctggcggctaggaacgtgctcatctgtgaaggcaagctggtcaagatctgtgactttggcctggctcgagacatcatgcgggactcgaattacatctccaaaggcagcacctttttgcctttaaagtggatggctccggagagcatcttcaacagcctctacaccaccctgagcgacgtgtggtccttcgggatcctgctctgggagatcttcaccttgggtggcaccccttacccagagctgcccatgaacgagcagttctacaatgccatcaaacggggttaccgcatggcccagcctgcccatgcctccgacgagatctatgagatcatgcagaagtgctgggaagagaagtttgagattcggccccccttctcccagctggtgctgcttctcgagagactgttgggcgaaggttacaaaaagaagtaccagcaggtggatgaggagtttctgaggagtgaccacccagccatccttcggtcccaggcccgcttgcctgggttccatggcctccgatctcccctggacaccagctccgtcctctatactgccgtgcagcccaatgagggtgacaacgactatatcatccccctgcctgaccccaaacccgaggttgctgacgagggcccactggagggttcccccagcctagccagctccaccctgaatgaagtcaacacctcctcaaccatctcctgtgacagccccctggagccccaggacgaaccagagccagagccccagcttgagctccaggtggagccggagccagagctggaacagttgccggattcggggtgccctgcgcctcgggcggaagcagaggatagcttcctgtagggggctggcccctaccctgccctgcctgaagctccccccctgccagcacccagcatctcctggcctggcctgaccgggcttcctgtcagccaggctgcccttatcagctgtccccttctggaagctttctgctcctgacgtgttgtgccccaaaccctggggctggcttaggaggcaagaaaactgcaggggccgtgaccagccctctgcctccagggaggccaactgactctgagccagggttcccccagggaactcagttttcccatatgtaagatgggaaagttaggcttgatgacccagaatctaggattctctccctggctgacaggtggggagaccgaatccctccctgggaagattcttggagttactgaggtggtaaattaacttttttctgttcagccagctacccctcaaggaatcatagctctctcctcgcacttttatccacccaggagctagggaagagaccctagcctccctggctgctggctgagctagggcctagccttgagcagtgttgcctcatccagaagaaagccagtctcctccctatgatgccagtccctgcgttccctggcccgagctggtctggggccattaggcagcctaattaatgctggaggctgagccaagtacaggacacccccagcctgcagcccttgcccagggcacttggagcacacgcagccatagcaagtgcctgtgtccctgtccttcaggcccatcagtcctggggctttttctttatcaccctcagtcttaatccatccaccagagtctagaaggccagacgggccccgcatctgtgatgagaatgtaaatgtgccagtgtggagtggccacgtgtgtgtgccagtatatggccctggctctgcattggacctgctatgaggctttggaggaatccctcaccctctctgggcctcagtttccccttcaaaaaatgaataagtcggacttattaactctgagtgccttgccagcactaacattctagagtattccaggtggttgcacatttgtccagatgaagcaaggccatataccctaaacttccatcctgggggtcagctgggctcctgggagattccagatcacacatcacactctggggactcaggaaccatgccccttccccaggcccccagcaagtctcaagaacacagctgcacaggccttgacttagagtgacagccggtgtcctggaaagcccccagcagctgccccagggacatgggaagaccacgggacctctttcactacccacgatgacctccgggggtatcctgggcaaaagggacaaagagggcaaatgagatcacctcctgcagcccaccactccagcacctgtgccgaggtctgcgtcgaagacagaatggacagtgaggacagttatgtcttgtaaaagacaagaagcttcagatgggtaccccaagaaggatgtgagaggtgggcgctttggaggtttgcccctcacccaccagctgccccatccctgaggcagcgctccatgggggtatggttttgtcactgcccagacctagcagtgacatctcattgtccccagcccagtgggcattggaggtgccaggggagtcagggttgtagccaagacgcccccgcacggggagggttgggaagggggtgcaggaagctcaacccctctgggcaccaaccctgcattgcaggttggcaccttacttccctgggatccccagagttggtccaaggagggagagtgggttctcaatacggtaccaaagatataatcacctaggtttacaaatatttttaggactcacgttaactcacatttatacagcagaaatgctattttgtatgctgttaagtttttctatctgtgtacttttttttaagggaaagattttaatattaaacctggtgcttctcactcacagactttgtggtctctctcgggtttgggttcctgcccatagggagtgtggagtggggcacatgaggctcacccagacgcagacccccagacaggtcccttcagctctgagtctcattcattcatctgtaaagtggggattttcgctctcccacccctcgctggaagctggggggcctagacttgggcttggtttcccaaggtgggaagcgagcaggcttttctggctccacagagcctggccttgagtcgggcaggagggtgtggggctgcagggctgctccaaggctctggtgctgaggcgtctcactgcctccaccatgtgctttggctttggctatcagctgggacaccctcccctccactccgcccacaggcccggattgaggccggcgtgctctgtgacaggcagctgctagagcccagattccaggtccaggtgagtcatgatcaggccccaggtaggagaagggcagacagagtgtccaaaagcgtgagagcacgaagtgaggagaaggtggagaagagagaagaggaagaggaagaggaagagaggaagcggagggaactgcggccaggctaaaaggggaagaagaggatcagcccaaggaggaggaagaggaaaacaagacaaacagccagtgcagaggagaggaacgtgtgtccagtgtcccgatccctgcggagctagtagctgagagctctgtgccctgggcaccttgcagccctgcacctgcctgccacttccccaccgaggccatgggcccaggagttctgctgctcctgctggtggccacagcttggcatggtcagggaatcccagtgatagagcccagtgtccccgagctggtcgtgaagccaggagcaacggtgaccttgcgatgtgtgggcaatggcagcgtggaatgggatggccccccatcacctcactggaccctgtactctgatggctccagcagcatcctcagcaccaacaacgctaccttccaaaacacggggacctatcgctgcactgagcctggagaccccctgggaggcagcgccgccatccacctctatgtcaaagaccctgcccggccctggaacgtgctagcacaggaggtggtcgtgttcgaggaccaggacgcactactgccctgtctgctcacagacccggtgctggaagcaggcgtctcgctggtgcgtgtgcgtggccggcccctcatgcgccacaccaactactccttctcgccctggcatggcttcaccatccacagggccaagttcattcagagccaggactatcaatgcagtgccctgatgggtggcaggaaggtgatgtccatcagcatccggctgaaagtgcagaaagtcatcccagggcccccagccttgacactggtgcctgcagagctggtgcggattcgaggggaggctgcccagatcgtgtgctcagccagcagcgttgatgttaactttgatgtcttcctccaacacaacaacactaagctcgcaatccctcaacaatctgactttcataataaccgttaccaaaaagtcctgaccctcaacctcgatcaagtagatttccaacatgccggcaactactcctgcgtggccagcaacgtgcagggcaagcactccacctccatgttcttccgggtggtagagagtgcctacttgaacttgagctctgagcagaacctcatccaggaggtgaccgtgggggaggggctcaacctcaaagtcatggtggaggcctacccaggcctgcaaggttttaactggacctacctgggacccttttctgaccaccagcctgagcccaagcttgctaatgctaccaccaaggacacatacaggcacaccttcaccctctctctgccccgcctgaagccctctgaggctggccgctactccttcctggccagaaacccaggaggctggagagctctgacgtttgagctcacccttcgataccccccagaggtaagcgtcatatggacattcatcaacggctctggcacccttttgtgtgctgcctctgggtacccccagcccaacgtgacatggctgcagtgcagtggccacactgataggtgtgatgaggcccaagtgctgcaggtctgggatgacccataccctgaggtcctgagccaggagcccttccacaaggtgacggtgcagagcctgctgactgttgagaccttagagcacaaccaaacctacgagtgcagggcccacaacagcgtggggagtggctcctgggccttcatacccatctctgcaggagcccacacgcatcccccggatgagttcctcttcacaccagtggtggtcgcctgcatgtccatcatggccttgctgctgctgctgctcctgctgctattgtacaagtataagcagaagcccaagtaccaggtccgctggaagatcatcgagagctatgagggcaacagttatactttcatcgaccccacgcagctgccttacaacgagaagtgggagttcccccggaacaacctgcagtttggtaagaccctcggagctggagcctttgggaaggtggtggaggccacggcctttggtctgggcaaggaggatgctgtcctgaaggtggctgtgaagatgctgaagtccacggcccatgctgatgagaaggaggccctcatgtccgagctgaagatcatgagccacctgggccagcacgagaacatcgtcaaccttctgggagcctgtacccatggaggccctgtactggtcatcacggagtactgttgctatggcgacctgctcaactttctgcgaaggaaggctgaggccatgctgggacccagcctgagccccggccaggaccccgagggaggcgtcgactataagaacatccacctcgagaagaaatatgtccgcagggacagtggcttctccagccagggtgtggacacctatgtggagatgaggcctgtctccacttcttcaaatgactccttctctgagcaagacctggacaaggaggatggacggcccctggagctccgggacctgcttcacttctccagccaagtagcccagggcatggccttcctcgcttccaagaattgcatccaccgggacgtggcagcgcgtaacgtgctgttgaccaatggtcatgtggccaagattggggacttcgggctggctagggacatcatgaatgactccaactacattgtcaagggcaatgcccgcctgcctgtgaagtggatggccccagagagcatctttgactgtgtctacacggttcagagcgacgtctggtcctatggcatcctcctctgggagatcttctcacttgggctgaatccctaccctggcatcctggtgaacagcaagttctataaactggtgaaggatggataccaaatggcccagcctgcatttgccccaaagaatatatacagcatcatgcaggcctgctgggccttggagcccacccacagacccaccttccagcagatctgctccttccttcaggagcaggcccaagaggacaggagagagcgggactataccaatctgccgagcagcagcagaagcggtggcagcggcagcagcagcagtgagctggaggaggagagctctagtgagcacctgacctgctgcgagcaaggggatatcgcccagcccttgctgcagcccaacaactatcagttctgctgaggagttgacgacagggagtaccactctcccctcctccaaacttcaactcctccatggatggggcgacacggggagaacatacaaactctgccttcggtcatttcactcaacagctcggcccagctctgaaacttgggaaggtgagggattcaggggaggtcagaggatcccacttcctgagcatgggccatcactgccagtcaggggctgggggctgagccctcaccccccgcctcccctactgttctcatggtgttggcctcgtgtttgctatgccaactagtagaaccttctttcctaatccccttatcttcatggaaatggactgactttatgcctatgaagtccccaggagctacactgatactgagaaaaccaggctctttggggctagacagactggcagagagtgagatctccctctctgagaggagcagcagatgctcacagaccacactcagctcaggccccttggagcaggatggctcctctaagaatctcacaggacctcttagtctctgccctatacgccgccttcactccacagcctcacccctcccacccccatactggtactgctgtaatgagccaagtggcagctaaaagttgggggtgttctgcccagtcccgtcattctgggctagaaggcaggggaccttggcatgtggctggccacaccaagcaggaagcacaaactcccccaagctgactcatcctaactaacagtcacgccgtgggatgtctctgtccacattaaactaacagcattaatgca

SEQ ID NO: 403667 - DNA, 7613 bp, Homo sapiens
agcaggttggttgaaaagtcttgatccacaggctttcctactgggatagactgaaggaagatgagtgagtgtgctctcctgtgatgctcctttacccccagccatgtgtccttgaccggggagagcgacggtggctacatggacatgagcaaggacgagtcggtggactatgtgcccatgctggacatgaaaggagacgtcaaatatgcagacatcgagtcctccaactacatggccccttacgataactacgttccctctgcccctgagaggacctgccgagcaactttgatcaacgagtctccagtgctaagctacatggacctcgtgggcttcagctaccaggtggccaatggcatggagtttctggcctccaagaactgcgtccacagagacctggcggctaggaacgtgctcatctgtgaaggcaagctggtcaagatctgtgactttggcctggctcgagacatcatgcgggactcgaattacatctccaaaggcagcacctttttgcctttaaagtggatggctccggagagcatcttcaacagcctctacaccaccctgagcgacgtgtggtccttcgggatcctgctctgggagatcttcaccttgggtggcaccccttacccagagctgcccatgaacgagcagttctacaatgccatcaaacggggttaccgcatggcccagcctgcccatgcctccgacgagatctatgagatcatgcagaagtgctgggaagagaagtttgagattcggccccccttctcccagctggtgctgcttctcgagagactgttgggcgaaggttacaaaaagaagtaccagcaggtggatgaggagtttctgaggagtgaccacccagccatccttcggtcccaggcccgcttgcctgggttccatggcctccgatctcccctggacaccagctccgtcctctatactgccgtgcagcccaatgagggtgacaacgactatatcatccccctgcctgaccccaaacccgaggttgctgacgagggcccactggagggttcccccagcctagccagctccaccctgaatgaagtcaacacctcctcaaccatctcctgtgacagccccctggagccccaggacgaaccagagccagagccccagcttgagctccaggtggagccggagccagagctggaacagttgccggattcggggtgccctgcgcctcgggcggaagcagaggatagcttcctgtagggggctggcccctaccctgccctgcctgaagctccccccctgccagcacccagcatctcctggcctggcctgaccgggcttcctgtcagccaggctgcccttatcagctgtccccttctggaagctttctgctcctgacgtgttgtgccccaaaccctggggctggcttaggaggcaagaaaactgcaggggccgtgaccagccctctgcctccagggaggccaactgactctgagccagggttcccccagggaactcagttttcccatatgtaagatgggaaagttaggcttgatgacccagaatctaggattctctccctggctgacaggtggggagaccgaatccctccctgggaagattcttggagttactgaggtggtaaattaacttttttctgttcagccagctacccctcaaggaatcatagctctctcctcgcacttttatccacccaggagctagggaagagaccctagcctccctggctgctggctgagctagggcctagccttgagcagtgttgcctcatccagaagaaagccagtctcctccctatgatgccagtccctgcgttccctggcccgagctggtctggggccattaggcagcctaattaatgctggaggctgagccaagtacaggacacccccagcctgcagcccttgcccagggcacttggagcacacgcagccatagcaagtgcctgtgtccctgtccttcaggcccatcagtcctggggctttttctttatcaccctcagtcttaatccatccaccagagtctagaaggccagacgggccccgcatctgtgatgagaatgtaaatgtgccagtgtggagtggccacgtgtgtgtgccagtatatggccctggctctgcattggacctgctatgaggctttggaggaatccctcaccctctctgggcctcagtttccccttcaaaaaatgaataagtcggacttattaactctgagtgccttgccagcactaacattctagagtattccaggtggttgcacatttgtccagatgaagcaaggccatataccctaaacttccatcctgggggtcagctgggctcctgggagattccagatcacacatcacactctggggactcaggaaccatgccccttccccaggcccccagcaagtctcaagaacacagctgcacaggccttgacttagagtgacagccggtgtcctggaaagcccccagcagctgccccagggacatgggaagaccacgggacctctttcactacccacgatgacctccgggggtatcctgggcaaaagggacaaagagggcaaatgagatcacctcctgcagcccaccactccagcacctgtgccgaggtctgcgtcgaagacagaatggacagtgaggacagttatgtcttgtaaaagacaagaagcttcagatgggtaccccaagaaggatgtgagaggtgggcgctttggaggtttgcccctcacccaccagctgccccatccctgaggcagcgctccatgggggtatggttttgtcactgcccagacctagcagtgacatctcattgtccccagcccagtgggcattggaggtgccaggggagtcagggttgtagccaagacgcccccgcacggggagggttgggaagggggtgcaggaagctcaacccctctgggcaccaaccctgcattgcaggttggcaccttacttccctgggatccccagagttggtccaaggagggagagtgggttctcaatacggtaccaaagatataatcacctaggtttacaaatatttttaggactcacgttaactcacatttatacagcagaaatgctattttgtatgctgttaagtttttctatctgtgtacttttttttaagggaaagattttaatattaaacctggtgcttctcactcacagactttgtggtctctctcgggtttgggttcctgcccatagggagtgtggagtggggcacatgaggctcacccagacgcagacccccagacaggtcccttcagctctgagtctcattcattcatctgtaaagtggggattttcgctctcccacccctcgctggaagctggggggcctagacttgggcttggtttcccaaggtgggaagcgagcaggcttttctggctccacagagcctggccttgagtcgggcaggagggtgtggggctgcagggctgctccaaggctctggtgctgaggcgtctcactgcctccaccatgtgctttggctttggctatcagctgggacaccctcccctccactccgcccacaggcccggattgaggccggcgtgctctgtgacaggcagctgctagagcccagattccaggtccaggtgagtcatgatcaggccccaggtaggagaagggcagacagagtgtccaaaagcgtgagagcacgaagtgaggagaaggtggagaagagagaagaggaagaggaagaggaagagaggaagcggagggaactgcggccaggctaaaaggggaagaagaggatcagcccaaggaggaggaagaggaaaacaagacaaacagccagtgcagaggagaggaacgtgtgtccagtgtcccgatccctgcggagctagtagctgagagctctgtgccctgggcaccttgcagccctgcacctgcctgccacttccccaccgaggccatgggcccaggagttctgctgctcctgctggtggccacagcttggcatggtcagggaatcccagtgatagagcccagtgtccccgagctggtcgtgaagccaggagcaacggtgaccttgcgatgtgtgggcaatggcagcgtggaatgggatggccccccatcacctcactggaccctgtactctgatggctccagcagcatcctcagcaccaacaacgctaccttccaaaacacggggacctatcgctgcactgagcctggagaccccctgggaggcagcgccgccatccacctctatgtcaaagaccctgcccggccctggaacgtgctagcacaggaggtggtcgtgttcgaggaccaggacgcactactgccctgtctgctcacagacccggtgctggaagcaggcgtctcgctggtgcgtgtgcgtggccggcccctcatgcgccacaccaactactccttctcgccctggcatggcttcaccatccacagggccaagttcattcagagccaggactatcaatgcagtgccctgatgggtggcaggaaggtgatgtccatcagcatccggctgaaagtgcagaaagtcatcccagggcccccagccttgacactggtgcctgcagagctggtgcggattcgaggggaggctgcccagatcgtgtgctcagccagcagcgttgatgttaactttgatgtcttcctccaacacaacaacactaagctcgcaatccctcaacaatctgactttcataataaccgttaccaaaaagtcctgaccctcaacctcgatcaagtagatttccaacatgccggcaactactcctgcgtggccagcaacgtgcagggcaagcactccacctccatgttcttccgggtggtagagagtgcctacttgaacttgagctctgagcagaacctcatccaggaggtgaccgtgggggaggggctcaacctcaaagtcatggtggaggcctacccaggcctgcaaggttttaactggacctacctgggacccttttctgaccaccagcctgagcccaagcttgctaatgctaccaccaaggacacatacaggcacaccttcaccctctctctgccccgcctgaagccctctgaggctggccgctactccttcctggccagaaacccaggaggctggagagctctgacgtttgagctcacccttcgataccccccagaggtaagcgtcatatggacattcatcaacggctctggcacccttttgtgtgctgcctctgggtacccccagcccaacgtgacatggctgcagtgcagtggccacactgataggtgtgatgaggcccaagtgctgcaggtctgggatgacccataccctgaggtcctgagccaggagcccttccacaaggtgacggtgcagagcctgctgactgttgagaccttagagcacaaccaaacctacgagtgcagggcccacaacagcgtggggagtggctcctgggccttcatacccatctctgcaggagcccacacgcatcccccggatgagttcctcttcacaccagtggtggtcgcctgcatgtccatcatggccttgctgctgctgctgctcctgctgctattgtacaagtataagcagaagcccaagtaccaggtccgctggaagatcatcgagagctatgagggcaacagttatactttcatcgaccccacgcagctgccttacaacgagaagtgggagttcccccggaacaacctgcagtttggtaagaccctcggagctggagcctttgggaaggtggtggaggccacggcctttggtctgggcaaggaggatgctgtcctgaaggtggctgtgaagatgctgaagtccacggcccatgctgatgagaaggaggccctcatgtccgagctgaagatcatgagccacctgggccagcacgagaacatcgtcaaccttctgggagcctgtacccatggaggccctgtactggtcatcacggagtactgttgctatggcgacctgctcaactttctgcgaaggaaggctgaggccatgctgggacccagcctgagccccggccaggaccccgagggaggcgtcgactataagaacatccacctcgagaagaaatatgtccgcagggacagtggcttctccagccagggtgtggacacctatgtggagatgaggcctgtctccacttcttcaaatgactccttctctgagcaagacctggacaaggaggatggacggcccctggagctccgggacctgcttcacttctccagccaagtagcccagggcatggccttcctcgcttccaagaattgcatccaccgggacgtggcagcgcgtaacgtgctgttgaccaatggtcatgtggccaagattggggacttcgggctggctagggacatcatgaatgactccaactacattgtcaagggcaatgcccgcctgcctgtgaagtggatggccccagagagcatctttgactgtgtctacacggttcagagcgacgtctggtcctatggcatcctcctctgggagatcttctcacttgggctgaatccctaccctggcatcctggtgaacagcaagttctataaactggtgaaggatggataccaaatggcccagcctgcatttgccccaaagaatatatacagcatcatgcaggcctgctgggccttggagcccacccacagacccaccttccagcagatctgctccttccttcaggagcaggcccaagaggacaggagagagcgggactataccaatctgccgagcagcagcagaagcggtggcagcggcagcagcagcagtgagctggaggaggagagctctagtgagcacctgacctgctgcgagcaaggggatatcgcccagcccttgctgcagcccaacaactatcagttctgctgaggagttgacgacagggagtaccactctcccctcctccaaacttcaactcctccatggatggggcgacacggggagaacatacaaactctgccttcggtcatttcactcaacagctcggcccagctctgaaacttgggaaggtgagggattcaggggaggtcagaggatcccacttcctgagcatgggccatcactgccagtcaggggctgggggctgagccctcaccccccgcctcccctactgttctcatggtgttggcctcgtgtttgctatgccaactagtagaaccttctttcctaatccccttatcttcatggaaatggactgactttatgcctatgaagtccccaggagctacactgatactgagaaaaccaggctctttggggctagacagactggcagagagtgagatctccctctctgagaggagcagcagatgctcacagaccacactcagctcaggccccttggagcaggatggctcctctaagaatctcacaggacctcttagtctctgccctatacgccgccttcactccacagcctcacccctcccacccccatactggtactgctgtaatgagccaagtggcagctaaaagttgggggtgttctgcccagtcccgtcattctgggctagaaggcaggggaccttggcatgtggctggccacaccaagcaggaagcacaaactcccccaagctgactcatcctaactaacagtcacgccgtgggatgtctctgtccacattaaactaacagcattaatgca

SEQ ID NO: 403668 - DNA, 9785 bp, Homo sapiens
tcctgaggctgccagcagccagcagtgactgcccgccctatctgggacccaggatcgctctgtgagcaacttggagccagagaggagatcaacaaggaggaggagagagccggcccctcagccctgctgcccagcagcagcctgtgctcgccctgcccaacgcagacagccagacccagggcggcccctctggcggctctgctcctcccgaaggatgcttggggagtgaggcgaagctgggccgctcctctcccctacagcagcccccttcctccatccctctgttctcctgagccttcaggagcctgcaccagtcctgcctgtccttctactcagctgttacccactctgggaccagcagtctttctgataactgggagagggcagtaaggaggacttcctggagggggtgactgtccagagcctggaactgtgcccacaccagaagccatcagcagcaaggacaccatgcggcttccgggtgcgatgccagctctggccctcaaaggcgagctgctgttgctgtctctcctgttacttctggaaccacagatctctcagggcctggtcgtcacacccccggggccagagcttgtcctcaatgtctccagcaccttcgttctgacctgctcgggttcagctccggtggtgtgggaacggatgtcccaggagcccccacaggaaatggccaaggcccaggatggcaccttctccagcgtgctcacactgaccaacctcactgggctagacacgggagaatacttttgcacccacaatgactcccgtggactggagaccgatgagcggaaacggctctacatctttgtgccagatcccaccgtgggcttcctccctaatgatgccgaggaactattcatctttctcacggaaataactgagatcaccattccatgccgagtaacagacccacagctggtggtgacactgcacgagaagaaaggggacgttgcactgcctgtcccctatgatcaccaacgtggcttttctggtatctttgaggacagaagctacatctgcaaaaccaccattggggacagggaggtggattctgatgcctactatgtctacagactccaggtgtcatccatcaacgtctctgtgaacgcagtgcagactgtggtccgccagggtgagaacatcaccctcatgtgcattgtgatcgggaatgaggtggtcaacttcgagtggacatacccccgcaaagaaagtgggcggctggtggagccggtgactgacttcctcttggatatgccttaccacatccgctccatcctgcacatccccagtgccgagttagaagactcggggacctacacctgcaatgtgacggagagtgtgaatgaccatcaggatgaaaaggccatcaacatcaccgtggttgagagcggctacgtgcggctcctgggagaggtgggcacactacaatttgctgagctgcatcggagccggacactgcaggtagtgttcgaggcctacccaccgcccactgtcctgtggttcaaagacaaccgcaccctgggcgactccagcgctggcgaaatcgccctgtccacgcgcaacgtgtcggagacccggtatgtgtcagagctgacactggttcgcgtgaaggtggcagaggctggccactacaccatgcgggccttccatgaggatgctgaggtccagctctccttccagctacagatcaatgtccctgtccgagtgctggagctaagtgagagccaccctgacagtggggaacagacagtccgctgtcgtggccggggcatgccccagccgaacatcatctggtctgcctgcagagacctcaaaaggtgtccacgtgagctgccgcccacgctgctggggaacagttccgaagaggagagccagctggagactaacgtgacgtactgggaggaggagcaggagtttgaggtggtgagcacactgcgtctgcagcacgtggatcggccactgtcggtgcgctgcacgctgcgcaacgctgtgggccaggacacgcaggaggtcatcgtggtgccacactccttgccctttaaggtggtggtgatctcagccatcctggccctggtggtgctcaccatcatctcccttatcatcctcatcatgctttggcagaagaagccacgttacgagatccgatggaaggtgattgagtctgtgagctctgacggccatgagtacatctacgtggaccccatgcagctgccctatgactccacgtgggagctgccgcgggaccagcttgtgctgggacgcaccctcggctctggggcctttgggcaggtggtggaggccacggctcatggcctgagccattctcaggccacgatgaaagtggccgtcaagatgcttaaatccacagcccgcagcagtgagaagcaagcccttatgtcggagctgaagatcatgagtcaccttgggccccacctgaacgtggtcaacctgttgggggcctgcaccaaaggaggacccatctatatcatcactgagtactgccgctacggagacctggtggactacctgcaccgcaacaaacacaccttcctgcagcaccactccgacaagcgccgcccgcccagcgcggagctctacagcaatgctctgcccgttgggctccccctgcccagccatgtgtccttgaccggggagagcgacggtggctacatggacatgagcaaggacgagtcggtggactatgtgcccatgctggacatgaaaggagacgtcaaatatgcagacatcgagtcctccaactacatggccccttacgataactacgttccctctgcccctgagaggacctgccgagcaactttgatcaacgagtctccagtgctaagctacatggacctcgtgggcttcagctaccaggtggccaatggcatggagtttctggcctccaagaactgcgtccacagagacctggcggctaggaacgtgctcatctgtgaaggcaagctggtcaagatctgtgactttggcctggctcgagacatcatgcgggactcgaattacatctccaaaggcagcacctttttgcctttaaagtggatggctccggagagcatcttcaacagcctctacaccaccctgagcgacgtgtggtccttcgggatcctgctctgggagatcttcaccttgggtggcaccccttacccagagctgcccatgaacgagcagttctacaatgccatcaaacggggttaccgcatggcccagcctgcccatgcctccgacgagatctatgagatcatgcagaagtgctgggaagagaagtttgagattcggccccccttctcccagctggtgctgcttctcgagagactgttgggcgaaggttacaaaaagaagtaccagcaggtggatgaggagtttctgaggagtgaccacccagccatccttcggtcccaggcccgcttgcctgggttccatggcctccgatctcccctggacaccagctccgtcctctatactgccgtgcagcccaatgagggtgacaacgactatatcatccccctgcctgaccccaaacccgaggttgctgacgagggcccactggagggttcccccagcctagccagctccaccctgaatgaagtcaacacctcctcaaccatctcctgtgacagccccctggagccccaggacgaaccagagccagagccccagcttgagctccaggtggagccggagccagagctggaacagttgccggattcggggtgccctgcgcctcgggcggaagcagaggatagcttcctgtagggggctggcccctaccctgccctgcctgaagctccccccctgccagcacccagcatctcctggcctggcctgaccgggcttcctgtcagccaggctgcccttatcagctgtccccttctggaagctttctgctcctgacgtgttgtgccccaaaccctggggctggcttaggaggcaagaaaactgcaggggccgtgaccagccctctgcctccagggaggccaactgactctgagccagggttcccccagggaactcagttttcccatatgtaagatgggaaagttaggcttgatgacccagaatctaggattctctccctggctgacaggtggggagaccgaatccctccctgggaagattcttggagttactgaggtggtaaattaacttttttctgttcagccagctacccctcaaggaatcatagctctctcctcgcacttttatccacccaggagctagggaagagaccctagcctccctggctgctggctgagctagggcctagccttgagcagtgttgcctcatccagaagaaagccagtctcctccctatgatgccagtccctgcgttccctggcccgagctggtctggggccattaggcagcctaattaatgctggaggctgagccaagtacaggacacccccagcctgcagcccttgcccagggcacttggagcacacgcagccatagcaagtgcctgtgtccctgtccttcaggcccatcagtcctggggctttttctttatcaccctcagtcttaatccatccaccagagtctagaaggccagacgggccccgcatctgtgatgagaatgtaaatgtgccagtgtggagtggccacgtgtgtgtgccagtatatggccctggctctgcattggacctgctatgaggctttggaggaatccctcaccctctctgggcctcagtttccccttcaaaaaatgaataagtcggacttattaactctgagtgccttgccagcactaacattctagagtattccaggtggttgcacatttgtccagatgaagcaaggccatataccctaaacttccatcctgggggtcagctgggctcctgggagattccagatcacacatcacactctggggactcaggaaccatgccccttccccaggcccccagcaagtctcaagaacacagctgcacaggccttgacttagagtgacagccggtgtcctggaaagcccccagcagctgccccagggacatgggaagaccacgggacctctttcactacccacgatgacctccgggggtatcctgggcaccaaccctgcattgcaggttggcaccttacttccctgggatccccagagttggtccaaggagggagagtgggttctcaatacggtaccaaagatataatcacctaggtttacaaatatttttaggactcacgttaactcacatttatacagcagaaatgctattttgtatgctgttaagtttttctatctgtgtacttttttttaagggaaagattttaatattaaacctggtgcttctcactcacagactttgtggtctctctcgggtttgggttcctgcccatagggagtgtggagtggggcacatgaggctcacccagacgcagacccccagacaggtcccttcagctctgagtctcattcattcatctgtaaagtggggattttcgctctcccacccctcgctggaagctggggggcctagacttgggcttggtttcccaaggtgggaagcgagcaggcttttctggctccacagagcctggccttgagtcgggcaggagggtgtggggctgcagggctgctccaaggctctggtgctgaggcgtctcactgcctccaccatgtgctttggctttggctatcagctgggacaccctcccctccactccgcccacaggcccggattgaggccggcgtgctctgtgacaggcagctgctagagcccagattccaggtccaggtgagtcatgatcaggccccaggtaggagaagggcagacagagtgtccaaaagcgtgagagcacgaagtgaggagaaggtggagaagagagaagaggaagaggaagaggaagagaggaagcggagggaactgcggccaggctaaaaggggaagaagaggatcagcccaaggaggaggaagaggaaaacaagacaaacagccagtgcagaggagaggaacgtgtgtccagtgtcccgatccctgcggagctagtagctgagagctctgtgccctgggcaccttgcagccctgcacctgcctgccacttccccaccgaggccatgggcccaggagttctgctgctcctgctggtggccacagcttggcatggtcagggaatcccagtgatagagcccagtgtccccgagctggtcgtgaagccaggagcaacggtgaccttgcgatgtgtgggcaatggcagcgtggaatgggatggccccccatcacctcactggaccctgtactctgatggctccagcagcatcctcagcaccaacaacgctaccttccaaaacacggggacctatcgctgcactgagcctggagaccccctgggaggcagcgccgccatccacctctatgtcaaagaccctgcccggccctggaacgtgctagcacaggaggtggtcgtgttcgaggaccaggacgcactactgccctgtctgctcacagacccggtgctggaagcaggcgtctcgctggtgcgtgtgcgtggccggcccctcatgcgccacaccaactactccttctcgccctggcatggcttcaccatccacagggccaagttcattcagagccaggactatcaatgcagtgccctgatgggtggcaggaaggtgatgtccatcagcatccggctgaaagtgcagaaagtcatcccagggcccccagccttgacactggtgcctgcagagctggtgcggattcgaggggaggctgcccagatcgtgtgctcagccagcagcgttgatgttaactttgatgtcttcctccaacacaacaacactaagctcgcaatccctcaacaatctgactttcataataaccgttaccaaaaagtcctgaccctcaacctcgatcaagtagatttccaacatgccggcaactactcctgcgtggccagcaacgtgcagggcaagcactccacctccatgttcttccgggtggtagagagtgcctacttgaacttgagctctgagcagaacctcatccaggaggtgaccgtgggggaggggctcaacctcaaagtcatggtggaggcctacccaggcctgcaaggttttaactggacctacctgggacccttttctgaccaccagcctgagcccaagcttgctaatgctaccaccaaggacacatacaggcacaccttcaccctctctctgccccgcctgaagccctctgaggctggccgctactccttcctggccagaaacccaggaggctggagagctctgacgtttgagctcacccttcgataccccccagaggtaagcgtcatatggacattcatcaacggctctggcacccttttgtgtgctgcctctgggtacccccagcccaacgtgacatggctgcagtgcagtggccacactgataggtgtgatgaggcccaagtgctgcaggtctgggatgacccataccctgaggtcctgagccaggagcccttccacaaggtgacggtgcagagcctgctgactgttgagaccttagagcacaaccaaacctacgagtgcagggcccacaacagcgtggggagtggctcctgggccttcatacccatctctgcaggagcccacacgcatcccccggatgagttcctcttcacaccagtggtggtcgcctgcatgtccatcatggccttgctgctgctgctgctcctgctgctattgtacaagtataagcagaagcccaagtaccaggtccgctggaagatcatcgagagctatgagggcaacagttatactttcatcgaccccacgcagctgccttacaacgagaagtgggagttcccccggaacaacctgcagtttggtaagaccctcggagctggagcctttgggaaggtggtggaggccacggcctttggtctgggcaaggaggatgctgtcctgaaggtggctgtgaagatgctgaagtccacggcccatgctgatgagaaggaggccctcatgtccgagctgaagatcatgagccacctgggccagcacgagaacatcgtcaaccttctgggagcctgtacccatggaggccctgtactggtcatcacggagtactgttgctatggcgacctgctcaactttctgcgaaggaaggctgaggccatgctgggacccagcctgagccccggccaggaccccgagggaggcgtcgactataagaacatccacctcgagaagaaatatgtccgcagggacagtggcttctccagccagggtgtggacacctatgtggagatgaggcctgtctccacttcttcaaatgactccttctctgagcaagacctggacaaggaggatggacggcccctggagctccgggacctgcttcacttctccagccaagtagcccagggcatggccttcctcgcttccaagaattgcatccaccgggacgtggcagcgcgtaacgtgctgttgaccaatggtcatgtggccaagattggggacttcgggctggctagggacatcatgaatgactccaactacattgtcaagggcaatgcccgcctgcctgtgaagtggatggccccagagagcatctttgactgtgtctacacggttcagagcgacgtctggtcctatggcatcctcctctgggagatcttctcacttgggctgaatccctaccctggcatcctggtgaacagcaagttctataaactggtgaaggatggataccaaatggcccagcctgcatttgccccaaagaatatatacagcatcatgcaggcctgctgggccttggagcccacccacagacccaccttccagcagatctgctccttccttcaggagcaggcccaagaggacaggagagagcgggactataccaatctgccgagcagcagcagaagcggtggcagcggcagcagcagcagtgagctggaggaggagagctctagtgagcacctgacctgctgcgagcaaggggatatcgcccagcccttgctgcagcccaacaactatcagttctgctgaggagttgacgacagggagtaccactctcccctcctccaaacttcaactcctccatggatggggcgacacggggagaacatacaaactctgccttcggtcatttcactcaacagctcggcccagctctgaaacttgggaaggtgagggattcaggggaggtcagaggatcccacttcctgagcatgggccatcactgccagtcaggggctgggggctgagccctcaccccccgcctcccctactgttctcatggtgttggcctcgtgtttgctatgccaactagtagaaccttctttcctaatccccttatcttcatggaaatggactgactttatgcctatgaagtccccaggagctacactgatactgagaaaaccaggctctttggggctagacagactggcagagagtgagatctccctctctgagaggagcagcagatgctcacagaccacactcagctcaggccccttggagcaggatggctcctctaagaatctcacaggacctcttagtctctgccctatacgccgccttcactccacagcctcacccctcccacccccatactggtactgctgtaatgagccaagtggcagctaaaagttgggggtgttctgcccagtcccgtcattctgggctagaaggcaggggaccttggcatgtggctggccacaccaagcaggaagcacaaactcccccaagctgactcatcctaactaacagtcacgccgtgggatgtctctgtccacattaaactaacagcattaatgca

SEQ ID NO: 403669 - DNA, 9651 bp, Homo sapiens
tcctgaggctgccagcagccagcagtgactgcccgccctatctgggacccaggatcgctctgtgagcaacttggagccagagaggagatcaacaaggaggaggagagagccggcccctcagccctgctgcccagcagcagcctgtgctcgccctgcccaacgcagacagccagacccagggcggcccctctggcggctctgctcctcccgaaggatgcttggggagtgaggcgaagctgggccgctcctctcccctacagcagcccccttcctccatccctctgttctcctgagccttcaggagcctgcaccagtcctgcctgtccttctactcagctgttacccactctgggaccagcagtctttctgataactgggagagggcagtaaggaggacttcctggagggggtgactgtccagagcctggaactgtgcccacaccagaagccatcagcagcaaggacaccatgcggcttccgggtgcgatgccagctctggccctcaaaggcgagctgctgttgctgtctctcctgttacttctggaaccacagatctctcagggcctggtcgtcacacccccggggccagagcttgtcctcaatgtctccagcaccttcgttctgacctgctcgggttcagctccggtggtgtgggaacggatgtcccaggagcccccacaggaaatggccaaggcccaggatggcaccttctccagcgtgctcacactgaccaacctcactgggctagacacgggagaatacttttgcacccacaatgactcccgtggactggagaccgatgagcggaaacggctctacatctttgtgccagatcccaccgtgggcttcctccctaatgatgccgaggaactattcatctttctcacggaaataactgagatcaccattccatgccgagtaacagacccacagctggtggtgacactgcacgagaagaaaggggacgttgcactgcctgtcccctatgatcaccaacgtggcttttctggtatctttgaggacagaagctacatctgcaaaaccaccattggggacagggaggtggattctgatgcctactatgtctacagactccaggtgtcatccatcaacgtctctgtgaacgcagtgcagactgtggtccgccagggtgagaacatcaccctcatgtgcattgtgatcgggaatgaggtggtcaacttcgagtggacatacccccgcaaagaaagtgggcggctggtggagccggtgactgacttcctcttggatatgccttaccacatccgctccatcctgcacatccccagtgccgagttagaagactcggggacctacacctgcaatgtgacggagagtgtgaatgaccatcaggatgaaaaggccatcaacatcaccgtggttgagagcggctacgtgcggctcctgggagaggtgggcacactacaatttgctgagctgcatcggagccggacactgcaggtagtgttcgaggcctacccaccgcccactgtcctgtggttcaaagacaaccgcaccctgggcgactccagcgctggcgaaatcgccctgtccacgcgcaacgtgtcggagacccggtatgtgtcagagctgacactggttcgcgtgaaggtggcagaggctggccactacaccatgcgggccttccatgaggatgctgaggtccagctctccttccagctacagatcaatgtccctgtccgagtgctggagctaagtgagagccaccctgacagtggggaacagacagtccgctgtcgtggccggggcatgccccagccgaacatcatctggtctgcctgcagagacctcaaaaggtgtccacgtgagctgccgcccacgctgctggggaacagttccgaagaggagagccagctggagactaacgtgacgtactgggaggaggagcaggagtttgaggtggtgagcacactgcgtctgcagcacgtggatcggccactgtcggtgcgctgcacgctgcgcaacgctgtgggccaggacacgcaggaggtcatcgtggtgccacactccttgccctttaaggtggtggtgatctcagccatcctggccctggtggtgctcaccatcatctcccttatcatcctcatcatgctttggcagaagaagccacgttacgagatccgatggaaggtgattgagtctgtgagctctgacggccatgagtacatctacgtggaccccatgcagctgccctatgactccacgtgggagctgccgcgggaccagcttgtgctgggacgcaccctcggctctggggcctttgggcaggtggtggaggccacggctcatggcctgagccattctcaggccacgatgaaagtggccgtcaagatgcttaaatccacagcccgcagcagtgagaagcaagcccttatgtcggagctgaagatcatgagtcaccttgggccccacctgaacgtggtcaacctgttgggggcctgcaccaaaggaggacccatctatatcatcactgagtactgccgctacggagacctggtggactacctgcaccgcaacaaacacaccttcctgcagcaccactccgacaagcgccgcccgcccagcgcggagctctacagcaatgctctgcccgttgggctccccctgcccagccatgtgtccttgaccggggagagcgacggtggctacatggacatgagcaaggacgagtcggtggactatgtgcccatgctggacatgaaaggagacgtcaaatatgcagacatcgagtcctccaactacatggccccttacgataactacgttccctctgcccctgagaggacctgccgagcaactttgatcaacgagtctccagtgctaagctacatggacctcgtgggcttcagctaccaggtggccaatggcatggagtttctggcctccaagaactgcgtccacagagacctggcggctaggaacgtgctcatctgtgaaggcaagctggtcaagatctgtgactttggcctggctcgagacatcatgcgggactcgaattacatctccaaaggcagcacctttttgcctttaaagtggatggctccggagagcatcttcaacagcctctacaccaccctgagcgacgtgtggtccttcgggatcctgctctgggagatcttcaccttgggtggcaccccttacccagagctgcccatgaacgagcagttctacaatgccatcaaacggggttaccgcatggcccagcctgcccatgcctccgacgagatctatgagatcatgcagaagtgctgggaagagaagtttgagattcggccccccttctcccagctggtgctgcttctcgagagactgttgggcgaaggttacaaaaagaagtaccagcaggtggatgaggagtttctgaggagtgaccacccagccatccttcggtcccaggcccgcttgcctgggttccatggcctccgatctcccctggacaccagctccgtcctctatactgccgtgcagcccaatgagggtgacaacgactatatcatccccctgcctgaccccaaacccgaggttgctgacgagggcccactggagggttcccccagcctagccagctccaccctgaatgaagtcaacacctcctcaaccatctcctgtgacagccccctggagccccaggacgaaccagagccagagccccagcttgagctccaggtggagccggagccagagctggaacagttgccggattcggggtgccctgcgcctcgggcggaagcagaggatagcttcctgtagggggctggcccctaccctgccctgcctgaagctccccccctgccagcacccagcatctcctggcctggcctgaccgggcttcctgtcagccaggctgcccttatcagctgtccccttctggaagctttctgctcctgacgtgttgtgccccaaaccctggggctggcttaggaggcaagaaaactgcaggggccgtgaccagccctctgcctccagggaggccaactgactctgagccagggttcccccagggaactcagttttcccatatgtaagatgggaaagttaggcttgatgacccagaatctaggattctctccctggctgacaggtggggagaccgaatccctccctgggaagattcttggagttactgaggtggtaaattaacttttttctgttcagccagctacccctcaaggaatcatagctctctcctcgcacttttatccacccaggagctagggaagagaccctagcctccctggctgctggctgagctagggcctagccttgagcagtgttgcctcatccagaagaaagccagtctcctccctatgatgccagtccctgcgttccctggcccgagctggtctggggccattaggcagcctaattaatgctggaggctgagccaagtacaggacacccccagcctgcagcccttgcccagggcacttggagcacacgcagccatagcaagtgcctgtgtccctgtccttcaggcccatcagtcctggggctttttctttatcaccctcagtcttaatccatccaccagagtctagaaggccagacgggccccgcatctgtgatgagaatgtaaatgtgccagtgtggagtggccacgtgtgtgtgccagtatatggccctggctctgcattggacctgctatgaggctttggaggaatccctcaccctctctgggcctcagtttccccttcaaaaaatgaataagtcggacttattaactctgagtgccttgccagcactaacattctagagtattccaggtggttggtcactgcccagacctagcagtgacatctcattgtccccagcccagtgggcattggaggtgccaggggagtcagggttgtagccaagacgcccccgcacggggagggttgggaagggggtgcaggaagctcaacccctctgggcaccaaccctgcattgcaggttggcaccttacttccctgggatccccagagttggtccaaggagggagagtgggttctcaatacggtaccaaagatataatcacctaggtttacaaatatttttaggactcacgttaactcacatttatacagcagaaatgctattttgtatgctgttaagtttttctatctgtgtacttttttttaagggaaagattttaatattaaacctggtgcttctcactcacagactttgtggtctctctcgggtttgggttcctgcccatagggagtgtggagtggggcacatgaggctcacccagacgcagacccccagacaggtcccttcagctctgagtctcattcattcatctgtaaagtggggattttcgctctcccacccctcgctggaagctggggggcctagacttgggcttggtttcccaaggtgggaagcgagcaggcttttctggctccacagagcctggccttgagtcgggcaggagggtgtggggctgcagggctgctccaaggctctggtgctgaggcgtctcactgcctccaccatgtgctttggctttggctatcagctgggacaccctcccctccactccgcccacaggcccggattgaggccggcgtgctctgtgacaggcagctgctagagcccagattccaggtccaggtgagtcatgatcaggccccaggtaggagaagggcagacagagtgtccaaaagcgtgagagcacgaagtgaggagaaggtggagaagagagaagaggaagaggaagaggaagagaggaagcggagggaactgcggccaggctaaaaggggaagaagaggatcagcccaaggaggaggaagaggaaaacaagacaaacagccagtgcagaggagaggaacgtgtgtccagtgtcccgatccctgcggagctagtagctgagagctctgtgccctgggcaccttgcagccctgcacctgcctgccacttccccaccgaggccatgggcccaggagttctgctgctcctgctggtggccacagcttggcatggtcagggaatcccagtgatagagcccagtgtccccgagctggtcgtgaagccaggagcaacggtgaccttgcgatgtgtgggcaatggcagcgtggaatgggatggccccccatcacctcactggaccctgtactctgatggctccagcagcatcctcagcaccaacaacgctaccttccaaaacacggggacctatcgctgcactgagcctggagaccccctgggaggcagcgccgccatccacctctatgtcaaagaccctgcccggccctggaacgtgctagcacaggaggtggtcgtgttcgaggaccaggacgcactactgccctgtctgctcacagacccggtgctggaagcaggcgtctcgctggtgcgtgtgcgtggccggcccctcatgcgccacaccaactactccttctcgccctggcatggcttcaccatccacagggccaagttcattcagagccaggactatcaatgcagtgccctgatgggtggcaggaaggtgatgtccatcagcatccggctgaaagtgcagaaagtcatcccagggcccccagccttgacactggtgcctgcagagctggtgcggattcgaggggaggctgcccagatcgtgtgctcagccagcagcgttgatgttaactttgatgtcttcctccaacacaacaacactaagctcgcaatccctcaacaatctgactttcataataaccgttaccaaaaagtcctgaccctcaacctcgatcaagtagatttccaacatgccggcaactactcctgcgtggccagcaacgtgcagggcaagcactccacctccatgttcttccgggtggtagagagtgcctacttgaacttgagctctgagcagaacctcatccaggaggtgaccgtgggggaggggctcaacctcaaagtcatggtggaggcctacccaggcctgcaaggttttaactggacctacctgggacccttttctgaccaccagcctgagcccaagcttgctaatgctaccaccaaggacacatacaggcacaccttcaccctctctctgccccgcctgaagccctctgaggctggccgctactccttcctggccagaaacccaggaggctggagagctctgacgtttgagctcacccttcgataccccccagaggtaagcgtcatatggacattcatcaacggctctggcacccttttgtgtgctgcctctgggtacccccagcccaacgtgacatggctgcagtgcagtggccacactgataggtgtgatgaggcccaagtgctgcaggtctgggatgacccataccctgaggtcctgagccaggagcccttccacaaggtgacggtgcagagcctgctgactgttgagaccttagagcacaaccaaacctacgagtgcagggcccacaacagcgtggggagtggctcctgggccttcatacccatctctgcaggagcccacacgcatcccccggatgagttcctcttcacaccagtggtggtcgcctgcatgtccatcatggccttgctgctgctgctgctcctgctgctattgtacaagtataagcagaagcccaagtaccaggtccgctggaagatcatcgagagctatgagggcaacagttatactttcatcgaccccacgcagctgccttacaacgagaagtgggagttcccccggaacaacctgcagtttggtaagaccctcggagctggagcctttgggaaggtggtggaggccacggcctttggtctgggcaaggaggatgctgtcctgaaggtggctgtgaagatgctgaagtccacggcccatgctgatgagaaggaggccctcatgtccgagctgaagatcatgagccacctgggccagcacgagaacatcgtcaaccttctgggagcctgtacccatggaggccctgtactggtcatcacggagtactgttgctatggcgacctgctcaactttctgcgaaggaaggctgaggccatgctgggacccagcctgagccccggccaggaccccgagggaggcgtcgactataagaacatccacctcgagaagaaatatgtccgcagggacagtggcttctccagccagggtgtggacacctatgtggagatgaggcctgtctccacttcttcaaatgactccttctctgagcaagacctggacaaggaggatggacggcccctggagctccgggacctgcttcacttctccagccaagtagcccagggcatggccttcctcgcttccaagaattgcatccaccgggacgtggcagcgcgtaacgtgctgttgaccaatggtcatgtggccaagattggggacttcgggctggctagggacatcatgaatgactccaactacattgtcaagggcaatgcccgcctgcctgtgaagtggatggccccagagagcatctttgactgtgtctacacggttcagagcgacgtctggtcctatggcatcctcctctgggagatcttctcacttgggctgaatccctaccctggcatcctggtgaacagcaagttctataaactggtgaaggatggataccaaatggcccagcctgcatttgccccaaagaatatatacagcatcatgcaggcctgctgggccttggagcccacccacagacccaccttccagcagatctgctccttccttcaggagcaggcccaagaggacaggagagagcgggactataccaatctgccgagcagcagcagaagcggtggcagcggcagcagcagcagtgagctggaggaggagagctctagtgagcacctgacctgctgcgagcaaggggatatcgcccagcccttgctgcagcccaacaactatcagttctgctgaggagttgacgacagggagtaccactctcccctcctccaaacttcaactcctccatggatggggcgacacggggagaacatacaaactctgccttcggtcatttcactcaacagctcggcccagctctgaaacttgggaaggtgagggattcaggggaggtcagaggatcccacttcctgagcatgggccatcactgccagtcaggggctgggggctgagccctcaccccccgcctcccctactgttctcatggtgttggcctcgtgtttgctatgccaactagtagaaccttctttcctaatccccttatcttcatggaaatggactgactttatgcctatgaagtccccaggagctacactgatactgagaaaaccaggctctttggggctagacagactggcagagagtgagatctccctctctgagaggagcagcagatgctcacagaccacactcagctcaggccccttggagcaggatggctcctctaagaatctcacaggacctcttagtctctgccctatacgccgccttcactccacagcctcacccctcccacccccatactggtactgctgtaatgagccaagtggcagctaaaagttgggggtgttctgcccagtcccgtcattctgggctagaaggcaggggaccttggcatgtggctggccacaccaagcaggaagcacaaactcccccaagctgactcatcctaactaacagtcacgccgtgggatgtctctgtccacattaaactaacagcattaatgca

SEQ ID NO: 403670 - DNA, 10138 bp, Homo sapiens
tcctgaggctgccagcagccagcagtgactgcccgccctatctgggacccaggatcgctctgtgagcaacttggagccagagaggagatcaacaaggaggaggagagagccggcccctcagccctgctgcccagcagcagcctgtgctcgccctgcccaacgcagacagccagacccagggcggcccctctggcggctctgctcctcccgaaggatgcttggggagtgaggcgaagctgggccgctcctctcccctacagcagcccccttcctccatccctctgttctcctgagccttcaggagcctgcaccagtcctgcctgtccttctactcagctgttacccactctgggaccagcagtctttctgataactgggagagggcagtaaggaggacttcctggagggggtgactgtccagagcctggaactgtgcccacaccagaagccatcagcagcaaggacaccatgcggcttccgggtgcgatgccagctctggccctcaaaggcgagctgctgttgctgtctctcctgttacttctggaaccacagatctctcagggcctggtcgtcacacccccggggccagagcttgtcctcaatgtctccagcaccttcgttctgacctgctcgggttcagctccggtggtgtgggaacggatgtcccaggagcccccacaggaaatggccaaggcccaggatggcaccttctccagcgtgctcacactgaccaacctcactgggctagacacgggagaatacttttgcacccacaatgactcccgtggactggagaccgatgagcggaaacggctctacatctttgtgccagatcccaccgtgggcttcctccctaatgatgccgaggaactattcatctttctcacggaaataactgagatcaccattccatgccgagtaacagacccacagctggtggtgacactgcacgagaagaaaggggacgttgcactgcctgtcccctatgatcaccaacgtggcttttctggtatctttgaggacagaagctacatctgcaaaaccaccattggggacagggaggtggattctgatgcctactatgtctacagactccaggtgtcatccatcaacgtctctgtgaacgcagtgcagactgtggtccgccagggtgagaacatcaccctcatgtgcattgtgatcgggaatgaggtggtcaacttcgagtggacatacccccgcaaagaaagtgggcggctggtggagccggtgactgacttcctcttggatatgccttaccacatccgctccatcctgcacatccccagtgccgagttagaagactcggggacctacacctgcaatgtgacggagagtgtgaatgaccatcaggatgaaaaggccatcaacatcaccgtggttgagagcggctacgtgcggctcctgggagaggtgggcacactacaatttgctgagctgcatcggagccggacactgcaggtagtgttcgaggcctacccaccgcccactgtcctgtggttcaaagacaaccgcaccctgggcgactccagcgctggcgaaatcgccctgtccacgcgcaacgtgtcggagacccggtatgtgtcagagctgacactggttcgcgtgaaggtggcagaggctggccactacaccatgcgggccttccatgaggatgctgaggtccagctctccttccagctacagatcaatgtccctgtccgagtgctggagctaagtgagagccaccctgacagtggggaacagacagtccgctgtcgtggccggggcatgccccagccgaacatcatctggtctgcctgcagagacctcaaaaggtgtccacgtgagctgccgcccacgctgctggggaacagttccgaagaggagagccagctggagactaacgtgacgtactgggaggaggagcaggagtttgaggtggtgagcacactgcgtctgcagcacgtggatcggccactgtcggtgcgctgcacgctgcgcaacgctgtgggccaggacacgcaggaggtcatcgtggtgccacactccttgccctttaaggtggtggtgatctcagccatcctggccctggtggtgctcaccatcatctcccttatcatcctcatcatgctttggcagaagaagccacgttacgagatccgatggaaggtgattgagtctgtgagctctgacggccatgagtacatctacgtggaccccatgcagctgccctatgactccacgtgggagctgccgcgggaccagcttgtgctgggacgcaccctcggctctggggcctttgggcaggtggtggaggccacggctcatggcctgagccattctcaggccacgatgaaagtggccgtcaagatgcttaaatccacagcccgcagcagtgagaagcaagcccttatgtcggagctgaagatcatgagtcaccttgggccccacctgaacgtggtcaacctgttgggggcctgcaccaaaggaggacccatctatatcatcactgagtactgccgctacggagacctggtggactacctgcaccgcaacaaacacaccttcctgcagcaccactccgacaagcgccgcccgcccagcgcggagctctacagcaatgctctgcccgttgggctccccctgcccagccatgtgtccttgaccggggagagcgacggtggctacatggacatgagcaaggacgagtcggtggactatgtgcccatgctggacatgaaaggagacgtcaaatatgcagacatcgagtcctccaactacatggccccttacgataactacgttccctctgcccctgagaggacctgccgagcaactttgatcaacgagtctccagtgctaagctacatggacctcgtgggcttcagctaccaggtggccaatggcatggagtttctggcctccaagaactgcgtccacagagacctggcggctaggaacgtgctcatctgtgaaggcaagctggtcaagatctgtgactttggcctggctcgagacatcatgcgggactcgaattacatctccaaaggcagcacctttttgcctttaaagtggatggctccggagagcatcttcaacagcctctacaccaccctgagcgacgtgtggtccttcgggatcctgctctgggagatcttcaccttgggtggcaccccttacccagagctgcccatgaacgagcagttctacaatgccatcaaacggggttaccgcatggcccagcctgcccatgcctccgacgagatctatgagatcatgcagaagtgctgggaagagaagtttgagattcggccccccttctcccagctggtgctgcttctcgagagactgttgggcgaaggttacaaaaagaagtaccagcaggtggatgaggagtttctgaggagtgaccacccagccatccttcggtcccaggcccgcttgcctgggttccatggcctccgatctcccctggacaccagctccgtcctctatactgccgtgcagcccaatgagggtgacaacgactatatcatccccctgcctgaccccaaacccgaggttgctgacgagggcccactggagggttcccccagcctagccagctccaccctgaatgaagtcaacacctcctcaaccatctcctgtgacagccccctggagccccaggacgaaccagagccagagccccagcttgagctccaggtggagccggagccagagctggaacagttgccggattcggggtgccctgcgcctcgggcggaagcagaggatagcttcctgtagggggctggcccctaccctgccctgcctgaagctccccccctgccagcacccagcatctcctggcctggcctgaccgggcttcctgtcagccaggctgcccttatcagctgtccccttctggaagctttctgctcctgacgtgttgtgccccaaaccctggggctggcttaggaggcaagaaaactgcaggggccgtgaccagccctctgcctccagggaggccaactgactctgagccagggttcccccagggaactcagttttcccatatgtaagatgggaaagttaggcttgatgacccagaatctaggattctctccctggctgacaggtggggagaccgaatccctccctgggaagattcttggagttactgaggtggtaaattaacttttttctgttcagccagctacccctcaaggaatcatagctctctcctcgcacttttatccacccaggagctagggaagagaccctagcctccctggctgctggctgagctagggcctagccttgagcagtgttgcctcatccagaagaaagccagtctcctccctatgatgccagtccctgcgttccctggcccgagctggtctggggccattaggcagcctaattaatgctggaggctgagccaagtacaggacacccccagcctgcagcccttgcccagggcacttggagcacacgcagccatagcaagtgcctgtgtccctgtccttcaggcccatcagtcctggggctttttctttatcaccctcagtcttaatccatccaccagagtctagaaggccagacgggccccgcatctgtgatgagaatgtaaatgtgccagtgtggagtggccacgtgtgtgtgccagtatatggccctggctctgcattggacctgctatgaggctttggaggaatccctcaccctctctgggcctcagtttccccttcaaaaaatgaataagtcggacttattaactctgagtgccttgccagcactaacattctagagtattccaggtggttgcacatttgtccagatgaagcaaggccatataccctaaacttccatcctgggggtcagctgggctcctgggagattccagatcacacatcacactctggggactcaggaaccatgccccttccccaggcccccagcaagtctcaagaacacagctgcacaggccttgacttagagtgacagccggtgtcctggaaagcccccagcagctgccccagggacatgggaagaccacgggacctctttcactacccacgatgacctccgggggtatcctgggcaaaagggacaaagagggcaaatgagatcacctcctgcagcccaccactccagcacctgtgccgaggtctgcgtcgaagacagaatggacagtgaggacagttatgtcttgtaaaagacaagaagcttcagatgggtaccccaagaaggatgtgagaggtgggcgctttggaggtttgcccctcacccaccagctgccccatccctgaggcagcgctccatgggggtatggttttgtcactgcccagacctagcagtgacatctcattgtccccagcccagtgggcattggaggtgccaggggagtcagggttgtagccaagacgcccccgcacggggagggttgggaagggggtgcaggaagctcaacccctctgggcaccaaccctgcattgcaggttggcaccttacttccctgggatccccagagttggtccaaggagggagagtgggttctcaatacggtaccaaagatataatcacctaggtttacaaatatttttaggactcacgttaactcacatttatacagcagaaatgctattttgtatgctgttaagtttttctatctgtgtacttttttttaagggaaagattttaatattaaacctggtgcttctcactcacagactttgtggtctctctcgggtttgggttcctgcccatagggagtgtggagtggggcacatgaggctcacccagacgcagacccccagacaggtcccttcagctctgagtctcattcattcatctgtaaagtggggattttcgctctcccacccctcgctggaagctggggggcctagacttgggcttggtttcccaaggtgggaagcgagcaggcttttctggctccacagagcctggccttgagtcgggcaggagggtgtggggctgcagggctgctccaaggctctggtgctgaggcgtctcactgcctccaccatgtgctttggctttggctatcagctgggacaccctcccctccactccgcccacaggcccggattgaggccggcgtgctctgtgacaggcagctgctagagcccagattccaggtccaggtgagtcatgatcaggccccaggtaggagaagggcagacagagtgtccaaaagcgtgagagcacgaagtgaggagaaggtggagaagagagaagaggaagaggaagaggaagagaggaagcggagggaactgcggccaggctaaaaggggaagaagaggatcagcccaaggaggaggaagaggaaaacaagacaaacagccagtgcagaggagaggaacgtgtgtccagtgtcccgatccctgcggagctagtagctgagagctctgtgccctgggcaccttgcagccctgcacctgcctgccacttccccaccgaggccatgggcccaggagttctgctgctcctgctggtggccacagcttggcatggtcagggaatcccagtgatagagcccagtgtccccgagctggtcgtgaagccaggagcaacggtgaccttgcgatgtgtgggcaatggcagcgtggaatgggatggccccccatcacctcactggaccctgtactctgatggctccagcagcatcctcagcaccaacaacgctaccttccaaaacacggggacctatcgctgcactgagcctggagaccccctgggaggcagcgccgccatccacctctatgtcaaagaccctgcccggccctggaacgtgctagcacaggaggtggtcgtgttcgaggaccaggacgcactactgccctgtctgctcacagacccggtgctggaagcaggcgtctcgctggtgcgtgtgcgtggccggcccctcatgcgccacaccaactactccttctcgccctggcatggcttcaccatccacagggccaagttcattcagagccaggactatcaatgcagtgccctgatgggtggcaggaaggtgatgtccatcagcatccggctgaaagtgcagaaagtcatcccagggcccccagccttgacactggtgcctgcagagctggtgcggattcgaggggaggctgcccagatcgtgtgctcagccagcagcgttgatgttaactttgatgtcttcctccaacacaacaacactaagctcgcaatccctcaacaatctgactttcataataaccgttaccaaaaagtcctgaccctcaacctcgatcaagtagatttccaacatgccggcaactactcctgcgtggccagcaacgtgcagggcaagcactccacctccatgttcttccgggtggtagagagtgcctacttgaacttgagctctgagcagaacctcatccaggaggtgaccgtgggggaggggctcaacctcaaagtcatggtggaggcctacccaggcctgcaaggttttaactggacctacctgggacccttttctgaccaccagcctgagcccaagcttgctaatgctaccaccaaggacacatacaggcacaccttcaccctctctctgccccgcctgaagccctctgaggctggccgctactccttcctggccagaaacccaggaggctggagagctctgacgtttgagctcacccttcgataccccccagaggtaagcgtcatatggacattcatcaacggctctggcacccttttgtgtgctgcctctgggtacccccagcccaacgtgacatggctgcagtgcagtggccacactgataggtgtgatgaggcccaagtgctgcaggtctgggatgacccataccctgaggtcctgagccaggagcccttccacaaggtgacggtgcagagcctgctgactgttgagaccttagagcacaaccaaacctacgagtgcagggcccacaacagcgtggggagtggctcctgggccttcatacccatctctgcaggagcccacacgcatcccccggatgagttcctcttcacaccagtggtggtcgcctgcatgtccatcatggccttgctgctgctgctgctcctgctgctattgtacaagtataagcagaagcccaagtaccaggtccgctggaagatcatcgagagctatgagggcaacagttatactttcatcgaccccacgcagctgccttacaacgagaagtgggagttcccccggaacaacctgcagtttggtgagatggcagctcatcactccacagcttcctatcacagggcctgtgggggttgcagggagcccatgggcccttggacagaggccctttggtgcccaggacttaagggacctgtgtgcgtggcagccacggcccatgctgatgagaaggaggccctcatgtccgagctgaagatcatgagccacctgggccagcacgagaacatcgtcaaccttctgggagcctgtacccatggaggcatctcttgaggactgttggaagtgcaccacctcaggcccatccacccaggcctgctgattcaaaatctgcattgcagagattcccggggtgatttatctgcacatgagttgcagcggacagtggcttctccagccagggtgtggacacctatgtggagatgaggcctgtctccacttcttcaaatgactccttctctgagcaagacctggacaaggaggatggacggcccctggagctccgggacctgcttcacttctccagccaagtagcccagggcatggccttcctcgcttccaagaattgcatccaccgggacgtggcagcgcgtaacgtgctgttgaccaatggtcatgtggccaagattggggacttcgggctggctagggacatcatgaatgactccaactacattgtcaagggcaatgcccgcctgcctgtgaagtggatggccccagagagcatctttgactgtgtctacacggttcagagcgacgtctggtcctatggcatcctcctctgggagatcttctcacttgggctgaatccctaccctggcatcctggtgaacagcaagttctataaactggtgaaggatggataccaaatggcccagcctgcatttgccccaaagaatatatacagcatcatgcaggcctgctgggccttggagcccacccacagacccaccttccagcagatctgctccttccttcaggagcaggcccaagaggacaggagagagcgggactataccaatctgccgagcagcagcagaagcggtggcagcggcagcagcagcagtgagctggaggaggagagctctagtgagcacctgacctgctgcgagcaaggggatatcgcccagcccttgctgcagcccaacaactatcagttctgctgaggagttgacgacagggagtaccactctcccctcctccaaacttcaactcctccatggatggggcgacacggggagaacatacaaactctgccttcggtcatttcactcaacagctcggcccagctctgaaacttgggaaggtgagggattcaggggaggtcagaggatcccacttcctgagcatgggccatcactgccagtcaggggctgggggctgagccctcaccccccgcctcccctactgttctcatggtgttggcctcgtgtttgctatgccaactagtagaaccttctttcctaatccccttatcttcatggaaatggactgactttatgcctatgaagtccccaggagctacactgatactgagaaaaccaggctctttggggctagacagactggcagagagtgagatctccctctctgagaggagcagcagatgctcacagaccacactcagctcaggccccttggagcaggatggctcctctaagaatctcacaggacctcttagtctctgccctatacgccgccttcactccacagcctcacccctcccacccccatactggtactgctgtaatgagccaagtggcagctaaaagttgggggtgttctgcccagtcccgtcattctgggctagaaggcaggggaccttggcatgtggctggccacaccaagcaggaagcacaaactcccccaagctgactcatcctaactaacagtcacgccgtgggatgtctctgtccacattaaactaacagcattaatgca

SEQ ID NO: 403671 - DNA, 11103 bp, Homo sapiens
tcctgaggctgccagcagccagcagtgactgcccgccctatctgggacccaggatcgctctgtgagcaacttggagccagagaggagatcaacaaggaggaggagagagccggcccctcagccctgctgcccagcagcagcctgtgctcgccctgcccaacgcagacagccagacccagggcggcccctctggcggctctgctcctcccgaaggatgcttggggagtgaggcgaagctgggccgctcctctcccctacagcagcccccttcctccatccctctgttctcctgagccttcaggagcctgcaccagtcctgcctgtccttctactcagctgttacccactctgggaccagcagtctttctgataactgggagagggcagtaaggaggacttcctggagggggtgactgtccagagcctggaactgtgcccacaccagaagccatcagcagcaaggacaccatgcggcttccgggtgcgatgccagctctggccctcaaaggcgagctgctgttgctgtctctcctgttacttctggaaccacagatctctcagggcctggtcgtcacacccccggggccagagcttgtcctcaatgtctccagcaccttcgttctgacctgctcgggttcagctccggtggtgtgggaacggatgtcccaggagcccccacaggaaatggccaaggcccaggatggcaccttctccagcgtgctcacactgaccaacctcactgggctagacacgggagaatacttttgcacccacaatgactcccgtggactggagaccgatgagcggaaacggctctacatctttgtgccagatcccaccgtgggcttcctccctaatgatgccgaggaactattcatctttctcacggaaataactgagatcaccattccatgccgagtaacagacccacagctggtggtgacactgcacgagaagaaaggggacgttgcactgcctgtcccctatgatcaccaacgtggcttttctggtatctttgaggacagaagctacatctgcaaaaccaccattggggacagggaggtggattctgatgcctactatgtctacagactccaggtgtcatccatcaacgtctctgtgaacgcagtgcagactgtggtccgccagggtgagaacatcaccctcatgtgcattgtgatcgggaatgaggtggtcaacttcgagtggacatacccccgcaaagaaagtgggcggctggtggagccggtgactgacttcctcttggatatgccttaccacatccgctccatcctgcacatccccagtgccgagttagaagactcggggacctacacctgcaatgtgacggagagtgtgaatgaccatcaggatgaaaaggccatcaacatcaccgtggttgagagcggctacgtgcggctcctgggagaggtgggcacactacaatttgctgagctgcatcggagccggacactgcaggtagtgttcgaggcctacccaccgcccactgtcctgtggttcaaagacaaccgcaccctgggcgactccagcgctggcgaaatcgccctgtccacgcgcaacgtgtcggagacccggtatgtgtcagagctgacactggttcgcgtgaaggtggcagaggctggccactacaccatgcgggccttccatgaggatgctgaggtccagctctccttccagctacagatcaatgtccctgtccgagtgctggagctaagtgagagccaccctgacagtggggaacagacagtccgctgtcgtggccggggcatgccccagccgaacatcatctggtctgcctgcagagacctcaaaaggtgtccacgtgagctgccgcccacgctgctggggaacagttccgaagaggagagccagctggagactaacgtgacgtactgggaggaggagcaggagtttgaggtggtgagcacactgcgtctgcagcacgtggatcggccactgtcggtgcgctgcacgctgcgcaacgctgtgggccaggacacgcaggaggtcatcgtggtgccacactccttgccctttaaggtggtggtgatctcagccatcctggccctggtggtgctcaccatcatctcccttatcatcctcatcatgctttggcagaagaagccacgttacgagatccgatggaaggtgattgagtctgtgagctctgacggccatgagtacatctacgtggaccccatgcagctgccctatgactccacgtgggagctgccgcgggaccagcttgtgctgggacgcaccctcggctctggggcctttgggcaggtggtggaggccacggctcatggcctgagccattctcaggccacgatgaaagtggccgtcaagatgcttaaatccacagcccgcagcagtgagaagcaagcccttatgtcggagctgaagatcatgagtcaccttgggccccacctgaacgtggtcaacctgttgggggcctgcaccaaaggaggacccatctatatcatcactgagtactgccgctacggagacctggtggactacctgcaccgcaacaaacacaccttcctgcagcaccactccgacaagcgccgcccgcccagcgcggagctctacagcaatgctctgcccgttgggctccccctgcccagccatgtgtccttgaccggggagagcgacggtggctacatggacatgagcaaggacgagtcggtggactatgtgcccatgctggacatgaaaggagacgtcaaatatgcagacatcgagtcctccaactacatggccccttacgataactacgttccctctgcccctgagaggacctgccgagcaactttgatcaacgagtctccagtgctaagctacatggacctcgtgggcttcagctaccaggtggccaatggcatggagtttctggcctccaagaactgcgtccacagagacctggcggctaggaacgtgctcatctgtgaaggcaagctggtcaagatctgtgactttggcctggctcgagacatcatgcgggactcgaattacatctccaaaggcagcacctttttgcctttaaagtggatggctccggagagcatcttcaacagcctctacaccaccctgagcgacgtgtggtccttcgggatcctgctctgggagatcttcaccttgggtggcaccccttacccagagctgcccatgaacgagcagttctacaatgccatcaaacggggttaccgcatggcccagcctgcccatgcctccgacgagatctatgagatcatgcagaagtgctgggaagagaagtttgagattcggccccccttctcccagctggtgctgcttctcgagagactgttgggcgaaggttacaaaaagaagtaccagcaggtggatgaggagtttctgaggagtgaccacccagccatccttcggtcccaggcccgcttgcctgggttccatggcctccgatctcccctggacaccagctccgtcctctatactgccgtgcagcccaatgagggtgacaacgactatatcatccccctgcctgaccccaaacccgaggttgctgacgagggcccactggagggttcccccagcctagccagctccaccctgaatgaagtcaacacctcctcaaccatctcctgtgacagccccctggagccccaggacgaaccagagccagagccccagcttgagctccaggtggagccggagccagagctggaacagttgccggattcggggtgccctgcgcctcgggcggaagcagaggatagcttcctgtagggggctggcccctaccctgccctgcctgaagctccccccctgccagcacccagcatctcctggcctggcctgaccgggcttcctgtcagccaggctgcccttatcagctgtccccttctggaagctttctgctcctgacgtgttgtgccccaaaccctggggctggcttaggaggcaagaaaactgcaggggccgtgaccagccctctgcctccagggaggccaactgactctgagccagggttcccccagggaactcagttttcccatatgtaagatgggaaagttaggcttgatgacccagaatctaggattctctccctggctgacaggtggggagaccgaatccctccctgggaagattcttggagttactgaggtggtaaattaacttttttctgttcagccagctacccctcaaggaatcatagctctctcctcgcacttttatccacccaggagctagggaagagaccctagcctccctggctgctggctgagctagggcctagccttgagcagtgttgcctcatccagaagaaagccagtctcctccctatgatgccagtccctgcgttccctggcccgagctggtctggggccattaggcagcctaattaatgctggaggctgagccaagtacaggacacccccagcctgcagcccttgcccagggcacttggagcacacgcagccatagcaagtgcctgtgtccctgtccttcaggcccatcagtcctggggctttttctttatcaccctcagtcttaatccatccaccagagtctagaaggccagacgggccccgcatctgtgatgagaatgtaaatgtgccagtgtggagtggccacgtgtgtgtgccagtatatggccctggctctgcattggacctgctatgaggctttggaggaatccctcaccctctctgggcctcagtttccccttcaaaaaatgaataagtcggacttattaactctgagtgccttgccagcactaacattctagagtattccaggtggttgcacatttgtccagatgaagcaaggccatataccctaaacttccatcctgggggtcagctgggctcctgggagattccagatcacacatcacactctggggactcaggaaccatgccccttccccaggcccccagcaagtctcaagaacacagctgcacaggccttgacttagagtgacagccggtgtcctggaaagcccccagcagctgccccagggacatgggaagaccacgggacctctttcactacccacgatgacctccgggggtatcctgggcaaaagggacaaagagggcaaatgagatcacctcctgcagcccaccactccagcacctgtgccgaggtctgcgtcgaagacagaatggacagtgaggacagttatgtcttgtaaaagacaagaagcttcagatgggtaccccaagaaggatgtgagaggtgggcgctttggaggtttgcccctcacccaccagctgccccatccctgaggcagcgctccatgggggtatggttttgtcactgcccagacctagcagtgacatctcattgtccccagcccagtgggcattggaggtgccaggggagtcagggttgtagccaagacgcccccgcacggggagggttgggaagggggtgcaggaagctcaacccctctgggcaccaaccctgcattgcaggttggcaccttacttccctgggatccccagagttggtccaaggagggagagtgggttctcaatacggtaccaaagatataatcacctaggtttacaaatatttttaggactcacgttaactcacatttatacagcagaaatgctattttgtatgctgttaagtttttctatctgtgtacttttttttaagggaaagattttaatattaaacctggtgcttctcactcacagactttgtggtctctctcgggtttgggttcctgcccatagggagtgtggagtggggcacatgaggctcacccagacgcagacccccagacaggtcccttcagctctgagtctcattcattcatctgtaaagtggggattttcgctctcccacccctcgctggaagctggggggcctagacttgggcttggtttcccaaggtgggaagcgagcaggcttttctggctccacagagcctggccttgagtcgggcaggagggtgtggggctgcagggctgctccaaggctctggtgctgaggcgtctcactgcctccaccatgtgctttggctttggctatcagctgggacaccctcccctccactccgcccacaggcccggattgaggccggcgtgctctgtgacaggcagctgctagagcccagattccaggtccaggtgagtcatgatcaggccccaggtaggagaagggcagacagagtgtccaaaagcgtgagagcacgaagtgaggagaaggtggagaagagagaagaggaagaggaagaggaagagaggaagcggagggaactgcggccaggctaaaaggggaagaagaggatcagcccaaggaggaggaagaggaaaacaagacaaacagccagtgcagaggagaggaacgtgtgtccagtgtcccgatccctgcggagctagtagctgagagctctgtgccctgggcaccttgcagccctgcacctgcctgccacttccccaccgaggccatgggcccaggagttctgctgctcctgctggtggccacagcttggcatggtcagggaatcccagtgatagagcccagtgtccccgagctggtcgtgaagccaggagcaacggtgaccttgcgatgtgtgggcaatggcagcgtggaatgggatggccccccatcacctcactggaccctgtactctgatggctccagcagcatcctcagcaccaacaacgctaccttccaaaacacggggacctatcgctgcactgagcctggagaccccctgggaggcagcgccgccatccacctctatgtcaaagaccctgcccggccctggaacgtgctagcacaggaggtggtcgtgttcgaggaccaggacgcactactgccctgtctgctcacagacccggtgctggaagcaggcgtctcgctggtgcgtgtgcgtggccggcccctcatgcgccacaccaactactccttctcgccctggcatggcttcaccatccacagggccaagttcattcagagccaggactatcaatgcagtgccctgatgggtggcaggaaggtgatgtccatcagcatccggctgaaagtgcagaaagtcatcccagggcccccagccttgacactggtgcctgcagagctggtgcggattcgaggggaggctgcccagatcgtgtgctcagccagcagcgttgatgttaactttgatgtcttcctccaacacaacaacactaagctcgcaatccctcaacaatctgactttcataataaccgttaccaaaaagtcctgaccctcaacctcgatcaagtagatttccaacatgccggcaactactcctgcgtggccagcaacgtgcagggcaagcactccacctccatgttcttccgggtggtagagagtgcctacttgaacttgagctctgagcagaacctcatccaggaggtgaccgtgggggaggggctcaacctcaaagtcatggtggaggcctacccaggcctgcaaggttttaactggacctacctgggacccttttctgaccaccagcctgagcccaagcttgctaatgctaccaccaaggacacatacaggcacaccttcaccctctctctgccccgcctgaagccctctgaggctggccgctactccttcctggccagaaacccaggaggctggagagctctgacgtttgagctcacccttcgataccccccagaggtaagcgtcatatggacattcatcaacggctctggcacccttttgtgtgctgcctctgggtacccccagcccaacgtgacatggctgcagtgcagtggccacactgataggtgtgatgaggcccaagtgctgcaggtctgggatgacccataccctgaggtcctgagccaggagcccttccacaaggtgacggtgcagagcctgctgactgttgagaccttagagcacaaccaaacctacgagtgcagggcccacaacagcgtggggagtggctcctgggccttcatacccatctctgcaggagcccacacgcatcccccggatgagttcctcttcacaccagtggtggtcgcctgcatgtccatcatggccttgctgctgctgctgctcctgctgctattgtacaagtataagcagaagcccaagtaccaggtccgctggaagatcatcgagagctatgagggcaacagttatactttcatcgaccccacgcagctgccttacaacgagaagtgggagttcccccggaacaacctgcagtttggtaagaccctcggagctggagcctttgggaaggtggtggaggccacggcctttggtctgggcaaggaggatgctgtcctgaaggtggctgtgaagatgctgaagtccacggcccatgctgatgagaaggaggccctcatgtccgagctgaagatcatgagccacctgggccagcacgagaacatcgtcaaccttctgggagcctgtacccatggaggccctgtactggtcatcacggagtactgttgctatggcgacctgctcaactttctgcgaaggaaggctgaggccatgctgggacccagcctgagccccggccaggaccccgagggaggcgtcgactataagaacatccacctcgagaagaaatatgtccgcagggacagtggcttctccagccagggtgtggacacctatgtggagatgaggcctgtctccacttcttcaaatgactccttctctgagcaagacctggacaaggaggatggacggcccctggagctccgggacctgcttcacttctccagccaagtagcccagggcatggccttcctcgcttccaagaattgcatccaccgggacgtggcagcgcgtaacgtgctgttgaccaatggtcatgtggccaagattggggacttcgggctggctagggacatcatgaatgactccaactacattgtcaagggcaatgcccgcctgcctgtgaagtggatggccccagagagcatctttgactgtgtctacacggttcagagcgacgtctggtcctatggcatcctcctctgggagatcttctcacttgggctgaatccctaccctggcatcctggtgaacagcaagttctataaactggtgaaggatggataccaaatggcccagcctgcatttgccccaaagaatatatacagcatcatgcaggcctgctgggccttggagcccacccacagacccaccttccagcagatctgctccttccttcaggagcaggcccaagaggacaggagagagcgggactataccaatctgccgagcagcagcagaagcggtggcagcggcagcagcagcagtgagctggaggaggagagctctagtgagcacctgacctgctgcgagcaaggggatatcgcccagcccttgctgcagcccaacaactatcagttctgctgaggagttgacgacagggagtaccactctcccctcctccaaacttcaactcctccatggatggggcgacacggggagaacatacaaactctgccttcggtcatttcactcaacagctcggcccagctctgaaacttgggaaggtgagggattcaggggaggtcagaggatcccacttcctgagcatgggccatcactgccagtcaggggctgggggctgagccctcaccccccgcctcccctactgttctcatggcatgtggctggccacaccaagcaggaagcacaaactcccccaagctgactcatcctaactaacagtcacgccgtgggatgtctctgtccacattaaactaacagcattaatgcaaaaaaaaaatggttctttgtgccacatgagtacctgcaaattccctggaacgtctttctttccttccctccttcacatgaagtgacgagctcacagctgtggagcttgaccacactgtgccccatacgatgtgcacggaattgactcctgctacaccaaaaccagataatttaataaactttattcttgttgggggaagagggagggaaaaaaagccacctactccactcaataaattaacacatggccaattcccaggccctaaacaaaccttgggcacttgagccagtcctgctgtttccttatggcccagtctgcttccccttcatagaagggagtttttcctactgctgctaggttatgtcatgaccagggaccacatcccctctgtggagagggtcccaggcccagagaggatattggctgcagcagcagtggccagggaaaggaggaaggggatgctcttcctcaaagcttggggtggagaggacagtgctggaagagagctgtggctgactgttcctccctcctcagcttcccccaaatgtgggtacaggaagagcaagagagaaatgcatccctccttcagggagaatcaagagcccaaagggacccctagagttaatgaggccacccaggcccctagtcaaaggcaacaggctaagcaattcatcagactgagggggctgaaaccagggctcctcaggggtgggagagacctcagcagccttcccacctagtgctggggctcacgccttagcccacccaggacctccaccctgacccacaccgcaggccccacggaacccaccagctacgagcctttccctcagcctcccctccattaaacataccgtgtcccccaagtgctctctcggggccagaagaggtttcctggtaccactcctgacccctggagggttgagaactgaggaccctgggtcccaccatgctcagggaatggaagctctttggtcagtcccagcagtcagaggccctccccacaggagaccacttctgcaggtcccctggatagctctgcctcaggcaagggccttactatggcttgagagatggtgtagtccctgtacaacagcctggcttattctgccactgcggccacctcctcttcctcaccctcctcctctgtctctgtcttgatctgagcaacccaaggcggtagagggtgtcacgaatgaccacctcaccaggctggcagctctgtacaatgtcatggatctgacgattgacaatttcgcggctggtgaggaagtccatgaggcggttgtagaggtaatagtgagtggcattgtcgaaggcaatgggccgctggcggacaccgtttggt

SEQ ID NO: 403672 - DNA, 8404 bp, Homo sapiens
tcctgaggctgccagcagccagcagtgactgcccgccctatctgggacccaggatcgctctgtgagcaacttggagccagagaggagatcaacaaggaggaggagagagccggcccctcagccctgctgcccagcagcagcctgtgctcgccctgcccaacgcagacagccagacccagggcggcccctctggcggctctgctcctcccgaaggatgcttggggagtgaggcgaagctgggccgctcctctcccctacagcagcccccttcctccatccctctgttctcctgagccttcaggagcctgcaccagtcctgcctgtccttctactcagctgttacccactctgggaccagcagtctttctgataactgggagagggcagtaaggaggacttcctggagggggtgactgtccagagcctggaactgtgcccacaccagaagccatcagcagcaaggacaccatgcggcttccgggtgcgatgccagctctggccctcaaaggcgagctgctgttgctgtctctcctgttacttctggaaccacagatctctcagggcctggtcgtcacacccccggggccagagcttgtcctcaatgtctccagcaccttcgttctgacctgctcgggttcagctccggtggtgtgggaacggatgtcccaggagcccccacaggaaatggccaaggcccaggatggcaccttctccagcgtgctcacactgaccaacctcactgggctagacacgggagaatacttttgcacccacaatgactcccgtggactggagaccgatgagcggaaacggctctacatctttgtgccagatcccaccgtgggcttcctccctaatgatgccgaggaactattcatctttctcacggaaataactgagatcaccattccatgccgagtaacagacccacagctggtggtgacactgcacgagaagaaaggggacgttgcactgcctgtcccctatgatcaccaacgtggcttttctggtatctttgaggacagaagctacatctgcaaaaccaccattggggacagggaggtggattctgatgcctactatgtctacagactccaggtgtcatccatcaacgtctctgtgaacgcagtgcagactgtggtccgccagggtgagaacatcaccctcatgtgcattgtgatcgggaatgaggtggtcaacttcgagtggacatacccccgcaaagaaagtgggcggctggtggagccggtgactgacttcctcttggatatgccttaccacatccgctccatcctgcacatccccagtgccgagttagaagactcggggacctacacctgcaatgtgacggagagtgtgaatgaccatcaggatgaaaaggccatcaacatcaccgtggttgagagcggctacgtgcggctcctgggagaggtgggcacactacaatttgctgagctgcatcggagccggacactgcaggtagtgttcgaggcctacccaccgcccactgtcctgtggttcaaagacaaccgcaccctgggcgactccagcgctggcgaaatcgccctgtccacgcgcaacgtgtcggagacccggtatgtgtcagagctgacactggttcgcgtgaaggtggcagaggctggccactacaccatgcgggccttccatgaggatgctgaggtccagctctccttccagctacagatcaatgtccctgtccgagtgctggagctaagtgagagccaccctgacagtggggaacagacagtccgctgtcgtggccggggcatgccccagccgaacatcatctggtctgcctgcagagacctcaaaaggtgtccacgtgagctgccgcccacgctgctggggaacagttccgaagaggagagccagctggagactaacgtgacgtactgggaggaggagcaggagtttgaggtggtgagcacactgcgtctgcagcacgtggatcggccactgtcggtgcgctgcacgctgcgcaacgctgtgggccaggacacgcaggaggtcatcgtggtgccacactccttgccctttaaggtggtggtgatctcagccatcctggccctggtggtgctcaccatcatctcccttatcatcctcatcatgctttggcagaagaagccacgttacgagatccgatggaaggtgattgagtctgtgagctctgacggccatgagtacatctacgtggaccccatgcagctgccctatgactccacgtgggagctgccgcgggaccagcttgtgctgggacgcaccctcggctctggggcctttgggcaggtggtggaggccacggctcatggcctgagccattctcaggccacgatgaaagtggccgtcaagatgcttaaatccacagcccgcagcagtgagaagcaagcccttatgtcggagctgaagatcatgagtcaccttgggccccacctgaacgtggtcaacctgttgggggcctgcaccaaaggaggacccatctatatcatcactgagtactgccgctacggagacctggtggactacctgcaccgcaacaaacacaccttcctgcagcaccactccgacaagcgccgcccgcccagcgcggagctctacagcaatgctctgcccgttgggctccccctgcccagccatgtgtccttgaccggggagagcgacggtggctacatggacatgagcaaggacgagtcggtggactatgtgcccatgctggacatgaaaggagacgtcaaatatgcagacatcgagtcctccaactacatggccccttacgataactacgttccctctgcccctgagaggacctgccgagcaactttgatcaacgagtctccagtgctaagctacatggacctcgtgggcttcagctaccaggtggccaatggcatggagtttctggcctccaagaactgcgtccacagagacctggcggctaggaacgtgctcatctgtgaaggcaagctggtcaagatctgtgactttggcctggctcgagacatcatgcgggactcgaattacatctccaaaggcagcacctttttgcctttaaagtggatggctccggagagcatcttcaacagcctctacaccaccctgagcgacgtgtggtccttcgggatcctgctctgggagatcttcaccttgggtggcaccccttacccagagctgcccatgaacgagcagttctacaatgccatcaaacggggttaccgcatggcccagcctgcccatgcctccgacgagatctatgagatcatgcagaagtgctgggaagagaagtttgagattcggccccccttctcccagctggtgctgcttctcgagagactgttgggcgaaggttacaaaaagaagtaccagcaggtggatgaggagtttctgaggagtgaccacccagccatccttcggtcccaggcccgcttgcctgggttccatggcctccgatctcccctggacaccagctccgtcctctatactgccgtgcagcccaatgagggtgacaacgactatatcatccccctgcctgaccccaaacccgaggttgctgacgagggcccactggagggttcccccagcctagccagctccaccctgaatgaagtcaacacctcctcaaccatctcctgtgacagccccctggagccccaggacgaaccagagccagagccccagcttgagctccaggtggagccggagccagagctggaacagttgccggattcggggtgccctgcgcctcgggcggaagcagaggatagcttcctgtagggggctggcccctaccctgccctgcctgaagctccccccctgccagcacccagcatctcctggcctggcctgaccgggcttcctgtcagccaggctgcccttatcagctgtccccttctggaagctttctgctcctgacgtgttgtgccccaaaccctggggctggcttaggaggcaagaaaactgcaggggccgtgaccagccctctgcctccagggaggccaactgactctgagccagggttcccccagggaactcagttttcccatatgtaagatgggaaagttaggcttgatgacccagaatctaggattctctccctggctgacaggtggggagaccgaatccctccctgggaagattcttggagttactgaggtggtaaattaacttttttctgttcagccagctacccctcaaggaatcatagctctctcctcgcacttttatccacccaggagctagggaagagaccctagcctccctggctgctggctgagctagggcctagccttgagcagtgttgcctcatccagaagaaagccagtctcctccctatgatgccagtccctgcgttccctggcccgagctggtctggggccattaggcagcctaattaatgctggaggctgagccaagtacaggacacccccagcctgcagcccttgcccagggcacttggagcacacgcagccatagcaagtgcctgtgtccctgtccttcaggcccatcagtcctggggctttttctttatcaccctcagtcttaatccatccaccagagtctagaaggccagacgggccccgcatctgtgatgagaatgtaaatgtgccagtgtggagtggccacgtgtgtgtgccagtatatggccctggctctgcattggacctgctatgaggctttggaggaatccctcaccctctctgggcctcagtttccccttcaaaaaatgaataagtcggacttattaactctgagtgccttgccagcactaacattctagagtattccaggtggttgcacatttgtccagatgaagcaaggccatataccctaaacttccatcctgggggtcagctgggctcctgggagattccagatcacacatcacactctggggactcaggaaccatgccccttccccaggcccccagcaagtctcaagaacacagctgcacaggccttgacttagagtgacagccggtgtcctggaaagcccccagcagctgccccagggacatgggaagaccacgggacctctttcactacccacgatgacctccgggggtatcctgggcaaaagggacaaagagggcaaatgagatcacctcctgcagcccaccactccagcacctgtgccgaggtctgcgtcgaagacagaatggacagtgaggacagttatgtcttgtaaaagacaagaagcttcagatgggtaccccaagaaggatgtgagaggtgggcgctttggaggtttgcccctcacccaccagctgccccatccctgaggcagcgctccatgggggtatggttttgtcactgcccagacctagcagtgacatctcattgtccccagcccagtgggcattggaggtgccaggggagtcagggttgtagccaagacgcccccgcacggggagggttgggaagggggtgcaggaagctcaacccctctgggcaccaaccctgcattgcaggttggcaccttacttccctgggatccccagagttggtccaaggagggagagtgggttctcaatacggtaccaaagatataatcacctaggtttacaaatatttttaggactcacgttaactcacatttatacagcagaaatgctattttgtatgctgttaagtttttctatctgtgtacttttttttaagggaaagattttaatattaaacctggtgcttctcactcacagactttgtggtctctctcgggtttgggttcctgcccatagggagtgtggagtggggcacatgaggctcacccagacgcagacccccagacaggtcccttcagctctgagtctcattcattcatctgtaaagtggggattttcgctctcccacccctcgctggaagctggggggcctagacttgggcttggtttcccaaggtgggaagcgagcaggcttttctggctccacagagcctggccttgagtcgggcaggagggtgtggggctgcagggctgctccaaggctctggtgctgaggcgtctcactgcctccaccatgtgctttggctttggctatcagctgggacaccctcccctccactccgcccacaggcccggattgaggccggcgtgctctgtgacaggcagctgctagagcccagattccaggtccaggtgagtcatgatcaggccccaggtaggagaagggcagacagagtgtccaaaagcgtgagagcacgaagtgaggagaaggtggagaagagagaagaggaagaggaagaggaagagaggaagcggagggaactgcggccaggctaaaaggggaagaagaggatcagcccaaggaggaggaagaggaaaacaagacaaacagccagtgcagaggagaggaacgtgtgtccagtgtcccgatccctgcggagctagtagctgagagctctgtgccctgggcaccttgcagccctgcacctgcctgccacttccccaccgaggccatgggcccaggagttctgctgctcctgctggtggccacagcttggcatggtcagggaatcccagtgatagagcccagtgtccccgagctggtcgtgaagccaggagcaacggtgaccttgcgatgtgtgggcaatggcagcgtggaatgggatggccccccatcacctcactggaccctgtactctgatggctccagcagcatcctcagcaccaacaacgctaccttccaaaacacggggacctatcgctgcactgagcctggagaccccctgggaggcagcgccgccatccacctctatgtcaaagaccctgcccggccctggaacgtgctagcacaggaggtggtcgtgttcgaggaccaggacgcactactgccctgtctgctcacagacccggtgctggaagcaggcgtctcgctggtgcgtgtgcgtggccggcccctcatgcgccacaccaactactccttctcgccctggcatggcttcaccatccacagggccaagttcattcagagccaggactatcaatgcagtgccctgatgggtggcaggaaggtgatgtccatcagcatccggctgaaagtgcagaaagtcatcccagggcccccagccttgacactggtgcctgcagagctggtgcggattcgaggggaggctgcccagatcgtgtgctcagccagcagcgttgatgttaactttgatgtcttcctccaacacaacaacactaagctcgcaatccctcaacaatctgactttcataataaccgttaccaaaaagtcctgaccctcaacctcgatcaagtagatttccaacatgccggcaactactcctgcgtggccagcaacgtgcagggcaagcactccacctccatgttcttccgggtggtagagagtgcctacttgaacttgagctctgagcagaacctcatccaggaggtgaccgtgggggaggggctcaacctcaaagtcatggtggaggcctacccaggcctgcaaggttttaactggacctacctgggacccttttctgaccaccagcctgagcccaagcttgctaatgctaccaccaaggacacatacaggcacaccttcaccctctctctgccccgcctgaagccctctgaggctggccgctactccttcctggccagaaacccaggaggctggagagctctgacgtttgagctcacccttcgataccccccagaggtaagcgtcatatggacattcatcaacggctctggcacccttttgtgtgctgcctctgggtacccccagcccaacgtgacatggctgcagtgcagtggccacactgataggtgtgatgaggcccaagtgctgcaggtctgggatgacccataccctgaggtcctgagccaggagcccttccacaaggtgacggtgcagagcctgctgactgttgagaccttagagcacaaccaaacctacgagtgcagggcccacaacagcgtggggagtggctcctgggccttcatacccatctctgcaggagcccacacgcatcccccggatgagttcctcttcacaccagtggtggtcgcctgcatgtccatcatggccttgctgctgctgctgctcctgctgctattgtacaagtataagcagaagcccaagtaccaggtccgctggaagatcatcgagagctatgagggcaacagttatactttcatcgaccccacgcagctgccttacaacgagaagtgggagttcccccggaacaacctgcagtttggtaagaccctcggagctggagcctttgggaaggtggtggaggccacggcctttggtctgggcaaggaggatgctgtcctgaaggtggctgtgaagatgctgaagttcacgcccatgctgatgagaaggagccatcatgtcgcgagctgaagagggagcagcataaggatcctctaagtcacc

SEQ ID NO: 403673 - DNA, 2322 bp, Homo sapiens
tgtccctagagcccatggcctccactgcctgcctgcccacacaaagaccatgtgcaatgtgatcagaagctgagaggaccaggccagagggctgtgggagttcagaggtggacggacttttcaggctgaagcccaagtaccaggtccgctggaagatcatcgagagctatgagggcaacagttatactttcatcgaccccacgcagctgccttacaacgagaagtgggagttcccccggaacaacctgcagtttggtgagatggcagctcatcactccacagcttcctatcacagggcctgtgggggttgcagggagcccatgggcccttggacagaggccctttggtgcccaggacttaagggacctgtgtgcgtggcaggtaagaccctcggagctggagcctttgggaaggtggtggaggccacggcctttggtctgggcaaggaggatgctgtcctgaaggtggctgtgaagatgctgaagtccacggcccatgctgatgagaaggaggccctcatgtccgagctgaagatcatgagccacctgggccagcacgagaacatcgtcaaccttctgggagcctgtacccatggaggccctgtactggtcatcacggagtactgttgctatggcgacctgctcaactttctgcgaaggaaggctgaggccatgctgggacccagcctgagccccggccaggaccccgagggaggcgtcgactataagaacatccacctcgagaagaaatatgtccgcagggacagtggcttctccagccagggtgtggacacctatgtggagatgaggcctgtctccacttcttcaaatgactccttctctgagcaagacctggacaaggaggatggacggcccctggagctccgggacctgcttcacttctccagccaagtagcccagggcatggccttcctcgcttccaagaattgcatccaccgggacgtggcagcgcgtaacgtgctgttgaccaatggtcatgtggccaagattggggacttcgggctggctagggacatcatgaatgactccaactacattgtcaagggcaatgcccgcctgcctgtgaagtggatggccccagagagcatctttgactgtgtctacacggttcagagcgacgtctggtcctatggcatcctcctctgggagatcttctcacttgggctgaatccctaccctggcatcctggtgaacagcaagttctataaactggtgaaggatggataccaaatggcccagcctgcatttgccccaaagaatatatacagcatcatgcaggcctgctgggccttggagcccacccacagacccaccttccagcagatctgctccttccttcaggagcaggcccaagaggacaggagagagcgggactataccaatctgccgagcagcagcagaagcggtggcagcggcagcagcagcagtgagctggaggaggagagctctagtgagcacctgacctgctgcgagcaaggggatatcgcccagcccttgctgcagcccaacaactatcagttctgctgaggagttgacgacagggagtaccactctcccctcctccaaacttcaactcctccatggatggggcgacacggggagaacatacaaactctgccttcggtcatttcactcaacagctcggcccagctctgaaacttgggaaggtgagggattcaggggaggtcagaggatcccacttcctgagcatgggccatcactgccagtcaggggctgggggctgagccctcaccccccgcctcccctactgttctcatggtgttggcctcgtgtttgctatgccaactagtagaaccttctttcctaatccccttatcttcatggaaatggactgactttatgcctatgaagtccccaggagctacactgatactgagaaaaccaggctctttggggctagacagactggcagagagtgagatctccctctctgagaggagcagcagatgctcacagaccacactcagctcaggccccttggagcaggatggctcctctaagaatctcacaggacctcttagtctctgccctatacgccgccttcactccacagcctcacccctcccacccccatactggtactgctgtaatgagccaagtggcagctaaaagttgggggtgttctgcccagtcccgtcattctgggctagaaggcaggggaccttggcatgtggctggccacaccaagcaggaagcacaaactcccccaagctgactcatcctaactaacagtcacgccgtgggatgtctctgtccacattaaactaacagcattaatgca

SEQ ID NO: 403674 - DNA, 1456 bp, Homo sapiens
  misc_feature (25)..(25): n is a, c, g, or t
aagcaggcggtacggcctggcgtanggatatgggatctcactatgttgtccaggctggtctggaactcctggccttatgcaatcctcctgcatcaacctcccaaagtgttgggattacaggaatgagccactgcacctgtccctaaacagacttttaagagatcgttattacagttaccctgaggataccaaaatggcctcatctgtcagaatgagggtgatgagagtacccttctgcaagggttactgtgaggattaaatggtaaagcatgccaaggacttggcataggttttatactaaacttactttgactgggtttggggacctctgctgggtaggtctctctaggggtgtgtgttaatggcccctggaccctagggagctgcccatgggcatcctctgtcctatctcccagatacagcatcatgcaggcctgctgggccttggagcccacccacagacccaccttccagcagatctgctccttccttcaggagcaggcccaagaggacaggagagagcgggactataccaatctgccgagcagcagcagaagcggtggcagcggcagcagcagcagtgagctggaggaggagagctctagtgagcacctgacctgctgcgagcaaggggatatcgcccagcccttgctgcagcccaacaactatcagttctgctgaggagttgacgacagggagtaccactctcccctcctccaaacttcaactcctccatggatggggcgacacggggagaacatacaaactctgccttcggtcatttcactcaacagctcggcccagctctgaaacttgggaaggtgagggattcaggggaggtcagaggatcccacttcctgagcatgggccatcactgccagtcaggggctgggggctgagccctcaccccccgcctcccctactgttctcatggtgttggcctcgtgtttgctatgccaactagtagaaccttctttcctaatccccttatcttcatggaaatggactgactttatgcctatgaagtccccaggagctacactgatactgagaaaaccaggctctttggggctagacagactggcagagagtgagatctccctctctgagaggagcagcagatgctcacagaccacactcagctcaggccccttggagcaggatggctcctctaagaatctcacaggacctcttagtctctgccctatacgccgccttcactccacagcctcacccctcccacccccatactggtactgctgtaatgagccaagtggcagctaaaagttgggggtgttctgcccagtcccgtcattctgggctagaaggcaggggaccttggcatgtggctggccacaccaagcaggaagcacaaactcccccaagctgactcatcctaactaacagtcacgccgtgggatgtctctgtccacattaaactaacagcattaatgca

SEQ ID NO: 403675 - DNA, 5199 bp, Homo sapiens
tcctgaggctgccagcagccagcagtgactgcccgccctatctgggacccaggatcgctctgtgagcaacttggagccagagaggagatcaacaaggaggaggagagagccggcccctcagccctgctgcccagcagcagcctgtgctcgccctgcccaacgcagacagccagacccagggcggcccctctggcggctctgctcctcccgaaggatgcttggggagtgaggcgaagctgggccgctcctctcccctacagcagcccccttcctccatccctctgttctcctgagccttcaggagcctgcaccagtcctgcctgtccttctactcagctgttacccactctgggaccagcagtctttctgataactgggagagggcagtaaggaggacttcctggagggggtgactgtccagagcctggaactgtgcccacaccagaagccatcagcagcaaggacaccatgcggcttccgggtgcgatgccagctctggccctcaaaggcgagctgctgttgctgtctctcctgttacttctggaaccacagatctctcagggcctggtcgtcacacccccggggccagagcttgtcctcaatgtctccagcaccttcgttctgacctgctcgggttcagctccggtggtgtgggaacggatgtcccaggagcccccacaggaaatggccaaggcccaggatggcaccttctccagcgtgctcacactgaccaacctcactgggctagacacgggagaatacttttgcacccacaatgactcccgtggactggagaccgatgagcggaaacggctctacatctttgtgccagatcccaccgtgggcttcctccctaatgatgccgaggaactattcatctttctcacggaaataactgagatcaccattccatgccgagtaacagacccacagctggtggtgacactgcacgagaagaaaggggacgttgcactgcctgtcccctatgatcaccaacgtggcttttctggtatctttgaggacagaagctacatctgcaaaaccaccattggggacagggaggtggattctgatgcctactatgtctacagactccaggtgtcatccatcaacgtctctgtgaacgcagtgcagactgtggtccgccagggtgagaacatcaccctcatgtgcattgtgatcgggaatgaggtggtcaacttcgagtggacatacccccgcaaagaaagtgggcggctggtggagccggtgactgacttcctcttggatatgccttaccacatccgctccatcctgcacatccccagtgccgagttagaagactcggggacctacacctgcaatgtgacggagagtgtgaatgaccatcaggatgaaaaggccatcaacatcaccgtggttgagagcggctacgtgcggctcctgggagaggtgggcacactacaatttgctgagctgcatcggagccggacactgcaggtagtgttcgaggcctacccaccgcccactgtcctgtggttcaaagacaaccgcaccctgggcgactccagcgctggcgaaatcgccctgtccacgcgcaacgtgtcggagacccggtatgtgtcagagctgacactggttcgcgtgaaggtggcagaggctggccactacaccatgcgggccttccatgaggatgctgaggtccagctctccttccagctacagatcaatgtccctgtccgagtgctggagctaagtgagagccaccctgacagtggggaacagacagtccgctgtcgtggccggggcatgccccagccgaacatcatctggtctgcctgcagagacctcaaaaggtgtccacgtgagctgccgcccacgctgctggggaacagttccgaagaggagagccagctggagactaacgtgacgtactgggaggaggagcaggagtttgaggtggtgagcacactgcgtctgcagcacgtggatcggccactgtcggtgcgctgcacgctgcgcaacgctgtgggccaggacacgcaggaggtcatcgtggtgccacactccttgccctttaaggtggtggtgatctcagccatcctggccctggtggtgctcaccatcatctcccttatcatcctcatcatgctttggcagaagaagccacgttacgagatccgatggaaggtgattgagtctgtgagctctgacggccatgagtacatctacgtggaccccatgcagctgccctatgactccacgtgggagctgccgcgggaccagcttgtgctgggacgcaccctcggctctggggcctttgggcaggtggtggaggccacggctcatggcctgagccattctcaggccacgatgaaagtggccgtcaagatgcttaaatccacagcccgcagcagtgagaagcaagcccttatgtcggagctgaagatcatgagtcaccttgggccccacctgaacgtggtcaacctgttgggggcctgcaccaaaggaggacccatctatatcatcactgagtactgccgctacggagacctggtggactacctgcaccgcaacaaacacaccttcctgcagcaccactccgacaagcgccgcccgcccagcgcggagctctacagcaatgctctgcccgttgggctccccctgcccagccatgtgtccttgaccggggagagcgacggtggctacatggacatgagcaaggacgagtcggtggactatgtgcccatgctggacatgaaaggagacgtcaaatatgcagacatcgagtcctccaactacatggccccttacgataactacgttccctctgcccctgagaggacctgccgagcaactttgatcaacgagtctccagtgctaagctacatggacctcgtgggcttcagctaccaggtggccaatggcatggagtttctggcctccaagaactgcgtccacagagacctggcggctaggaacgtgctcatctgtgaaggcaagctggtcaagatctgtgactttggcctggctcgagacatcatgcgggactcgaattacatctccaaaggcagcacctttttgcctttaaagtggatggctccggagagcatcttcaacagcctctacaccaccctgagcgacgtgtggtccttcgggatcctgctctgggagatcttcaccttgggtggcaccccttacccagagctgcccatgaacgagcagttctacaatgccatcaaacggggttaccgcatggcccagcctgcccatgcctccgacgagatctatgagatcatgcagaagtgctgggaagagaagtttgagattcggccccccttctcccagctggtgctgcttctcgagagactgttgggcgaaggttacaaaaagaagtaccagcaggtggatgaggagtttctgaggagtgaccacccagccatccttcggtcccaggcccgcttgcctgggttccatggcctccgatctcccctggacaccagctccgtcctctatactgccgtgcagcccaatgagggtgacaacgactatatcatccccctgcctgaccccaaacccgaggttgctgacgagggcccactggagggttcccccagcctagccagctccaccctgaatgaagtcaacacctcctcaaccatctcctgtgacagccccctggagccccaggacgaaccagagccagagccccagcttgagctccaggtggagccggagccagagctggaacagttgccggattcggggtgccctgcgcctcgggcggaagcagaggatagcttcctgtagggggctggcccctaccctgccctgcctgaagctccccccctgccagcacccagcatctcctggcctggcctgaccgggcttcctgtcagccaggctgcccttatcagctgtccccttctggaagctttctgctcctgacgtgttgtgccccaaaccctggggctggcttaggaggcaagaaaactgcaggggccgtgaccagccctctgcctccagggaggccaactgactctgagccagggttcccccagggaactcagttttcccatatgtaagatgggaaagttaggcttgatgacccagaatctaggattctctccctggctgacaggtggggagaccgaatccctccctgggaagattcttggagttactgaggtggtaaattaacttttttctgttcagccagctacccctcaaggaatcatagctctctcctcgcacttttatccacccaggagctagggaagagaccctagcctccctggctgctggctgagctagggcctagccttgagcagtgttgcctcatccagaagaaagccagtctcctccctatgatgccagtccctgcgttccctggcccgagctggtctggggccattaggcagcctaattaatgctggaggctgagccaagtacaggacacccccagcctgcagcccttgcccagggcacttggagcacacgcagccatagcaagtgcctgtgtccctgtccttcaggcccatcagtcctggggctttttctttatcaccctcagtcttaatccatccaccagagtctagaaggccagacgggccccgcatctgtgatgagaatgtaaatgtgccagtgtggagtggccacgtgtgtgtgccagtatatggccctggctctgcattggacctgctatgaggctttggaggaatccctcaccctctctgggcctcagtttccccttcaaaaaatgaataagtcggacttattaactctgagtgccttgccagcactaacattctagagtattccaggtggttggtcactgcccagacctagcagtgacatctcattgtccccagcccagtgggcattggaggtgccaggggagtcagggttgtagccaagacgcccccgcacggggagggttgggaagggggtgcaggaagctcaacccctctgggcaccaaccctgcattgcaggttggcaccttacttccctgggatccccagagttggtccaaggagggagagtgggttctcaatacggtaccaaagatataatcacctaggtttacaaatatttttaggactcacgttaactcacatttatacagcagaaatgctattttgtatgctgttaagtttttctatctgtgtacttttttttaagggaaagattttaatattaaacctggtgcttctcactca

SEQ ID NO: 403676 - DNA, 816 bp, Homo sapiens
ctgggtgacctagagtatccccgatttgacgcttctgctgaggagttgacgacagggagtaccactctcccctcctccaaacttcaactcctccatggatggggcgacacggggagaacatacaaactctgccttcggtcatttcactcaacagctcggcccagctctgaaacttgggaaggtgagggattcaggggaggtcagaggatcccacttcctgagcatgggccatcactgccagtcaggggctgggggctgagccctcaccccccgcctcccctactgttctcatggtgttggcctcgtgtttgctatgccaactagtagaaccttctttcctaatccccttatcttcatggaaatggactgactttatgcctatgaagtccccaggagctacactgatactgagaaaaccaggctctttggggctagacagactggcagagagtgagatctccctctctgagaggagcagcagatgctcacagaccacactcagctcaggccccttggagcaggatggctcctctaagaatctcacaggacctcttagtctctgccctatacgccgccttcactccacagcctcacccctcccacccccatactggtactgctgtaatgagccaagtggcagctaaaagttgggggtgttctgcccagtcccgtcattctgggctagaaggcaggggaccttggcatgtggctggccacaccaagcaggaagcacaaactcccccaagctgactcatcctaactaacagtcacgccgtgggatgtctctgtccacattaaactaacagcattaatgca

SEQ ID NO: 403677 - DNA, 5007 bp, Homo sapiens
tcctgaggctgccagcagccagcagtgactgcccgccctatctgggacccaggatcgctctgtgagcaacttggagccagagaggagatcaacaaggaggaggagagagccggcccctcagccctgctgcccagcagcagcctgtgctcgccctgcccaacgcagacagccagacccagggcggcccctctggcggctctgctcctcccgaaggatgcttggggagtgaggcgaagctgggccgctcctctcccctacagcagcccccttcctccatccctctgttctcctgagccttcaggagcctgcaccagtcctgcctgtccttctactcagctgttacccactctgggaccagcagtctttctgataactgggagagggcagtaaggaggacttcctggagggggtgactgtccagagcctggaactgtgcccacaccagaagccatcagcagcaaggacaccatgcggcttccgggtgcgatgccagctctggccctcaaaggcgagctgctgttgctgtctctcctgttacttctggaaccacagatctctcagggcctggtcgtcacacccccggggccagagcttgtcctcaatgtctccagcaccttcgttctgacctgctcgggttcagctccggtggtgtgggaacggatgtcccaggagcccccacaggaaatggccaaggcccaggatggcaccttctccagcgtgctcacactgaccaacctcactgggctagacacgggagaatacttttgcacccacaatgactcccgtggactggagaccgatgagcggaaacggctctacatctttgtgccagatcccaccgtgggcttcctccctaatgatgccgaggaactattcatctttctcacggaaataactgagatcaccattccatgccgagtaacagacccacagctggtggtgacactgcacgagaagaaaggggacgttgcactgcctgtcccctatgatcaccaacgtggcttttctggtatctttgaggacagaagctacatctgcaaaaccaccattggggacagggaggtggattctgatgcctactatgtctacagactccaggtgtcatccatcaacgtctctgtgaacgcagtgcagactgtggtccgccagggtgagaacatcaccctcatgtgcattgtgatcgggaatgaggtggtcaacttcgagtggacatacccccgcaaagaaagtgggcggctggtggagccggtgactgacttcctcttggatatgccttaccacatccgctccatcctgcacatccccagtgccgagttagaagactcggggacctacacctgcaatgtgacggagagtgtgaatgaccatcaggatgaaaaggccatcaacatcaccgtggttgagagcggctacgtgcggctcctgggagaggtgggcacactacaatttgctgagctgcatcggagccggacactgcaggtagtgttcgaggcctacccaccgcccactgtcctgtggttcaaagacaaccgcaccctgggcgactccagcgctggcgaaatcgccctgtccacgcgcaacgtgtcggagacccggtatgtgtcagagctgacactggttcgcgtgaaggtggcagaggctggccactacaccatgcgggccttccatgaggatgctgaggtccagctctccttccagctacagatcaatgtccctgtccgagtgctggagctaagtgagagccaccctgacagtggggaacagacagtccgctgtcgtggccggggcatgccccagccgaacatcatctggtctgcctgcagagacctcaaaaggtgtccacgtgagctgccgcccacgctgctggggaacagttccgaagaggagagccagctggagactaacgtgacgtactgggaggaggagcaggagtttgaggtggtgagcacactgcgtctgcagcacgtggatcggccactgtcggtgcgctgcacgctgcgcaacgctgtgggccaggacacgcaggaggtcatcgtggtgccacactccttgccctttaaggtggtggtgatctcagccatcctggccctggtggtgctcaccatcatctcccttatcatcctcatcatgctttggcagaagaagccacgttacgagatccgatggaaggtgattgagtctgtgagctctgacggccatgagtacatctacgtggaccccatgcagctgccctatgactccacgtgggagctgccgcgggaccagcttgtgctgggacgcaccctcggctctggggcctttgggcaggtggtggaggccacggctcatggcctgagccattctcaggccacgatgaaagtggccgtcaagatgcttaaatccacagcccgcagcagtgagaagcaagcccttatgtcggagctgaagatcatgagtcaccttgggccccacctgaacgtggtcaacctgttgggggcctgcaccaaaggaggacccatctatatcatcactgagtactgccgctacggagacctggtggactacctgcaccgcaacaaacacaccttcctgcagcaccactccgacaagcgccgcccgcccagcgcggagctctacagcaatgctctgcccgttgggctccccctgcccagccatgtgtccttgaccggggagagcgacggtggctacatggacatgagcaaggacgagtcggtggactatgtgcccatgctggacatgaaaggagacgtcaaatatgcagacatcgagtcctccaactacatggccccttacgataactacgttccctctgcccctgagaggacctgccgagcaactttgatcaacgagtctccagtgctaagctacatggacctcgtgggcttcagctaccaggtggccaatggcatggagtttctggcctccaagaactgcgtccacagagacctggcggctaggaacgtgctcatctgtgaaggcaagctggtcaagatctgtgactttggcctggctcgagacatcatgcgggactcgaattacatctccaaaggcagcacctttttgcctttaaagtggatggctccggagagcatcttcaacagcctctacaccaccctgagcgacgtgtggtccttcgggatcctgctctgggagatcttcaccttgggtggcaccccttacccagagctgcccatgaacgagcagttctacaatgccatcaaacggggttaccgcatggcccagcctgcccatgcctccgacgagatctatgagatcatgcagaagtgctgggaagagaagtttgagattcggccccccttctcccagctggtgctgcttctcgagagactgttgggcgaaggttacaaaaagaagtaccagcaggtggatgaggagtttctgaggagtgaccacccagccatccttcggtcccaggcccgcttgcctgggttccatggcctccgatctcccctggacaccagctccgtcctctatactgccgtgcagcccaatgagggtgacaacgactatatcatccccctgcctgaccccaaacccgaggttgctgacgagggcccactggagggttcccccagcctagccagctccaccctgaatgaagtcaacacctcctcaaccatctcctgtgacagccccctggagccccaggacgaaccagagccagagccccagcttgagctccaggtggagccggagccagagctggaacagttgccggattcggggtgccctgcgcctcgggcggaagcagaggatagcttcctgtagggggctggcccctaccctgccctgcctgaagctccccccctgccagcacccagcatctcctggcctggcctgaccgggcttcctgtcagccaggctgcccttatcagctgtccccttctggaagctttctgctcctgacgtgttgtgccccaaaccctggggctggcttaggaggcaagaaaactgcaggggccgtgaccagccctctgcctccagggaggccaactgactctgagccagggttcccccagggaactcagttttcccatatgtaagatgggaaagttaggcttgatgacccagaatctaggattctctccctggctgacaggtggggagaccgaatccctccctgggaagattcttggagttactgaggtggtaaattaacttttttctgttcagccagctacccctcaaggaatcatagctctctcctcgcacttttatccacccaggagctagggaagagaccctagcctccctggctgctggctgagctagggcctagccttgagcagtgttgcctcatccagaagaaagccagtctcctccctatgatgccagtccctgcgttccctggcccgagctggtctggggccattaggcagcctaattaatgctggaggctgagccaagtacaggacacccccagcctgcagcccttgcccagggcacttggagcacacgcagccatagcaagtgcctgtgtccctgtccttcaggcccatcagtcctggggctttttctttatcaccctcagtcttaatccatccaccagagtctagaaggccagacgggccccgcatctgtgatgagaatgtaaatgtgccagtgtggagtggccacgtgtgtgtgccagtatatggccctggctctgcattggacctgctatgaggctttggaggaatccctcaccctctctgggcctcagtttccccttcaaaaaatgaataagtcggacttattaactctgagtgccttgccagcactaacattctagagtattccaggtggttgagttggtccaaggagggagagtgggttctcaatacggtaccaaagatataatcacctaggtttacaaatatttttaggactcacgttaactcacatttatacagcagaaatgctattttgtatgctgttaagtttttctatctgtgtacttttttttaagggaaagattttaatattaaacctggtgcttctcactca

SEQ ID NO: 403678 - DNA, 444 bp, Homo sapiens
  misc_feature (32)..(32): n is a, c, g, or t
atcaggacaccagtctttgctctttggggtcnttactgagaaaaccaggctctttggggctagacagactggcagagagtgagatctccctctctgagaggagcagcagatgctcacagaccacactcagctcaggccccttggagcaggatggctcctctaagaatctcacaggacctcttagtctctgccctatacgccgccttcactccacagcctcacccctcccacccccatactggtactgctgtaatgagccaagtggcagctaaaagttgggggtgttctgcccagtcccgtcattctgggctagaaggcaggggaccttggcatgtggctggccacaccaagcaggaagcacaaactcccccaagctgactcatcctaactaacagtcacgccgtgggatgtctctgtccacattaaactaacagcattaatgca

SEQ ID NO: 403679 - DNA, 3173 bp, Homo sapiens
tcctgaggctgccagcagccagcagtgactgcccgccctatctgggacccaggatcgctctgtgagcaacttggagccagagaggagatcaacaaggaggaggagagagccggcccctcagccctgctgcccagcagcagcctgtgctcgccctgcccaacgcagacagccagacccagggcggcccctctggcggctctgctcctcccgaaggatgcttggggagtgaggcgaagctgggccgctcctctcccctacagcagcccccttcctccatccctctgttctcctgagccttcaggagcctgcaccagtcctgcctgtccttctactcagctgttacccactctgggaccagcagtctttctgataactgggagagggcagtaaggaggacttcctggagggggtgactgtccagagcctggaactgtgcccacaccagaagccatcagcagcaaggacaccatgcggcttccgggtgcgatgccagctctggccctcaaaggcgagctgctgttgctgtctctcctgttacttctggaaccacagatctctcagggcctggtcgtcacacccccggggccagagcttgtcctcaatgtctccagcaccttcgttctgacctgctcgggttcagctccggtggtgtgggaacggatgtcccaggagcccccacaggaaatggccaaggcccaggatggcaccttctccagcgtgctcacactgaccaacctcactgggctagacacgggagaatacttttgcacccacaatgactcccgtggactggagaccgatgagcggaaacggctctacatctttgtgccagatcccaccgtgggcttcctccctaatgatgccgaggaactattcatctttctcacggaaataactgagatcaccattccatgccgagtaacagacccacagctggtggtgacactgcacgagaagaaaggggacgttgcactgcctgtcccctatgatcaccaacgtggcttttctggtatctttgaggacagaagctacatctgcaaaaccaccattggggacagggaggtggattctgatgcctactatgtctacagactccaggtgtcatccatcaacgtctctgtgaacgcagtgcagactgtggtccgccagggtgagaacatcaccctcatgtgcattgtgatcgggaatgaggtggtcaacttcgagtggacatacccccgcaaagaaagtgggcggctggtggagccggtgactgacttcctcttggatatgccttaccacatccgctccatcctgcacatccccagtgccgagttagaagactcggggacctacacctgcaatgtgacggagagtgtgaatgaccatcaggatgaaaaggccatcaacatcaccgtggttgagagcggctacgtgcggctcctgggagaggtgggcacactacaatttgctgagctgcatcggagccggacactgcaggtagtgttcgaggcctacccaccgcccactgtcctgtggttcaaagacaaccgcaccctgggcgactccagcgctggcgaaatcgccctgtccacgcgcaacgtgtcggagacccggtatgtgtcagagctgacactggttcgcgtgaaggtggcagaggctggccactacaccatgcgggccttccatgaggatgctgaggtccagctctccttccagctacagatcaatgtccctgtccgagtgctggagctaagtgagagccaccctgacagtggggaacagacagtccgctgtcgtggccggggcatgccccagccgaacatcatctggtctgcctgcagagacctcaaaaggtgtccacgtgagctgccgcccacgctgctggggaacagttccgaagaggagagccagctggagactaacgtgacgtactgggaggaggagcaggagtttgaggtggtgagcacactgcgtctgcagcacgtggatcggccactgtcggtgcgctgcacgctgcgcaacgctgtgggccaggacacgcaggaggtcatcgtggtgccacactccttgccctttaaggtggtggtgatctcagccatcctggccctggtggtgctcaccatcatctcccttatcatcctcatcatgctttggcagaagaagccacgttacgagatccgatggaaggtgattgagtctgtgagctctgacggccatgagtacatctacgtggaccccatgcagctgccctatgactccacgtgggagctgccgcgggaccagcttgtgctgggacgcaccctcggctctggggcctttgggcaggtggtggaggccacggctcatggcctgagccattctcaggccacgatgaaagtggccgtcaagatgcttaaatccacagcccgcagcagtgagaagcaagcccttatgtcggagctgaagatcatgagtcaccttgggccccacctgaacgtggtcaacctgttgggggcctgcaccaaaggaggacccatctatatcatcactgagtactgccgctacggagacctggtggactacctgcaccgcaacaaacacaccttcctgcagcaccactccgacaagcgccgcccgcccagcgcggagctctacagcaatgctctgcccgttgggctccccctgcccagccatgtgtccttgaccggggagagcgacggtggctacatggacatgagcaaggacgagtcggtggactatgtgcccatgctggacatgaaaggagacgtcaaatatgcagacatcgagtcctccaactacatggccccttacgataactacgttccctctgcccctgagaggacctgccgagcaactttgatcaacgagtctccagtgctaagctacatggacctcgtgggcttcagctaccaggtggccaatggcatggagtttctggcctccaagaactgcgtccacagagacctggcggctaggaacgtgctcatctgtgaaggcaagctggtcaagatctgtgactttggcctggctcgagacatcatgcgggactcgaattacatctccaaaggcagcacctttttgccagatttcttgattccacctgtggccaagggccccttccccgcggccttcgcttttagctcctcgagtttcttctgctcctcttttggtttctgcttgaaagccttatc

SEQ ID NO: 403680 - DNA, 2261 bp, Homo sapiens
tcctgaggctgccagcagccagcagtgactgcccgccctatctgggacccaggatcgctctgtgagcaacttggagccagagaggagatcaacaaggaggaggagagagccggcccctcagccctgctgcccagcagcagcctgtgctcgccctgcccaacgcagacagccagacccagggcggcccctctggcggctctgctcctcccgaaggatgcttggggagtgaggcgaagctgggccgctcctctcccctacagcagcccccttcctccatccctctgttctcctgagccttcaggagcctgcaccagtcctgcctgtccttctactcagctgttacccactctgggaccagcagtctttctgataactgggagagggcagtaaggaggacttcctggagggggtgactgtccagagcctggaactgtgcccacaccagaagccatcagcagcaaggacaccatgcggcttccgggtgcgatgccagctctggccctcaaaggcgagctgctgttgctgtctctcctgttacttctggaaccacagatctctcagggcctggtcgtcacacccccggggccagagcttgtcctcaatgtctccagcaccttcgttctgacctgctcgggttcagctccggtggtgtgggaacggatgtcccaggagcccccacaggaaatggccaaggcccaggatggcaccttctccagcgtgctcacactgaccaacctcactgggctagacacgggagaatacttttgcacccacaatgactcccgtggactggagaccgatgagcggaaacggctctacatctttgtgccagatcccaccgtgggcttcctccctaatgatgccgaggaactattcatctttctcacggaaataactgagatcaccattccatgccgagtaacagacccacagctggtggtgacactgcacgagaagaaaggggacgttgcactgcctgtcccctatgatcaccaacgtggcttttctggtatctttgaggacagaagctacatctgcaaaaccaccattggggacagggaggtggattctgatgcctactatgtctacagactccaggtgtcatccatcaacgtctctgtgaacgcagtgcagactgtggtccgccagggtgagaacatcaccctcatgtgcattgtgatcgggaatgaggtggtcaacttcgagtggacatacccccgcaaagaaagtgggcggctggtggagccggtgactgacttcctcttggatatgccttaccacatccgctccatcctgcacatccccagtgccgagttagaagactcggggacctacacctgcaatgtgacggagagtgtgaatgaccatcaggatgaaaaggccatcaacatcaccgtggttgagagcggctacgtgcggctcctgggagaggtgggcacactacaatttgctgagctgcatcggagccggacactgcaggtagtgttcgaggcctacccaccgcccactgtcctgtggttcaaagacaaccgcaccctgggcgactccagcgctggcgaaatcgccctgtccacgcgcaacgtgtcggagacccggtatgtgtcagagctgacactggttcgcgtgaaggtggcagaggctggccactacaccatgcgggccttccatgaggatgctgaggtccagctctccttccagctacagatcaatggtgatgagcacgcccctcgccatgtccctgctccttcccctccctgcccccgttccctctcccttcctgcactgtccacccacccatgggaggagtgggagagggagcctggaactcaggagatggattctaggccactgacccactgccgtgtgaacctggcctctgggcctcagtttccccagctgtataaggaggccatctggctagattggtgtttccaaaacttcaggcacttaggtaccaaggccatgattttcccttctcacattccacttatactgtactattaactcgataggtatttattgagcaactaccatatgcctgtctcttcaaggttcttgaacttccctccctgcctttgtgcagcttgcatccaagtaggggaagacaaacactaacagtagggaggaaaaccccagcaaattacataggttagaaggtaactaacactgcgggagaggaaaaacaggggccgggtagggaaggttgagagtgctgggcacagagtgatggtgtgagttgcatttttgatacagtgatcagg

SEQ ID NO: 403681 - DNA, 1124 bp, Homo sapiens
tcctgaggctgccagcagccagcagtgactgcccgccctatctgggacccaggatcgctctgtgagcaacttggagccagagaggagatcaacaaggaggaggagagagccggcccctcagccctgctgcccagcagcagcctgtgctcgccctgcccaacgcagacagccagacccagggcggcccctctggcggctctgctcctcccgaaggatgcttggggagtgaggcgaagctgggccgctcctctcccctacagcagcccccttcctccatccctctgttctcctgagccttcaggagcctgcaccagtcctgcctgtccttctactcagctgttacccactctgggaccagcagtctttctgataactgggagagggcagtaaggaggacttcctggagggggtgactgtccagagcctggaactgtgcccacaccagaagccatcagcagcaaggacaccatgcggcttccgggtgcgatgccagctctggccctcaaaggcgagctgctgttgctgtctctcctgttacttctggaaccacagatctctcagggcctggtcgtcacacccccggggccagagcttgtcctcaatgtctccagcaccttcgttctgacctgctcgggttcagctccggtggtgtgggaacggatgtcccaggagcccccacaggaaatggccaaggcccaggatggcaccttctccagcgtgctcacactgaccaacctcactgggctagacacgggagaatacttttgcacccacaatgactcccgtggactggagaccgatgagcggaaacggctctacatctttgtgccagatcccaccgtgggcttcctccctaatgatgccgaggaactattcatctttctcacggaaataactgagatcaccattccatgccgagtaacagacccacagctggtggtgacactgcacgagaagaaaggggacgttgcactgcctgtcccctatgatcaccaacgtggcttttctggtatctttgaggacagaagctacatctgcaaaaccaccattggggacagggaggtggattctgatgcctactatgtctacagactccagggtgagccccctttctggcctgatgc

SEQ ID NO: 403682 - DNA, 340 bp, Homo sapiens
aaaaaacactttcagataagaaaaccaactaaggaaatgggattggtggtttttgcatgtctcaatggcaccctgtctgagtatctggcttacccaaggccgttgggccctgaatattttaccaaaaataaaataaacccctttaaggctgttatctgactgcaatcctggcaggggccatactaggctggggctcaccaacaccacctgattctctcctgcaggcacaccttcaccctctctctgccccgcctgaagccctctgaggctggccgctactccttcctggccagaaacccaggaggctggagagctctgacgtttgagctcacccttcgat

SEQ ID NO: 403683 - DNA, 311 bp, Homo sapiens
aggtggtggaggccacggctcatggcctgagccattctcaggccacgatgaaagtggccgtcaagatgcttaaatgtgagtagtccttggagccctccacatctgggccttcacctctccctgcccctccccacacacttagcctctcccagggtggcctgatgctgatttgcaggcactagaggggccatcacactgcagcaggcactgctcccgagtctgggtctggtttgggaaagagcgttcctctccctggcctcctcggcctgcttccccctaccctggcctcttcccctcctcagagtgtgggt

SEQ ID NO: 403684 - DNA, 433 bp, Homo sapiens
ggcccctcagccctgctgcccagcagcagcctgtgctcgccctgcccaacgcagacagccagacccagggcggcccctctggcggctctgctcctcccgaaggatgcttggggagtgaggcgaagctgggccgctcctctcccctacagcagcccccttcctccatccctctgttctcctgagccttcaggagcctgcaccagtcctgcctgtccttctactcagctgttacccactctgggaccagcagtctttctgataactgggagagggcagtaaggaggacttcctggagggggtgactgtccagagcctggaactgtgcccacaccagaagccatcagcagcaaggtaagtgctggaaaaagtgggaaccccagccccatgccctgtccctttgccctaacctgcatctcttcgagtaggtaaaaaa

SEQ ID NO: 403685 - DNA, 5711 bp, Homo sapiens
tcctgaggctgccagcagccagcagtgactgcccgccctatctgggacccaggatcgctctgtgagcaacttggagccagagaggagatcaacaaggaggaggagagagccggcccctcagccctgctgcccagcagcagcctgtgctcgccctgcccaacgcagacagccagacccagggcggcccctctggcggctctgctcctcccgaaggatgcttggggagtgaggcgaagctgggccgctcctctcccctacagcagcccccttcctccatccctctgttctcctgagccttcaggagcctgcaccagtcctgcctgtccttctactcagctgttacccactctgggaccagcagtctttctgataactgggagagggcagtaaggaggacttcctggagggggtgactgtccagagcctggaactgtgcccacaccagaagccatcagcagcaaggacaccatgcggcttccgggtgcgatgccagctctggccctcaaaggcgagctgctgttgctgtctctcctgttacttctggaaccacagatctctcagggcctggtcgtcacacccccggggccagagcttgtcctcaatgtctccagcaccttcgttctgacctgctcgggttcagctccggtggtgtgggaacggatgtcccaggagcccccacaggaaatggccaaggcccaggatggcaccttctccagcgtgctcacactgaccaacctcactgggctagacacgggagaatacttttgcacccacaatgactcccgtggactggagaccgatgagcggaaacggctctacatctttgtgccagatcccaccgtgggcttcctccctaatgatgccgaggaactattcatctttctcacggaaataactgagatcaccattccatgccgagtaacagacccacagctggtggtgacactgcacgagaagaaaggggacgttgcactgcctgtcccctatgatcaccaacgtggcttttctggtatctttgaggacagaagctacatctgcaaaaccaccattggggacagggaggtggattctgatgcctactatgtctacagactccaggtgtcatccatcaacgtctctgtgaacgcagtgcagactgtggtccgccagggtgagaacatcaccctcatgtgcattgtgatcgggaatgaggtggtcaacttcgagtggacatacccccgcaaagaaagtgggcggctggtggagccggtgactgacttcctcttggatatgccttaccacatccgctccatcctgcacatccccagtgccgagttagaagactcggggacctacacctgcaatgtgacggagagtgtgaatgaccatcaggatgaaaaggccatcaacatcaccgtggttgagagcggctacgtgcggctcctgggagaggtgggcacactacaatttgctgagctgcatcggagccggacactgcaggtagtgttcgaggcctacccaccgcccactgtcctgtggttcaaagacaaccgcaccctgggcgactccagcgctggcgaaatcgccctgtccacgcgcaacgtgtcggagacccggtatgtgtcagagctgacactggttcgcgtgaaggtggcagaggctggccactacaccatgcgggccttccatgaggatgctgaggtccagctctccttccagctacagatcaatgtccctgtccgagtgctggagctaagtgagagccaccctgacagtggggaacagacagtccgctgtcgtggccggggcatgccccagccgaacatcatctggtctgcctgcagagacctcaaaaggtgtccacgtgagctgccgcccacgctgctggggaacagttccgaagaggagagccagctggagactaacgtgacgtactgggaggaggagcaggagtttgaggtggtgagcacactgcgtctgcagcacgtggatcggccactgtcggtgcgctgcacgctgcgcaacgctgtgggccaggacacgcaggaggtcatcgtggtgccacactccttgccctttaaggtggtggtgatctcagccatcctggccctggtggtgctcaccatcatctcccttatcatcctcatcatgctttggcagaagaagccacgttacgagatccgatggaaggtgattgagtctgtgagctctgacggccatgagtacatctacgtggaccccatgcagctgccctatgactccacgtgggagctgccgcgggaccagcttgtgctgggacgcaccctcggctctggggcctttgggcaggtggtggaggccacggctcatggcctgagccattctcaggccacgatgaaagtggccgtcaagatgcttaaatccacagcccgcagcagtgagaagcaagcccttatgtcggagctgaagatcatgagtcaccttgggccccacctgaacgtggtcaacctgttgggggcctgcaccaaaggaggacccatctatatcatcactgagtactgccgctacggagacctggtggactacctgcaccgcaacaaacacaccttcctgcagcaccactccgacaagcgccgcccgcccagcgcggagctctacagcaatgctctgcccgttgggctccccctgcccagccatgtgtccttgaccggggagagcgacggtggctacatggacatgagcaaggacgagtcggtggactatgtgcccatgctggacatgaaaggagacgtcaaatatgcagacatcgagtcctccaactacatggccccttacgataactacgttccctctgcccctgagaggacctgccgagcaactttgatcaacgagtctccagtgctaagctacatggacctcgtgggcttcagctaccaggtggccaatggcatggagtttctggcctccaagaactgcgtccacagagacctggcggctaggaacgtgctcatctgtgaaggcaagctggtcaagatctgtgactttggcctggctcgagacatcatgcgggactcgaattacatctccaaaggcagcacctttttgcctttaaagtggatggctccggagagcatcttcaacagcctctacaccaccctgagcgacgtgtggtccttcgggatcctgctctgggagatcttcaccttgggtggcaccccttacccagagctgcccatgaacgagcagttctacaatgccatcaaacggggttaccgcatggcccagcctgcccatgcctccgacgagatctatgagatcatgcagaagtgctgggaagagaagtttgagattcggccccccttctcccagctggtgctgcttctcgagagactgttgggcgaaggttacaaaaagaagtaccagcaggtggatgaggagtttctgaggagtgaccacccagccatccttcggtcccaggcccgcttgcctgggttccatggcctccgatctcccctggacaccagctccgtcctctatactgccgtgcagcccaatgagggtgacaacgactatatcatccccctgcctgaccccaaacccgaggttgctgacgagggcccactggagggttcccccagcctagccagctccaccctgaatgaagtcaacacctcctcaaccatctcctgtgacagccccctggagccccaggacgaaccagagccagagccccagcttgagctccaggtggagccggagccagagctggaacagttgccggattcggggtgccctgcgcctcgggcggaagcagaggatagcttcctgtagggggctggcccctaccctgccctgcctgaagctccccccctgccagcacccagcatctcctggcctggcctgaccgggcttcctgtcagccaggctgcccttatcagctgtccccttctggaagctttctgctcctgacgtgttgtgccccaaaccctggggctggcttaggaggcaagaaaactgcaggggccgtgaccagccctctgcctccagggaggccaactgactctgagccagggttcccccagggaactcagttttcccatatgtaagatgggaaagttaggcttgatgacccagaatctaggattctctccctggctgacaggtggggagaccgaatccctccctgggaagattcttggagttactgaggtggtaaattaacttttttctgttcagccagctacccctcaaggaatcatagctctctcctcgcacttttatccacccaggagctagggaagagaccctagcctccctggctgctggctgagctagggcctagccttgagcagtgttgcctcatccagaagaaagccagtctcctccctatgatgccagtccctgcgttccctggcccgagctggtctggggccattaggcagcctaattaatgctggaggctgagccaagtacaggacacccccagcctgcagcccttgcccagggcacttggagcacacgcagccatagcaagtgcctgtgtccctgtccttcaggcccatcagtcctggggctttttctttatcaccctcagtcttaatccatccaccagagtctagaaggccagacgggccccgcatctgtgatgagaatgtaaatgtgccagtgtggagtggccacgtgtgtgtgccagtatatggccctggctctgcattggacctgctatgaggctttggaggaatccctcaccctctctgggcctcagtttccccttcaaaaaatgaataagtcggacttattaactctgagtgccttgccagcactaacattctagagtattccaggtggttgcacatttgtccagatgaagcaaggccatataccctaaacttccatcctgggggtcagctgggctcctgggagattccagatcacacatcacactctggggactcaggaaccatgccccttccccaggcccccagcaagtctcaagaacacagctgcacaggccttgacttagagtgacagccggtgtcctggaaagcccccagcagctgccccagggacatgggaagaccacgggacctctttcactacccacgatgacctccgggggtatcctgggcaaaagggacaaagagggcaaatgagatcacctcctgcagcccaccactccagcacctgtgccgaggtctgcgtcgaagacagaatggacagtgaggacagttatgtcttgtaaaagacaagaagcttcagatgggtaccccaagaaggatgtgagaggtgggcgctttggaggtttgcccctcacccaccagctgccccatccctgaggcagcgctccatgggggtatggttttgtcactgcccagacctagcagtgacatctcattgtccccagcccagtgggcattggaggtgccaggggagtcagggttgtagccaagacgcccccgcacggggagggttgggaagggggtgcaggaagctcaacccctctgggcaccaaccctgcattgcaggttggcaccttacttccctgggatccccagagttggtccaaggagggagagtgggttctcaatacggtaccaaagatataatcacctaggtttacaaatatttttaggactcacgttaactcacatttatacagcagaaatgctattttgtatgctgttaagtttttctatctgtgtacttttttttaagggaaagattttaatattaaacctggtgcttctcactca

SEQ ID NO: 403686 - DNA, 7458 bp, Homo sapiens
gtgactctaccggagcttagattcgtagatcatgaaaggagacgtcaaatatgcagacatcgagtcctccaactacatggccccttacgataactacgttccctctgcccctgagaggacctgccgagcaactttgatcaacgagtctccagtgctaagctacatggacctcgtgggcttcagctaccaggtggccaatggcatggagtttctggcctccaagaactgcgtccacagagacctggcggctaggaacgtgctcatctgtgaaggcaagctggtcaagatctgtgactttggcctggctcgagacatcatgcgggactcgaattacatctccaaaggcagcacctttttgcctttaaagtggatggctccggagagcatcttcaacagcctctacaccaccctgagcgacgtgtggtccttcgggatcctgctctgggagatcttcaccttgggtggcaccccttacccagagctgcccatgaacgagcagttctacaatgccatcaaacggggttaccgcatggcccagcctgcccatgcctccgacgagatctatgagatcatgcagaagtgctgggaagagaagtttgagattcggccccccttctcccagctggtgctgcttctcgagagactgttgggcgaaggttacaaaaagaagtaccagcaggtggatgaggagtttctgaggagtgaccacccagccatccttcggtcccaggcccgcttgcctgggttccatggcctccgatctcccctggacaccagctccgtcctctatactgccgtgcagcccaatgagggtgacaacgactatatcatccccctgcctgaccccaaacccgaggttgctgacgagggcccactggagggttcccccagcctagccagctccaccctgaatgaagtcaacacctcctcaaccatctcctgtgacagccccctggagccccaggacgaaccagagccagagccccagcttgagctccaggtggagccggagccagagctggaacagttgccggattcggggtgccctgcgcctcgggcggaagcagaggatagcttcctgtagggggctggcccctaccctgccctgcctgaagctccccccctgccagcacccagcatctcctggcctggcctgaccgggcttcctgtcagccaggctgcccttatcagctgtccccttctggaagctttctgctcctgacgtgttgtgccccaaaccctggggctggcttaggaggcaagaaaactgcaggggccgtgaccagccctctgcctccagggaggccaactgactctgagccagggttcccccagggaactcagttttcccatatgtaagatgggaaagttaggcttgatgacccagaatctaggattctctccctggctgacaggtggggagaccgaatccctccctgggaagattcttggagttactgaggtggtaaattaacttttttctgttcagccagctacccctcaaggaatcatagctctctcctcgcacttttatccacccaggagctagggaagagaccctagcctccctggctgctggctgagctagggcctagccttgagcagtgttgcctcatccagaagaaagccagtctcctccctatgatgccagtccctgcgttccctggcccgagctggtctggggccattaggcagcctaattaatgctggaggctgagccaagtacaggacacccccagcctgcagcccttgcccagggcacttggagcacacgcagccatagcaagtgcctgtgtccctgtccttcaggcccatcagtcctggggctttttctttatcaccctcagtcttaatccatccaccagagtctagaaggccagacgggccccgcatctgtgatgagaatgtaaatgtgccagtgtggagtggccacgtgtgtgtgccagtatatggccctggctctgcattggacctgctatgaggctttggaggaatccctcaccctctctgggcctcagtttccccttcaaaaaatgaataagtcggacttattaactctgagtgccttgccagcactaacattctagagtattccaggtggttgcacatttgtccagatgaagcaaggccatataccctaaacttccatcctgggggtcagctgggctcctgggagattccagatcacacatcacactctggggactcaggaaccatgccccttccccaggcccccagcaagtctcaagaacacagctgcacaggccttgacttagagtgacagccggtgtcctggaaagcccccagcagctgccccagggacatgggaagaccacgggacctctttcactacccacgatgacctccgggggtatcctgggcaaaagggacaaagagggcaaatgagatcacctcctgcagcccaccactccagcacctgtgccgaggtctgcgtcgaagacagaatggacagtgaggacagttatgtcttgtaaaagacaagaagcttcagatgggtaccccaagaaggatgtgagaggtgggcgctttggaggtttgcccctcacccaccagctgccccatccctgaggcagcgctccatgggggtatggttttgtcactgcccagacctagcagtgacatctcattgtccccagcccagtgggcattggaggtgccaggggagtcagggttgtagccaagacgcccccgcacggggagggttgggaagggggtgcaggaagctcaacccctctgggcaccaaccctgcattgcaggttggcaccttacttccctgggatccccagagttggtccaaggagggagagtgggttctcaatacggtaccaaagatataatcacctaggtttacaaatatttttaggactcacgttaactcacatttatacagcagaaatgctattttgtatgctgttaagtttttctatctgtgtacttttttttaagggaaagattttaatattaaacctggtgcttctcactcacagactttgtggtctctctcgggtttgggttcctgcccatagggagtgtggagtggggcacatgaggctcacccagacgcagacccccagacaggtcccttcagctctgagtctcattcattcatctgtaaagtggggattttcgctctcccacccctcgctggaagctggggggcctagacttgggcttggtttcccaaggtgggaagcgagcaggcttttctggctccacagagcctggccttgagtcgggcaggagggtgtggggctgcagggctgctccaaggctctggtgctgaggcgtctcactgcctccaccatgtgctttggctttggctatcagctgggacaccctcccctccactccgcccacaggcccggattgaggccggcgtgctctgtgacaggcagctgctagagcccagattccaggtccaggtgagtcatgatcaggccccaggtaggagaagggcagacagagtgtccaaaagcgtgagagcacgaagtgaggagaaggtggagaagagagaagaggaagaggaagaggaagagaggaagcggagggaactgcggccaggctaaaaggggaagaagaggatcagcccaaggaggaggaagaggaaaacaagacaaacagccagtgcagaggagaggaacgtgtgtccagtgtcccgatccctgcggagctagtagctgagagctctgtgccctgggcaccttgcagccctgcacctgcctgccacttccccaccgaggccatgggcccaggagttctgctgctcctgctggtggccacagcttggcatggtcagggaatcccagtgatagagcccagtgtccccgagctggtcgtgaagccaggagcaacggtgaccttgcgatgtgtgggcaatggcagcgtggaatgggatggccccccatcacctcactggaccctgtactctgatggctccagcagcatcctcagcaccaacaacgctaccttccaaaacacggggacctatcgctgcactgagcctggagaccccctgggaggcagcgccgccatccacctctatgtcaaagaccctgcccggccctggaacgtgctagcacaggaggtggtcgtgttcgaggaccaggacgcactactgccctgtctgctcacagacccggtgctggaagcaggcgtctcgctggtgcgtgtgcgtggccggcccctcatgcgccacaccaactactccttctcgccctggcatggcttcaccatccacagggccaagttcattcagagccaggactatcaatgcagtgccctgatgggtggcaggaaggtgatgtccatcagcatccggctgaaagtgcagaaagtcatcccagggcccccagccttgacactggtgcctgcagagctggtgcggattcgaggggaggctgcccagatcgtgtgctcagccagcagcgttgatgttaactttgatgtcttcctccaacacaacaacactaagctcgcaatccctcaacaatctgactttcataataaccgttaccaaaaagtcctgaccctcaacctcgatcaagtagatttccaacatgccggcaactactcctgcgtggccagcaacgtgcagggcaagcactccacctccatgttcttccgggtggtagagagtgcctacttgaacttgagctctgagcagaacctcatccaggaggtgaccgtgggggaggggctcaacctcaaagtcatggtggaggcctacccaggcctgcaaggttttaactggacctacctgggacccttttctgaccaccagcctgagcccaagcttgctaatgctaccaccaaggacacatacaggcacaccttcaccctctctctgccccgcctgaagccctctgaggctggccgctactccttcctggccagaaacccaggaggctggagagctctgacgtttgagctcacccttcgataccccccagaggtaagcgtcatatggacattcatcaacggctctggcacccttttgtgtgctgcctctgggtacccccagcccaacgtgacatggctgcagtgcagtggccacactgataggtgtgatgaggcccaagtgctgcaggtctgggatgacccataccctgaggtcctgagccaggagcccttccacaaggtgacggtgcagagcctgctgactgttgagaccttagagcacaaccaaacctacgagtgcagggcccacaacagcgtggggagtggctcctgggccttcatacccatctctgcaggagcccacacgcatcccccggatgagttcctcttcacaccagtggtggtcgcctgcatgtccatcatggccttgctgctgctgctgctcctgctgctattgtacaagtataagcagaagcccaagtaccaggtccgctggaagatcatcgagagctatgagggcaacagttatactttcatcgaccccacgcagctgccttacaacgagaagtgggagttcccccggaacaacctgcagtttggtaagaccctcggagctggagcctttgggaaggtggtggaggccacggcctttggtctgggcaaggaggatgctgtcctgaaggtggctgtgaagatgctgaagtccacggcccatgctgatgagaaggaggccctcatgtccgagctgaagatcatgagccacctgggccagcacgagaacatcgtcaaccttctgggagcctgtacccatggaggccctgtactggtcatcacggagtactgttgctatggcgacctgctcaactttctgcgaaggaaggctgaggccatgctgggacccagcctgagccccggccaggaccccgagggaggcgtcgactataagaacatccacctcgagaagaaatatgtccgcagggacagtggcttctccagccagggtgtggacacctatgtggagatgaggcctgtctccacttcttcaaatgactccttctctgagcaagacctggacaaggaggatggacggcccctggagctccgggacctgcttcacttctccagccaagtagcccagggcatggccttcctcgcttccaagaattgcatccaccgggacgtggcagcgcgtaacgtgctgttgaccaatggtcatgtggccaagattggggacttcgggctggctagggacatcatgaatgactccaactacattgtcaagggcaatgcccgcctgcctgtgaagtggatggccccagagagcatctttgactgtgtctacacggttcagagcgacgtctggtcctatggcatcctcctctgggagatcttctcacttgggctgaatccctaccctggcatcctggtgaacagcaagttctataaactggtgaaggatggataccaaatggcccagcctgcatttgccccaaagaatatatacagcatcatgcaggcctgctgggccttggagcccacccacagacccaccttccagcagatctgctccttccttcaggagcaggcccaagaggacaggagagagcgggactataccaatctgccgagcagcagcagaagcggtggcagcggcagcagcagcagtgagctggaggaggagagctctagtgagcacctgacctgctgcgagcaaggggatatcgcccagcccttgctgcagcccaacaactatcagttctgctgaggagttgacgacagggagtaccactctcccctcctccaaacttcaactcctccatggatggggcgacacggggagaacatacaaactctgccttcggtcatttcactcaacagctcggcccagctctgaaacttgggaaggtgagggattcaggggaggtcagaggatcccacttcctgagcatgggccatcactgccagtcaggggctgggggctgagccctcaccccccgcctcccctactgttctcatggtgttggcctcgtgtttgctatgccaactagtagaaccttctttcctaatccccttatcttcatggaaatggactgactttatgcctatgaagtccccaggagctacactgatactgagaaaaccaggctctttggggctagacagactggcagagagtgagatctccctctctgagaggagcagcagatgctcacagaccacactcagctcaggccccttggagcaggatggctcctctaagaatctcacaggacctcttagtctctgccctatacgccgccttcactccacagcctcacccctcccacccccatactggtactgctgtaatgagccaagtggcagctaaaagttgggggtgttctgcccagtcccgtcattctgggctagaaggcaggggaccttggcatgtggctggccacaccaagcaggaagcacaaactcccccaagctgactcatcctaactaacagtcacgccgtgggatgtctctgtccacattaaactaacagcattaatgca

SEQ ID NO: 403687 - DNA, 4002 bp, Homo sapiens
ggcccaactagctagctcccccaagctcggctgccctgccccagactgcgacccctcctcttgggttcaaggctttgttttcttcttaaagacccaagatttccaaactctgtggttgccttgcctagctaaaaggggaagaagaggatcagcccaaggaggaggaagaggaaaacaagacaaacagccagtgcagaggagaggaacgtgtgtccagtgtcccgatccctgcggagctagtagctgagagctctgtgccctgggcaccttgcagccctgcacctgcctgccacttccccaccgaggccatgggcccaggagttctgctgctcctgctggtggccacagcttggcatggtcagggaatcccagtgatagagcccagtgtccccgagctggtcgtgaagccaggagcaacggtgaccttgcgatgtgtgggcaatggcagcgtggaatgggatggccccccatcacctcactggaccctgtactctgatggctccagcagcatcctcagcaccaacaacgctaccttccaaaacacggggacctatcgctgcactgagcctggagaccccctgggaggcagcgccgccatccacctctatgtcaaagaccctgcccggccctggaacgtgctagcacaggaggtggtcgtgttcgaggaccaggacgcactactgccctgtctgctcacagacccggtgctggaagcaggcgtctcgctggtgcgtgtgcgtggccggcccctcatgcgccacaccaactactccttctcgccctggcatggcttcaccatccacagggccaagttcattcagagccaggactatcaatgcagtgccctgatgggtggcaggaaggtgatgtccatcagcatccggctgaaagtgcagaaagtcatcccagggcccccagccttgacactggtgcctgcagagctggtgcggattcgaggggaggctgcccagatcgtgtgctcagccagcagcgttgatgttaactttgatgtcttcctccaacacaacaacactaagctcgcaatccctcaacaatctgactttcataataaccgttaccaaaaagtcctgaccctcaacctcgatcaagtagatttccaacatgccggcaactactcctgcgtggccagcaacgtgcagggcaagcactccacctccatgttcttccgggtggtagagagtgcctacttgaacttgagctctgagcagaacctcatccaggaggtgaccgtgggggaggggctcaacctcaaagtcatggtggaggcctacccaggcctgcaaggttttaactggacctacctgggacccttttctgaccaccagcctgagcccaagcttgctaatgctaccaccaaggacacatacaggcacaccttcaccctctctctgccccgcctgaagccctctgaggctggccgctactccttcctggccagaaacccaggaggctggagagctctgacgtttgagctcacccttcgataccccccagaggtaagcgtcatatggacattcatcaacggctctggcacccttttgtgtgctgcctctgggtacccccagcccaacgtgacatggctgcagtgcagtggccacactgataggtgtgatgaggcccaagtgctgcaggtctgggatgacccataccctgaggtcctgagccaggagcccttccacaaggtgacggtgcagagcctgctgactgttgagaccttagagcacaaccaaacctacgagtgcagggcccacaacagcgtggggagtggctcctgggccttcatacccatctctgcaggagcccacacgcatcccccggatgagttcctcttcacaccagtggtggtcgcctgcatgtccatcatggccttgctgctgctgctgctcctgctgctattgtacaagtataagcagaagcccaagtaccaggtccgctggaagatcatcgagagctatgagggcaacagttatactttcatcgaccccacgcagctgccttacaacgagaagtgggagttcccccggaacaacctgcagtttggtaagaccctcggagctggagcctttgggaaggtggtggaggccacggcctttggtctgggcaaggaggatgctgtcctgaaggtggctgtgaagatgctgaagtccacggcccatgctgatgagaaggaggccctcatgtccgagctgaagatcatgagccacctgggccagcacgagaacatcgtcaaccttctgggagcctgtacccatggaggccctgtactggtcatcacggagtactgttgctatggcgacctgctcaactttctgcgaaggaaggctgaggccatgctgggacccagcctgagccccggccaggaccccgagggaggcgtcgactataagaacatccacctcgagaagaaatatgtccgcagggacagtggcttctccagccagggtgtggacacctatgtggagatgaggcctgtctccacttcttcaaatgactccttctctgagcaagacctggacaaggaggatggacggcccctggagctccgggacctgcttcacttctccagccaagtagcccagggcatggccttcctcgcttccaagaattgcatccaccgggacgtggcagcgcgtaacgtgctgttgaccaatggtcatgtggccaagattggggacttcgggctggctagggacatcatgaatgactccaactacattgtcaagggcaatgcccgcctgcctgtgaagtggatggccccagagagcatctttgactgtgtctacacggttcagagcgacgtctggtcctatggcatcctcctctgggagatcttctcacttgggctgaatccctaccctggcatcctggtgaacagcaagttctataaactggtgaaggatggataccaaatggcccagcctgcatttgccccaaagaatatatacagcatcatgcaggcctgctgggccttggagcccacccacagacccaccttccagcagatctgctccttccttcaggagcaggcccaagaggacaggagagagcgggactataccaatctgccgagcagcagcagaagcggtggcagcggcagcagcagcagtgagctggaggaggagagctctagtgagcacctgacctgctgcgagcaaggggatatcgcccagcccttgctgcagcccaacaactatcagttctgctgaggagttgacgacagggagtaccactctcccctcctccaaacttcaactcctccatggatggggcgacacggggagaacatacaaactctgccttcggtcatttcactcaacagctcggcccagctctgaaacttgggaaggtgagggattcaggggaggtcagaggatcccacttcctgagcatgggccatcactgccagtcaggggctgggggctgagccctcaccccccgcctcccctactgttctcatggtgttggcctcgtgtttgctatgccaactagtagaaccttctttcctaatccccttatcttcatggaaatggactgactttatgcctatgaagtccccaggagctacactgatactgagaaaaccaggctctttggggctagacagactggcagagagtgagatctccctctctgagaggagcagcagatgctcacagaccacactcagctcaggccccttggagcaggatggctcctctaagaatctcacaggacctcttagtctctgccctatacgccgccttcactccacagcctcacccctcccacccccatactggtactgctgtaatgagccaagtggcagctaaaagttgggggtgttctgcccagtcccgtcattctgggctagaaggcaggggaccttggcatgtggctggccacaccaagcaggaagcacaaactcccccaagctgactcatcctaactaacagtcacgccgtgggatgtctctgtccacattaaactaacagcattaatgca

SEQ ID NO: 403688 - DNA, 5453 bp, Homo sapiens
tcctgaggctgccagcagccagcagtgactgcccgccctatctgggacccaggatcgctctgtgagcaacttggagccagagaggagatcaacaaggaggaggagagagccggcccctcagccctgctgcccagcagcagcctgtgctcgccctgcccaacgcagacagccagacccagggcggcccctctggcggctctgctcctcccgaaggatgcttggggagtgaggcgaagctgggccgctcctctcccctacagcagcccccttcctccatccctctgttctcctgagccttcaggagcctgcaccagtcctgcctgtccttctactcagctgttacccactctgggaccagcagtctttctgataactgggagagggcagtaaggaggacttcctggagggggtgactgtccagagcctggaactgtgcccacaccagaagccatcagcagcaaggacaccatgcggcttccgggtgcgatgccagctctggccctcaaaggcgagctgctgttgctgtctctcctgttacttctggaaccacagatctctcagggcctggtcgtcacacccccggggccagagcttgtcctcaatgtctccagcaccttcgttctgacctgctcgggttcagctccggtggtgtgggaacggatgtcccaggagcccccacaggaaatggccaaggcccaggatggcaccttctccagcgtgctcacactgaccaacctcactgggctagacacgggagaatacttttgcacccacaatgactcccgtggactggagaccgatgagcggaaacggctctacatctttgtgccagatcccaccgtgggcttcctccctaatgatgccgaggaactattcatctttctcacggaaataactgagatcaccattccatgccgagtaacagacccacagctggtggtgacactgcacgagaagaaaggggacgttgcactgcctgtcccctatgatcaccaacgtggcttttctggtatctttgaggacagaagctacatctgcaaaaccaccattggggacagggaggtggattctgatgcctactatgtctacagactccaggtgtcatccatcaacgtctctgtgaacgcagtgcagactgtggtccgccagggtgagaacatcaccctcatgtgcattgtgatcgggaatgaggtggtcaacttcgagtggacatacccccgcaaagaaagtgggcggctggtggagccggtgactgacttcctcttggatatgccttaccacatccgctccatcctgcacatccccagtgccgagttagaagactcggggacctacacctgcaatgtgacggagagtgtgaatgaccatcaggatgaaaaggccatcaacatcaccgtggttgagagcggctacgtgcggctcctgggagaggtgggcacactacaatttgctgagctgcatcggagccggacactgcaggtagtgttcgaggcctacccaccgcccactgtcctgtggttcaaagacaaccgcaccctgggcgactccagcgctggcgaaatcgccctgtccacgcgcaacgtgtcggagacccggtatgtgtcagagctgacactggttcgcgtgaaggtggcagaggctggccactacaccatgcgggccttccatgaggatgctgaggtccagctctccttccagctacagatcaatgtccctgtccgagtgctggagctaagtgagagccaccctgacagtggggaacagacagtccgctgtcgtggccggggcatgccccagccgaacatcatctggtctgcctgcagagacctcaaaaggtgtccacgtgagctgccgcccacgctgctggggaacagttccgaagaggagagccagctggagactaacgtgacgtactgggaggaggagcaggagtttgaggtggtgagcacactgcgtctgcagcacgtggatcggccactgtcggtgcgctgcacgctgcgcaacgctgtgggccaggacacgcaggaggtcatcgtggtgccacactccttgccctttaaggtggtggtgatctcagccatcctggccctggtggtgctcaccatcatctcccttatcatcctcatcatgctttggcagaagaagccacgttacgagatccgatggaaggtgattgagtctgtgagctctgacggccatgagtacatctacgtggaccccatgcagctgccctatgactccacgtgggagctgccgcgggaccagcttgtgctgggacgcaccctcggctctggggcctttgggcaggtggtggaggccacggctcatggcctgagccattctcaggccacgatgaaagtggccgtcaagatgcttaaatccacagcccgcagcagtgagaagcaagcccttatgtcggagctgaagatcatgagtcaccttgggccccacctgaacgtggtcaacctgttgggggcctgcaccaaaggaggacccatctatatcatcactgagtactgccgctacggagacctggtggactacctgcaccgcaacaaacacaccttcctgcagcaccactccgacaagcgccgcccgcccagcgcggagctctacagcaatgctctgcccgttgggctccccctgcccagccatgtgtccttgaccggggagagcgacggtggctacatggacatgagcaaggacgagtcggtggactatgtgcccatgctggacatgaaaggagacgtcaaatatgcagacatcgagtcctccaactacatggccccttacgataactacgttccctctgcccctgagaggacctgccgagcaactttgatcaacgagtctccagtgctaagctacatggacctcgtgggcttcagctaccaggtggccaatggcatggagtttctggcctccaagaactgcgtccacagagacctggcggctaggaacgtgctcatctgtgaaggcaagctggtcaagatctgtgactttggcctggctcgagacatcatgcgggactcgaattacatctccaaaggcagcacctttttgcctttaaagtggatggctccggagagcatcttcaacagcctctacaccaccctgagcgacgtgtggtccttcgggatcctgctctgggagatcttcaccttgggtggcaccccttacccagagctgcccatgaacgagcagttctacaatgccatcaaacggggttaccgcatggcccagcctgcccatgcctccgacgagatctatgagatcatgcagaagtgctgggaagagaagtttgagattcggccccccttctcccagctggtgctgcttctcgagagactgttgggcgaaggttacaaaaagaagtaccagcaggtggatgaggagtttctgaggagtgaccacccagccatccttcggtcccaggcccgcttgcctgggttccatggcctccgatctcccctggacaccagctccgtcctctatactgccgtgcagcccaatgagggtgacaacgactatatcatccccctgcctgaccccaaacccgaggttgctgacgagggcccactggagggttcccccagcctagccagctccaccctgaatgaagtcaacacctcctcaaccatctcctgtgacagccccctggagccccaggacgaaccagagccagagccccagcttgagctccaggtggagccggagccagagctggaacagttgccggattcggggtgccctgcgcctcgggcggaagcagaggatagcttcctgtagggggctggcccctaccctgccctgcctgaagctccccccctgccagcacccagcatctcctggcctggcctgaccgggcttcctgtcagccaggctgcccttatcagctgtccccttctggaagctttctgctcctgacgtgttgtgccccaaaccctggggctggcttaggaggcaagaaaactgcaggggccgtgaccagccctctgcctccagggaggccaactgactctgagccagggttcccccagggaactcagttttcccatatgtaagatgggaaagttaggcttgatgacccagaatctaggattctctccctggctgacaggtggggagaccgaatccctccctgggaagattcttggagttactgaggtggtaaattaacttttttctgttcagccagctacccctcaaggaatcatagctctctcctcgcacttttatccacccaggagctagggaagagaccctagcctccctggctgctggctgagctagggcctagccttgagcagtgttgcctcatccagaagaaagccagtctcctccctatgatgccagtccctgcgttccctggcccgagctggtctggggccattaggcagcctaattaatgctggaggctgagccaagtacaggacacccccagcctgcagcccttgcccagggcacttggagcacacgcagccatagcaagtgcctgtgtccctgtccttcaggcccatcagtcctggggctttttctttatcaccctcagtcttaatccatccaccagagtctagaaggccagacgggccccgcatctgtgatgagaatgtaaatgtgccagtgtggagtggccacgtgtgtgtgccagtatatggccctggctctgcattggacctgctatgaggctttggaggaatccctcaccctctctgggcctcagtttccccttcaaaaaatgaataagtcggacttattaactctgagtgccttgccagcactaacattctagagtattccaggtggttgcacatttgtccagatgaagcaaggccatataccctaaacttccatcctgggggtcagctgggctcctgggagattccagatcacacatcacactctggggactcaggaaccatgccccttccccaggcccccagcaagtctcaagaacacagctgcacaggccttgacttagagtgacagccggtgtcctggaaagccccctcacccaccagctgccccatccctgaggcagcgctccatgggggtatggttttgtcactgcccagacctagcagtgacatctcattgtccccagcccagtgggcattggaggtgccaggggagtcagggttgtagccaagacgcccccgcacggggagggttgggaagggggtgcaggaagctcaacccctctgggcaccaaccctgcattgcaggttggcaccttacttccctgggatccccagagttggtccaaggagggagagtgggttctcaatacggtaccaaagatataatcacctaggtttacaaatatttttaggactcacgttaactcacatttatacagcagaaatgctattttgtatgctgttaagtttttctatctgtgtacttttttttaagggaaagattttaatattaaacctggtgcttctcactca

SEQ ID NO: 403689 - DNA, 2104 bp, Homo sapiens
tgtccctagagcccatggcctccactgcctgcctgcccacacaaagaccatgtgcaatgtgatcagaagctgagaggaccaggccagagggctgtgggagttcagaggtggacggacttttcaggctggtgggtaagggagactgcctggaggaggtggcttggcattggtgggacgggctttggaggatgaggatgcagcaggggagatgacactaagggaaagggtaccctctccctgtctttgggactgtggttcttcctcccagccacggcccatgctgatgagaaggaggccctcatgtccgagctgaagatcatgagccacctgggccagcacgagaacatcgtcaaccttctgggagcctgtacccatggaggccctgtactggtcatcacggagtactgttgctatggcgacctgctcaactttctgcgaaggaaggctgaggccatgctgggacccagcctgagccccggccaggaccccgagggaggcgtcgactataagaacatccacctcgagaagaaatatgtccgcagggacagtggcttctccagccagggtgtggacacctatgtggagatgaggcctgtctccacttcttcaaatgactccttctctgagcaagacctggacaaggaggatggacggcccctggagctccgggacctgcttcacttctccagccaagtagcccagggcatggccttcctcgcttccaagaattgcatccaccgggacgtggcagcgcgtaacgtgctgttgaccaatggtcatgtggccaagattggggacttcgggctggctagggacatcatgaatgactccaactacattgtcaagggcaatgcccgcctgcctgtgaagtggatggccccagagagcatctttgactgtgtctacacggttcagagcgacgtctggtcctatggcatcctcctctgggagatcttctcacttgggctgaatccctaccctggcatcctggtgaacagcaagttctataaactggtgaaggatggataccaaatggcccagcctgcatttgccccaaagaatatatacagcatcatgcaggcctgctgggccttggagcccacccacagacccaccttccagcagatctgctccttccttcaggagcaggcccaagaggacaggagagagcgggactataccaatctgccgagcagcagcagaagcggtggcagcggcagcagcagcagtgagctggaggaggagagctctagtgagcacctgacctgctgcgagcaaggggatatcgcccagcccttgctgcagcccaacaactatcagttctgctgaggagttgacgacagggagtaccactctcccctcctccaaacttcaactcctccatggatggggcgacacggggagaacatacaaactctgccttcggtcatttcactcaacagctcggcccagctctgaaacttgggaaggtgagggattcaggggaggtcagaggatcccacttcctgagcatgggccatcactgccagtcaggggctgggggctgagccctcaccccccgcctcccctactgttctcatggtgttggcctcgtgtttgctatgccaactagtagaaccttctttcctaatccccttatcttcatggaaatggactgactttatgcctatgaagtccccaggagctacactgatactgagaaaaccaggctctttggggctagacagactggcagagagtgagatctccctctctgagaggagcagcagatgctcacagaccacactcagctcaggccccttggagcaggatggctcctctaagaatctcacaggacctcttagtctctgccctatacgccgccttcactccacagcctcacccctcccacccccatactggtactgctgtaatgagccaagtggcagctaaaagttgggggtgttctgcccagtcccgtcattctgggctagaaggcaggggaccttggcatgtggctggccacaccaagcaggaagcacaaactcccccaagctgactcatcctaactaacagtcacgccgtgggatgtctctgtccacattaaactaacagcattaatgca

SEQ ID NO: 403690 - DNA, 5333 bp, Homo sapiens
tcctgaggctgccagcagccagcagtgactgcccgccctatctgggacccaggatcgctctgtgagcaacttggagccagagaggagatcaacaaggaggaggagagagccggcccctcagccctgctgcccagcagcagcctgtgctcgccctgcccaacgcagacagccagacccagggcggcccctctggcggctctgctcctcccgaaggatgcttggggagtgaggcgaagctgggccgctcctctcccctacagcagcccccttcctccatccctctgttctcctgagccttcaggagcctgcaccagtcctgcctgtccttctactcagctgttacccactctgggaccagcagtctttctgataactgggagagggcagtaaggaggacttcctggagggggtgactgtccagagcctggaactgtgcccacaccagaagccatcagcagcaaggacaccatgcggcttccgggtgcgatgccagctctggccctcaaaggcgagctgctgttgctgtctctcctgttacttctggaaccacagatctctcagggcctggtcgtcacacccccggggccagagcttgtcctcaatgtctccagcaccttcgttctgacctgctcgggttcagctccggtggtgtgggaacggatgtcccaggagcccccacaggaaatggccaaggcccaggatggcaccttctccagcgtgctcacactgaccaacctcactgggctagacacgggagaatacttttgcacccacaatgactcccgtggactggagaccgatgagcggaaacggctctacatctttgtgccagatcccaccgtgggcttcctccctaatgatgccgaggaactattcatctttctcacggaaataactgagatcaccattccatgccgagtaacagacccacagctggtggtgacactgcacgagaagaaaggggacgttgcactgcctgtcccctatgatcaccaacgtggcttttctggtatctttgaggacagaagctacatctgcaaaaccaccattggggacagggaggtggattctgatgcctactatgtctacagactccaggtgtcatccatcaacgtctctgtgaacgcagtgcagactgtggtccgccagggtgagaacatcaccctcatgtgcattgtgatcgggaatgaggtggtcaacttcgagtggacatacccccgcaaagaaagtgggcggctggtggagccggtgactgacttcctcttggatatgccttaccacatccgctccatcctgcacatccccagtgccgagttagaagactcggggacctacacctgcaatgtgacggagagtgtgaatgaccatcaggatgaaaaggccatcaacatcaccgtggttgagagcggctacgtgcggctcctgggagaggtgggcacactacaatttgctgagctgcatcggagccggacactgcaggtagtgttcgaggcctacccaccgcccactgtcctgtggttcaaagacaaccgcaccctgggcgactccagcgctggcgaaatcgccctgtccacgcgcaacgtgtcggagacccggtatgtgtcagagctgacactggttcgcgtgaaggtggcagaggctggccactacaccatgcgggccttccatgaggatgctgaggtccagctctccttccagctacagatcaatgtccctgtccgagtgctggagctaagtgagagccaccctgacagtggggaacagacagtccgctgtcgtggccggggcatgccccagccgaacatcatctggtctgcctgcagagacctcaaaaggtgtccacgtgagctgccgcccacgctgctggggaacagttccgaagaggagagccagctggagactaacgtgacgtactgggaggaggagcaggagtttgaggtggtgagcacactgcgtctgcagcacgtggatcggccactgtcggtgcgctgcacgctgcgcaacgctgtgggccaggacacgcaggaggtcatcgtggtgccacactccttgccctttaaggtggtggtgatctcagccatcctggccctggtggtgctcaccatcatctcccttatcatcctcatcatgctttggcagaagaagccacgttacgagatccgatggaaggtgattgagtctgtgagctctgacggccatgagtacatctacgtggaccccatgcagctgccctatgactccacgtgggagctgccgcgggaccagcttgtgctgggacgcaccctcggctctggggcctttgggcaggtggtggaggccacggctcatggcctgagccattctcaggccacgatgaaagtggccgtcaagatgcttaaatccacagcccgcagcagtgagaagcaagcccttatgtcggagctgaagatcatgagtcaccttgggccccacctgaacgtggtcaacctgttgggggcctgcaccaaaggaggacccatctatatcatcactgagtactgccgctacggagacctggtggactacctgcaccgcaacaaacacaccttcctgcagcaccactccgacaagcgccgcccgcccagcgcggagctctacagcaatgctctgcccgttgggctccccctgcccagccatgtgtccttgaccggggagagcgacggtggctacatggacatgagcaaggacgagtcggtggactatgtgcccatgctggacatgaaaggagacgtcaaatatgcagacatcgagtcctccaactacatggccccttacgataactacgttccctctgcccctgagaggacctgccgagcaactttgatcaacgagtctccagtgctaagctacatggacctcgtgggcttcagctaccaggtggccaatggcatggagtttctggcctccaagaactgcgtccacagagacctggcggctaggaacgtgctcatctgtgaaggcaagctggtcaagatctgtgactttggcctggctcgagacatcatgcgggactcgaattacatctccaaaggcagcacctttttgcctttaaagtggatggctccggagagcatcttcaacagcctctacaccaccctgagcgacgtgtggtccttcgggatcctgctctgggagatcttcaccttgggtggcaccccttacccagagctgcccatgaacgagcagttctacaatgccatcaaacggggttaccgcatggcccagcctgcccatgcctccgacgagatctatgagatcatgcagaagtgctgggaagagaagtttgagattcggccccccttctcccagctggtgctgcttctcgagagactgttgggcgaaggttacaaaaagaagtaccagcaggtggatgaggagtttctgaggagtgaccacccagccatccttcggtcccaggcccgcttgcctgggttccatggcctccgatctcccctggacaccagctccgtcctctatactgccgtgcagcccaatgagggtgacaacgactatatcatccccctgcctgaccccaaacccgaggttgctgacgagggcccactggagggttcccccagcctagccagctccaccctgaatgaagtcaacacctcctcaaccatctcctgtgacagccccctggagccccaggacgaaccagagccagagccccagcttgagctccaggtggagccggagccagagctggaacagttgccggattcggggtgccctgcgcctcgggcggaagcagaggatagcttcctgtagggggctggcccctaccctgccctgcctgaagctccccccctgccagcacccagcatctcctggcctggcctgaccgggcttcctgtcagccaggctgcccttatcagctgtccccttctggaagctttctgctcctgacgtgttgtgccccaaaccctggggctggcttaggaggcaagaaaactgcaggggccgtgaccagccctctgcctccagggaggccaactgactctgagccagggttcccccagggaactcagttttcccatatgtaagatgggaaagttaggcttgatgacccagaatctaggattctctccctggctgacaggtggggagaccgaatccctccctgggaagattcttggagttactgaggtggtaaattaacttttttctgttcagccagctacccctcaaggaatcatagctctctcctcgcacttttatccacccaggagctagggaagagaccctagcctccctggctgctggctgagctagggcctagccttgagcagtgttgcctcatccagaagaaagccagtctcctccctatgatgccagtccctgcgttccctggcccgagctggtctggggccattaggcagcctaattaatgctggaggctgagccaagtacaggacacccccagcctgcagcccttgcccagggcacttggagcacacgcagccatagcaagtgcctgtgtccctgtccttcaggcccatcagtcctggggctttttctttatcaccctcagtcttaatccatccaccagagtctagaaggccagacgggccccgcatctgtgatgagaatgtaaatgtgccagtgtggagtggccacgtgtgtgtgccagtatatggccctggctctgcattggacctgctatgaggctttggaggaatccctcaccctctctgggcctcagtttccccttcaaaaaatgaataagtcggacttattaactctgagtgccttgccagcactaacattctagagtattccaggtggttgcacatttgtccagatgaagcaaggccatataccctaaacttccatcctgggggtcagctgggctcctgggagattccagatcacacatcacactctggggactcaggaaccatgccccttccccaggcccccagcaagtctcaagaacacagctgcacaggccttgacttagagtgacagccggtgtcctggaaagcccccagcagctgccccagggacatgggaagaccacgggacctctttcactacccacgatgacctccgggggtatcctgggcaccaaccctgcattgcaggttggcaccttacttccctgggatccccagagttggtccaaggagggagagtgggttctcaatacggtaccaaagatataatcacctaggtttacaaatatttttaggactcacgttaactcacatttatacagcagaaatgctattttgtatgctgttaagtttttctatctgtgtacttttttttaagggaaagattttaatattaaacctggtgcttctcactca

SEQ ID NO: 403691 - DNA, 5086 bp, Homo sapiens
tcctgaggctgccagcagccagcagtgactgcccgccctatctgggacccaggatcgctctgtgagcaacttggagccagagaggagatcaacaaggaggaggagagagccggcccctcagccctgctgcccagcagcagcctgtgctcgccctgcccaacgcagacagccagacccagggcggcccctctggcggctctgctcctcccgaaggatgcttggggagtgaggcgaagctgggccgctcctctcccctacagcagcccccttcctccatccctctgttctcctgagccttcaggagcctgcaccagtcctgcctgtccttctactcagctgttacccactctgggaccagcagtctttctgataactgggagagggcagtaaggaggacttcctggagggggtgactgtccagagcctggaactgtgcccacaccagaagccatcagcagcaaggacaccatgcggcttccgggtgcgatgccagctctggccctcaaaggcgagctgctgttgctgtctctcctgttacttctggaaccacagatctctcagggcctggtcgtcacacccccggggccagagcttgtcctcaatgtctccagcaccttcgttctgacctgctcgggttcagctccggtggtgtgggaacggatgtcccaggagcccccacaggaaatggccaaggcccaggatggcaccttctccagcgtgctcacactgaccaacctcactgggctagacacgggagaatacttttgcacccacaatgactcccgtggactggagaccgatgagcggaaacggctctacatctttgtgccagatcccaccgtgggcttcctccctaatgatgccgaggaactattcatctttctcacggaaataactgagatcaccattccatgccgagtaacagacccacagctggtggtgacactgcacgagaagaaaggggacgttgcactgcctgtcccctatgatcaccaacgtggcttttctggtatctttgaggacagaagctacatctgcaaaaccaccattggggacagggaggtggattctgatgcctactatgtctacagactccaggtgtcatccatcaacgtctctgtgaacgcagtgcagactgtggtccgccagggtgagaacatcaccctcatgtgcattgtgatcgggaatgaggtggtcaacttcgagtggacatacccccgcaaagaaagtgggcggctggtggagccggtgactgacttcctcttggatatgccttaccacatccgctccatcctgcacatccccagtgccgagttagaagactcggggacctacacctgcaatgtgacggagagtgtgaatgaccatcaggatgaaaaggccatcaacatcaccgtggttgagagcggctacgtgcggctcctgggagaggtgggcacactacaatttgctgagctgcatcggagccggacactgcaggtagtgttcgaggcctacccaccgcccactgtcctgtggttcaaagacaaccgcaccctgggcgactccagcgctggcgaaatcgccctgtccacgcgcaacgtgtcggagacccggtatgtgtcagagctgacactggttcgcgtgaaggtggcagaggctggccactacaccatgcgggccttccatgaggatgctgaggtccagctctccttccagctacagatcaatgtccctgtccgagtgctggagctaagtgagagccaccctgacagtggggaacagacagtccgctgtcgtggccggggcatgccccagccgaacatcatctggtctgcctgcagagacctcaaaaggtgtccacgtgagctgccgcccacgctgctggggaacagttccgaagaggagagccagctggagactaacgtgacgtactgggaggaggagcaggagtttgaggtggtgagcacactgcgtctgcagcacgtggatcggccactgtcggtgcgctgcacgctgcgcaacgctgtgggccaggacacgcaggaggtcatcgtggtgccacactccttgccctttaaggtggtggtgatctcagccatcctggccctggtggtgctcaccatcatctcccttatcatcctcatcatgctttggcagaagaagccacgttacgagatccgatggaaggtgattgagtctgtgagctctgacggccatgagtacatctacgtggaccccatgcagctgccctatgactccacgtgggagctgccgcgggaccagcttgtgctgggacgcaccctcggctctggggcctttgggcaggtggtggaggccacggctcatggcctgagccattctcaggccacgatgaaagtggccgtcaagatgcttaaatccacagcccgcagcagtgagaagcaagcccttatgtcggagctgaagatcatgagtcaccttgggccccacctgaacgtggtcaacctgttgggggcctgcaccaaaggaggacccatctatatcatcactgagtactgccgctacggagacctggtggactacctgcaccgcaacaaacacaccttcctgcagcaccactccgacaagcgccgcccgcccagcgcggagctctacagcaatgctctgcccgttgggctccccctgcccagccatgtgtccttgaccggggagagcgacggtggctacatggacatgagcaaggacgagtcggtggactatgtgcccatgctggacatgaaaggagacgtcaaatatgcagacatcgagtcctccaactacatggccccttacgataactacgttccctctgcccctgagaggacctgccgagcaactttgatcaacgagtctccagtgctaagctacatggacctcgtgggcttcagctaccaggtggccaatggcatggagtttctggcctccaagaactgcgtccacagagacctggcggctaggaacgtgctcatctgtgaaggcaagctggtcaagatctgtgactttggcctggctcgagacatcatgcgggactcgaattacatctccaaaggcagcacctttttgcctttaaagtggatggctccggagagcatcttcaacagcctctacaccaccctgagcgacgtgtggtccttcgggatcctgctctgggagatcttcaccttgggtggcaccccttacccagagctgcccatgaacgagcagttctacaatgccatcaaacggggttaccgcatggcccagcctgcccatgcctccgacgagatctatgagatcatgcagaagtgctgggaagagaagtttgagattcggccccccttctcccagctggtgctgcttctcgagagactgttgggcgaaggttacaaaaagaagtaccagcaggtggatgaggagtttctgaggagtgaccacccagccatccttcggtcccaggcccgcttgcctgggttccatggcctccgatctcccctggacaccagctccgtcctctatactgccgtgcagcccaatgagggtgacaacgactatatcatccccctgcctgaccccaaacccgaggttgctgacgagggcccactggagggttcccccagcctagccagctccaccctgaatgaagtcaacacctcctcaaccatctcctgtgacagccccctggagccccaggacgaaccagagccagagccccagcttgagctccaggtggagccggagccagagctggaacagttgccggattcggggtgccctgcgcctcgggcggaagcagaggatagcttcctgtagggggctggcccctaccctgccctgcctgaagctccccccctgccagcacccagcatctcctggcctggcctgaccgggcttcctgtcagccaggctgcccttatcagctgtccccttctggaagctttctgctcctgacgtgttgtgccccaaaccctggggctggcttaggaggcaagaaaactgcaggggccgtgaccagccctctgcctccagggaggccaactgactctgagccagggttcccccagggaactcagttttcccatatgtaagatgggaaagttaggcttgatgacccagaatctaggattctctccctggctgacaggtggggagaccgaatccctccctgggaagattcttggagttactgaggtggtaaattaacttttttctgttcagccagctacccctcaaggaatcatagctctctcctcgcacttttatccacccaggagctagggaagagaccctagcctccctggctgctggctgagctagggcctagccttgagcagtgttgcctcatccagaagaaagccagtctcctccctatgatgccagtccctgcgttccctggcccgagctggtctggggccattaggcagcctaattaatgctggaggctgagccaagtacaggacacccccagcctgcagcccttgcccagggcacttggagcacacgcagccatagcaagtgcctgtgtccctgtccttcaggcccatcagtcctggggctttttctttatcaccctcagtcttaatccatccaccagagtctagaaggccagacgggccccgcatctgtgatgagaatgtaaatgtgccagtgtggagtggccacgtgtgtgtgccagtatatggccctggctctgcattggacctgctatgaggctttggaggaatccctcaccctctctgggcctcagtttccccttcaaaaaatgaataagtcggacttattaactctgagtgccttgccagcactaacattctagagtattccaggtggttgcacatttgtccagatgaagcaaggccatataccctaaacttccatcctgggggtcagctgggctcctgggagattccagagttggtccaaggagggagagtgggttctcaatacggtaccaaagatataatcacctaggtttacaaatatttttaggactcacgttaactcacatttatacagcagaaatgctattttgtatgctgttaagtttttctatctgtgtacttttttttaagggaaagattttaatattaaacctggtgcttctcactca

SEQ ID NO: 403692 - DNA, 3726 bp, Homo sapiens
tcctgaggctgccagcagccagcagtgactgcccgccctatctgggacccaggatcgctctgtgagcaacttggagccagagaggagatcaacaaggaggaggagagagccggcccctcagccctgctgcccagcagcagcctgtgctcgccctgcccaacgcagacagccagacccagggcggcccctctggcggctctgctcctcccgaaggatgcttggggagtgaggcgaagctgggccgctcctctcccctacagcagcccccttcctccatccctctgttctcctgagccttcaggagcctgcaccagtcctgcctgtccttctactcagctgttacccactctgggaccagcagtctttctgataactgggagagggcagtaaggaggacttcctggagggggtgactgtccagagcctggaactgtgcccacaccagaagccatcagcagcaaggacaccatgcggcttccgggtgcgatgccagctctggccctcaaaggcgagctgctgttgctgtctctcctgttacttctggaaccacagatctctcagggcctggtcgtcacacccccggggccagagcttgtcctcaatgtctccagcaccttcgttctgacctgctcgggttcagctccggtggtgtgggaacggatgtcccaggagcccccacaggaaatggccaaggcccaggatggcaccttctccagcgtgctcacactgaccaacctcactgggctagacacgggagaatacttttgcacccacaatgactcccgtggactggagaccgatgagcggaaacggctctacatctttgtgccagatcccaccgtgggcttcctccctaatgatgccgaggaactattcatctttctcacggaaataactgagatcaccattccatgccgagtaacagacccacagctggtggtgacactgcacgagaagaaaggggacgttgcactgcctgtcccctatgatcaccaacgtggcttttctggtatctttgaggacagaagctacatctgcaaaaccaccattggggacagggaggtggattctgatgcctactatgtctacagactccaggtgtcatccatcaacgtctctgtgaacgcagtgcagactgtggtccgccagggtgagaacatcaccctcatgtgcattgtgatcgggaatgaggtggtcaacttcgagtggacatacccccgcaaagaaagtgggcggctggtggagccggtgactgacttcctcttggatatgccttaccacatccgctccatcctgcacatccccagtgccgagttagaagactcggggacctacacctgcaatgtgacggagagtgtgaatgaccatcaggatgaaaaggccatcaacatcaccgtggttgagagcggctacgtgcggctcctgggagaggtgggcacactacaatttgctgagctgcatcggagccggacactgcaggtagtgttcgaggcctacccaccgcccactgtcctgtggttcaaagacaaccgcaccctgggcgactccagcgctggcgaaatcgccctgtccacgcgcaacgtgtcggagacccggtatgtgtcagagctgacactggttcgcgtgaaggtggcagaggctggccactacaccatgcgggccttccatgaggatgctgaggtccagctctccttccagctacagatcaatgtccctgtccgagtgctggagctaagtgagagccaccctgacagtggggaacagacagtccgctgtcgtggccggggcatgccccagccgaacatcatctggtctgcctgcagagacctcaaaaggtgtccacgtgagctgccgcccacgctgctggggaacagttccgaagaggagagccagctggagactaacgtgacgtactgggaggaggagcaggagtttgaggtggtgagcacactgcgtctgcagcacgtggatcggccactgtcggtgcgctgcacgctgcgcaacgctgtgggccaggacacgcaggaggtcatcgtggtgccacactccttgccctttaaggtggtggtgatctcagccatcctggccctggtggtgctcaccatcatctcccttatcatcctcatcatgctttggcagaagaagccacgttacgagatccgatggaaggtgattgagtctgtgagctctgacggccatgagtacatctacgtggaccccatgcagctgccctatgactccacgtgggagctgccgcgggaccagcttgtgctgggacgcaccctcggctctggggcctttgggcaggtggtggaggccacggctcatggcctgagccattctcaggccacgatgaaagtggccgtcaagatgcttaaatccacagcccgcagcagtgagaagcaagcccttatgtcggagctgaagatcatgagtcaccttgggccccacctgaacgtggtcaacctgttgggggcctgcaccaaaggaggacccatctatatcatcactgagtactgccgctacggagacctggtggactacctgcaccgcaacaaacacaccttcctgcagcaccactccgacaagcgccgcccgcccagcgcggagctctacagcaatgctctgcccgttgggctccccctgcccagccatgtgtccttgaccggggagagcgacggtggctacatggacatgagcaaggacgagtcggtggactatgtgcccatgctggacatgaaaggagacgtcaaatatgcagacatcgagtcctccaactacatggccccttacgataactacgttccctctgcccctgagaggacctgccgagcaactttgatcaacgagtctccagtgctaagctacatggacctcgtgggcttcagctaccaggtggccaatggcatggagtttctggcctccaagaactgcgtccacagagacctggcggctaggaacgtgctcatctgtgaaggcaagctggtcaagatctgtgactttggcctggctcgagacatcatgcgggactcgaattacatctccaaaggcagcacctttttgcctttaaagtggatggctccggagagcatcttcaacagcctctacaccaccctgagcgacgtgtggtccttcgggatcctgctctgggagatcttcaccttgggtggcaccccttacccagagctgcccatgaacgagcagttctacaatgccatcaaacggggttaccgcatggcccagcctgcccatgcctccgacgagatctatgagatcatgcagaagtgctgggaagagaagtttgagattcggccccccttctcccagctggtgctgcttctcgagagactgttgggcgaaggttacaaaaagaagtaccagcaggtggatgaggagtttctgaggagtgaccacccagccatccttcggtcccaggcccgcttgcctgggttccatggcctccgatctcccctggacaccagctccgtcctctatactgccgtgcagcccaatgagggtgacaacgactatatcatccccctgcctgaccccaaacccgaggttgctgacgagggcccactggagggttcccccagcctagccagctccaccctgaatgaagtcaacacctcctcaaccatctcctgtgacagccccctggagccccaggacgatccgatcacgagcttaacacaggtaccgcgctcgacattcgtatatgtatca

SEQ ID NO: 403693 - DNA, 2767 bp, Homo sapiens
tcctgaggctgccagcagccagcagtgactgcccgccctatctgggacccaggatcgctctgtgagcaacttggagccagagaggagatcaacaaggaggaggagagagccggcccctcagccctgctgcccagcagcagcctgtgctcgccctgcccaacgcagacagccagacccagggcggcccctctggcggctctgctcctcccgaaggatgcttggggagtgaggcgaagctgggccgctcctctcccctacagcagcccccttcctccatccctctgttctcctgagccttcaggagcctgcaccagtcctgcctgtccttctactcagctgttacccactctgggaccagcagtctttctgataactgggagagggcagtaaggaggacttcctggagggggtgactgtccagagcctggaactgtgcccacaccagaagccatcagcagcaaggacaccatgcggcttccgggtgcgatgccagctctggccctcaaaggcgagctgctgttgctgtctctcctgttacttctggaaccacagatctctcagggcctggtcgtcacacccccggggccagagcttgtcctcaatgtctccagcaccttcgttctgacctgctcgggttcagctccggtggtgtgggaacggatgtcccaggagcccccacaggaaatggccaaggcccaggatggcaccttctccagcgtgctcacactgaccaacctcactgggctagacacgggagaatacttttgcacccacaatgactcccgtggactggagaccgatgagcggaaacggctctacatctttgtgccagatcccaccgtgggcttcctccctaatgatgccgaggaactattcatctttctcacggaaataactgagatcaccattccatgccgagtaacagacccacagctggtggtgacactgcacgagaagaaaggggacgttgcactgcctgtcccctatgatcaccaacgtggcttttctggtatctttgaggacagaagctacatctgcaaaaccaccattggggacagggaggtggattctgatgcctactatgtctacagactccaggtgtcatccatcaacgtctctgtgaacgcagtgcagactgtggtccgccagggtgagaacatcaccctcatgtgcattgtgatcgggaatgaggtggtcaacttcgagtggacatacccccgcaaagaaagtgggcggctggtggagccggtgactgacttcctcttggatatgccttaccacatccgctccatcctgcacatccccagtgccgagttagaagactcggggacctacacctgcaatgtgacggagagtgtgaatgaccatcaggatgaaaaggccatcaacatcaccgtggttgagagcggctacgtgcggctcctgggagaggtgggcacactacaatttgctgagctgcatcggagccggacactgcaggtagtgttcgaggcctacccaccgcccactgtcctgtggttcaaagacaaccgcaccctgggcgactccagcgctggcgaaatcgccctgtccacgcgcaacgtgtcggagacccggtatgtgtcagagctgacactggttcgcgtgaaggtggcagaggctggccactacaccatgcgggccttccatgaggatgctgaggtccagctctccttccagctacagatcaatgtccctgtccgagtgctggagctaagtgagagccaccctgacagtggggaacagacagtccgctgtcgtggccggggcatgccccagccgaacatcatctggtctgcctgcagagacctcaaaaggtgtccacgtgagctgccgcccacgctgctggggaacagttccgaagaggagagccagctggagactaacgtgacgtactgggaggaggagcaggagtttgaggtggtgagcacactgcgtctgcagcacgtggatcggccactgtcggtgcgctgcacgctgcgcaacgctgtgggccaggacacgcaggaggtcatcgtggtgccacactccttgccctttaaggtggtggtgatctcagccatcctggccctggtggtgctcaccatcatctcccttatcatcctcatcatgctttggcagaagaagccacgttacgagatccgatggaaggtgattgagtctgtgagctctgacggccatgagtacatctacgtggaccccatgcagctgccctatgactccacgtgggagctgccgcgggaccagcttgtgctgggacgcaccctcggctctggggcctttgggcaggtggtggaggccacggctcatggcctgagccattctcaggccacgatgaaagtggccgtcaagatgcttaaatccacagcccgcagcagtgagaagcaagcccttatgtcggagctgaagatcatgagtcaccttgggccccacctgaacgtggtcaacctgttgggggcctgcaccaaaggaggacccatctatatcatcactgagtactgccgctacggagacctggtggactacctgcaccgcaacaaacacaccttcctgcagcaccactccgacaagcgccgcccgcccagcgcggagctctacagcaatgctctgcccgttgggctccccctgcccagccatgtgtccttgaccggggagagcggcgttggatgcagtcagcggcgttggatgcagtcagcggcgttggatgcagtctgcggcgttggatgcagtcagcggcgttggatacagt

SEQ ID NO: 403694 - DNA, 400 bp, Homo sapiens
gccctgtccccagcccaatttcaacctcagctccggaaactccatggctggcacggtccccaggcctgaagccccaccccacaggctggcctcctttgggattcagttggtgccctgcccccagggccccgcccctgacggtcaccccttgcagagagcggctacgtgcggctcctgggagaggtgggcacactacaatttgctgagctgcatcggagccggacactgcaggtagtgttcgaggcctacccaccgcccactgtcctgtggttcaaagacaaccgcaccctgggcgactccagcgctggcgaaatcgccctgtccacgcgcaacgtgtcggagacccggtgagcagctcgctctcccatcccattcttgaagttatttttctttgcagccg

SEQ ID NO: 403695 - DNA, 9306 bp, Homo sapiens
tcctgaggctgccagcagccagcagtgactgcccgccctatctgggacccaggatcgctctgtgagcaacttggagccagagaggagatcaacaaggaggaggagagagccggcccctcagccctgctgcccagcagcagcctgtgctcgccctgcccaacgcagacagccagacccagggcggcccctctggcggctctgctcctcccgaaggatgcttggggagtgaggcgaagctgggccgctcctctcccctacagcagcccccttcctccatccctctgttctcctgagccttcaggagcctgcaccagtcctgcctgtccttctactcagctgttacccactctgggaccagcagtctttctgataactgggagagggcagtaaggaggacttcctggagggggtgactgtccagagcctggaactgtgcccacaccagaagccatcagcagcaaggacaccatgcggcttccgggtgcgatgccagctctggccctcaaaggcgagctgctgttgctgtctctcctgttacttctggaaccacagatctctcagggcctggtcgtcacacccccggggccagagcttgtcctcaatgtctccagcaccttcgttctgacctgctcgggttcagctccggtggtgtgggaacggatgtcccaggagcccccacaggaaatggccaaggcccaggatggcaccttctccagcgtgctcacactgaccaacctcactgggctagacacgggagaatacttttgcacccacaatgactcccgtggactggagaccgatgagcggaaacggctctacatctttgtgccagatcccaccgtgggcttcctccctaatgatgccgaggaactattcatctttctcacggaaataactgagatcaccattccatgccgagtaacagacccacagctggtggtgacactgcacgagaagaaaggggacgttgcactgcctgtcccctatgatcaccaacgtggcttttctggtatctttgaggacagaagctacatctgcaaaaccaccattggggacagggaggtggattctgatgcctactatgtctacagactccaggtgtcatccatcaacgtctctgtgaacgcagtgcagactgtggtccgccagggtgagaacatcaccctcatgtgcattgtgatcgggaatgaggtggtcaacttcgagtggacatacccccgcaaagaaagtgggcggctggtggagccggtgactgacttcctcttggatatgccttaccacatccgctccatcctgcacatccccagtgccgagttagaagactcggggacctacacctgcaatgtgacggagagtgtgaatgaccatcaggatgaaaaggccatcaacatcaccgtggttgagagcggctacgtgcggctcctgggagaggtgggcacactacaatttgctgagctgcatcggagccggacactgcaggtagtgttcgaggcctacccaccgcccactgtcctgtggttcaaagacaaccgcaccctgggcgactccagcgctggcgaaatcgccctgtccacgcgcaacgtgtcggagacccggtatgtgtcagagctgacactggttcgcgtgaaggtggcagaggctggccactacaccatgcgggccttccatgaggatgctgaggtccagctctccttccagctacagatcaatgtccctgtccgagtgctggagctaagtgagagccaccctgacagtggggaacagacagtccgctgtcgtggccggggcatgccccagccgaacatcatctggtctgcctgcagagacctcaaaaggtgtccacgtgagctgccgcccacgctgctggggaacagttccgaagaggagagccagctggagactaacgtgacgtactgggaggaggagcaggagtttgaggtggtgagcacactgcgtctgcagcacgtggatcggccactgtcggtgcgctgcacgctgcgcaacgctgtgggccaggacacgcaggaggtcatcgtggtgccacactccttgccctttaaggtggtggtgatctcagccatcctggccctggtggtgctcaccatcatctcccttatcatcctcatcatgctttggcagaagaagccacgttacgagatccgatggaaggtgattgagtctgtgagctctgacggccatgagtacatctacgtggaccccatgcagctgccctatgactccacgtgggagctgccgcgggaccagcttgtgctgggacgcaccctcggctctggggcctttgggcaggtggtggaggccacggctcatggcctgagccattctcaggccacgatgaaagtggccgtcaagatgcttaaatccacagcccgcagcagtgagaagcaagcccttatgtcggagctgaagatcatgagtcaccttgggccccacctgaacgtggtcaacctgttgggggcctgcaccaaaggaggacccatctatatcatcactgagtactgccgctacggagacctggtggactacctgcaccgcaacaaacacaccttcctgcagcaccactccgacaagcgccgcccgcccagcgcggagctctacagcaatgctctgcccgttgggctccccctgcccagccatgtgtccttgaccggggagagcgacggtggctacatggacatgagcaaggacgagtcggtggactatgtgcccatgctggacatgaaaggagacgtcaaatatgcagacatcgagtcctccaactacatggccccttacgataactacgttccctctgcccctgagaggacctgccgagcaactttgatcaacgagtctccagtgctaagctacatggacctcgtgggcttcagctaccaggtggccaatggcatggagtttctggcctccaagaactgcgtccacagagacctggcggctaggaacgtgctcatctgtgaaggcaagctggtcaagatctgtgactttggcctggctcgagacatcatgcgggactcgaattacatctccaaaggcagcacctttttgcctttaaagtggatggctccggagagcatcttcaacagcctctacaccaccctgagcgacgtgtggtccttcgggatcctgctctgggagatcttcaccttgggtggcaccccttacccagagctgcccatgaacgagcagttctacaatgccatcaaacggggttaccgcatggcccagcctgcccatgcctccgacgagatctatgagatcatgcagaagtgctgggaagagaagtttgagattcggccccccttctcccagctggtgctgcttctcgagagactgttgggcgaaggttacaaaaagaagtaccagcaggtggatgaggagtttctgaggagtgaccacccagccatccttcggtcccaggcccgcttgcctgggttccatggcctccgatctcccctggacaccagctccgtcctctatactgccgtgcagcccaatgagggtgacaacgactatatcatccccctgcctgaccccaaacccgaggttgctgacgagggcccactggagggttcccccagcctagccagctccaccctgaatgaagtcaacacctcctcaaccatctcctgtgacagccccctggagccccaggacgaaccagagccagagccccagcttgagctccaggtggagccggagccagagctggaacagttgccggattcggggtgccctgcgcctcgggcggaagcagaggatagcttcctgtagggggctggcccctaccctgccctgcctgaagctccccccctgccagcacccagcatctcctggcctggcctgaccgggcttcctgtcagccaggctgcccttatcagctgtccccttctggaagctttctgctcctgacgtgttgtgccccaaaccctggggctggcttaggaggcaagaaaactgcaggggccgtgaccagccctctgcctccagggaggccaactgactctgagccagggttcccccagggaactcagttttcccatatgtaagatgggaaagttaggcttgatgacccagaatctaggattctctccctggctgacaggtggggagaccgaatccctccctgggaagattcttggagttactgaggtggtaaattaacttttttctgttcagccagctacccctcaaggaatcatagctctctcctcgcacttttatccacccaggagctagggaagagaccctagcctccctggctgctggctgagctagggcctagccttgagcagtgttgcctcatccagaagaaagccagtctcctccctatgatgccagtccctgcgttccctggcccgagctggtctggggccattaggcagcctaattaatgctggaggctgagccaagtacaggacacccccagcctgcagcccttgcccagggcacttggagcacacgcagccatagcaagtgcctgtgtccctgtccttcaggcccatcagtcctggggctttttctttatcaccctcagtcttaatccatccaccagagtctagaaggccagacgggccccgcatctgtgatgagaatgtaaatgtgccagtgtggagtggccacgtgtgtgtgccagtatatggccctggctctgcattggacctgctatgaggctttggaggaatccctcaccctctctgggcctcagtttccccttcaaaaaatgaataagtcggacttattaactctgagtgccttgccagcactaacattctagagtattccaggtggttgcacatttgtccagatgaagcaaggccatataccctaaacttccatcctgggggtcagctgggctcctgggagattccagatcacacatcacactctggggactcaggaaccatgccccttccccaggcccccagcaagtctcaagaacacagctgcacaggccttgacttagagtgacagccggtgtcctggaaagcccccagcagctgccccagggacatgggaagaccacgggacctctttcactacccacgatgacctccgggggtatcctgggcaaaagggacaaagagggcaaatgagatcacctcctgcagcccaccactccagcacctgtgccgaggtctgcgtcgaagacagaatggacagtgaggacagttatgtcttgtaaaagacaagaagcttcagatgggtaccccaagaaggatgtgagaggtgggcgctttggaggtttgcccctcacccaccagctgccccatccctgaggcagcgctccatgggggtatggttttgtcactgcccagacctagcagtgacatctcattgtccccagcccagtgggcattggaggtgccaggggagtcagggttgtagccaagacgcccccgcacggggagggttgggaagggggtgcaggaagctcaacccctctgggcaccaaccctgcattgcaggttggcaccttacttccctgggatccccagagttggtccaaggagggagagtgggttctcaatacggtaccaaagatataatcacctaggtttacaaatatttttaggactcacgttaactcacatttatacagcagaaatgctattttgtatgctgttaagtttttctatctgtgtacttttttttaagggaaagattttaatattaaacctggtgcttctcactcacagactttgtggtctctctcgggtttgggttcctgcccatagggagtgtggagtggggcacatgaggctcacccagacgcagacccccagacaggtcccttcagctctgagtctcattcattcatctgtaaagtggggattttcgctctcccacccctcgctggaagctggggggcctagacttgggcttggtttcccaaggtgggaagcgagcaggcttttctggctccacagagcctggccttgagtcgggcaggagggtgtggggctgcagggctgctccaaggctctggtgctgaggcgtctcactgcctccaccatgtgctttggctttggctatcagctgggacaccctcccctccactccgcccacaggcccggattgaggccggcgtgctctgtgacaggcagctgctagagcccagattccaggtccaggtgagtcatgatcaggccccaggtaggagaagggcagacagagtgtccaaaagcgtgagagcacgaagtgaggagaaggtggagaagagagaagaggaagaggaagaggaagagaggaagcggagggaactgcggccaggctaaaaggggaagaagaggatcagcccaaggaggaggaagaggaaaacaagacaaacagccagtgcagaggagaggaacgtgtgtccagtgtcccgatccctgcggagctagtagctgagagctctgtgccctgggcaccttgcagccctgcacctgcctgccacttccccaccgaggccatgggcccaggagttctgctgctcctgctggtggccacagcttggcatggtcagggaatcccagtgatagagcccagtgtccccgagctggtcgtgaagccaggagcaacggtgaccttgcgatgtgtgggcaatggcagcgtggaatgggatggccccccatcacctcactggaccctgtactctgatggctccagcagcatcctcagcaccaacaacgctaccttccaaaacacggggacctatcgctgcactgagcctggagaccccctgggaggcagcgccgccatccacctctatgtcaaagaccctgcccggccctggaacgtgctagcacaggaggtggtcgtgttcgaggaccaggacgcactactgccctgtctgctcacagacccggtgctggaagcaggcgtctcgctggtgcgtgtgcgtggccggcccctcatgcgccacaccaactactccttctcgccctggcatggcttcaccatccacagggccaagttcattcagagccaggactatcaatgcagtgccctgatgggtggcaggaaggtgatgtccatcagcatccggctgaaagtgcagaaagtcatcccagggcccccagccttgacactggtgcctgcagagctggtgcggattcgaggggaggctgcccagatcgtgtgctcagccagcagcgttgatgttaactttgatgtcttcctccaacacaacaacactaagctcgcaatccctcaacaatctgactttcataataaccgttaccaaaaagtcctgaccctcaacctcgatcaagtagatttccaacatgccggcaactactcctgcgtggccagcaacgtgcagggcaagcactccacctccatgttcttccgggtggtagagagtgcctacttgaacttgagctctgagcagaacctcatccaggaggtgaccgtgggggaggggctcaacctcaaagtcatggtggaggcctacccaggcctgcaaggttttaactggacctacctgggacccttttctgaccaccagcctgagcccaagcttgctaatgctaccaccaaggacacatacaggcacaccttcaccctctctctgccccgcctgaagccctctgaggctggccgctactccttcctggccagaaacccaggaggctggagagctctgacgtttgagctcacccttcgataccccccagaggtaagcgtcatatggacattcatcaacggctctggcacccttttgtgtgctgcctctgggtacccccagcccaacgtgacatggctgcagtgcagtggccacactgataggtgtgatgaggcccaagtgctgcaggtctgggatgacccataccctgaggtcctgagccaggagcccttccacaaggtgacggtgcagagcctgctgactgttgagaccttagagcacaaccaaacctacgagtgcagggcccacaacagcgtggggagtggctcctgggccttcatacccatctctgcaggagcccacacgcatcccccggatgagttcctcttcacaccagtggtggtcgcctgcatgtccatcatggccttgctgctgctgctgctcctgctgctattgtacaagtataagcagaagcccaagtaccaggtccgctggaagatcatcgagagctatgagggcaacagttatactttcatcgaccccacgcagctgccttacaacgagaagtgggagttcccccggaacaacctgcagtttggtaagaccctcggagctggagcctttgggaaggtggtggaggccacggcctttggtctgggcaaggaggatgctgtcctgaaggtggctgtgaagatgctgaagtccacggcccatgctgatgagaaggaggccctcatgtccgagctgaagatcatgagccacctgggccagcacgagaacatcgtcaaccttctgggagcctgtacccatggaggccctgtactggtcatcacggagtactgttgctatggcgacctgctcaactttctgcgaaggaaggctgaggccatgctgggacccagcctgagccccggccaggaccccgagggaggcgtcgactataagaacatccacctcgagaagaaatatgtccgcagggacagtggcttctccagccagggtgtggacacctatgtggagatgaggcctgtctccacttcttcaaatgactccttctctgagcaagacctggacaaggaggatggacggcccctggagctccgggacctgcttcacttctccagccaagtagcccagggcatggccttcctcgcttccaagaattgcatccaccgggacgtggcagcgcgtaacgtgctgttgaccaatggtcatgtggccaagattggggacttcgggctggctagggacatcatgaatgactccaactacattgtcaagggcaatgcccgcctgcctgtgaagtggatggccccagagagcatctttgactgtgtctacacggttcagagcgacgtctggtcctatggcatcctcctctgggagatcttctcacttgggctgaatccctaccctggcatcctggtgaacagcaagttctataaactggtgaaggatggataccaaatggcccagcctgcatttgccccaaagaatatatacagcatcatgcaggcctgctgggccttggagcccacccacagacccaccttccagcagatctgctccttccttcaggagcaggcccaaaagaacgtggagaaaaaaattgacaaatacccagaggtcctcaagacccccggactcctggtttgagcccaataaagactgttaattcctca

SEQ ID NO: 403696 - DNA, 11511 bp, Homo sapiens
tcctgaggctgccagcagccagcagtgactgcccgccctatctgggacccaggatcgctctgtgagcaacttggagccagagaggagatcaacaaggaggaggagagagccggcccctcagccctgctgcccagcagcagcctgtgctcgccctgcccaacgcagacagccagacccagggcggcccctctggcggctctgctcctcccgaaggatgcttggggagtgaggcgaagctgggccgctcctctcccctacagcagcccccttcctccatccctctgttctcctgagccttcaggagcctgcaccagtcctgcctgtccttctactcagctgttacccactctgggaccagcagtctttctgataactgggagagggcagtaaggaggacttcctggagggggtgactgtccagagcctggaactgtgcccacaccagaagccatcagcagcaaggacaccatgcggcttccgggtgcgatgccagctctggccctcaaaggcgagctgctgttgctgtctctcctgttacttctggaaccacagatctctcagggcctggtcgtcacacccccggggccagagcttgtcctcaatgtctccagcaccttcgttctgacctgctcgggttcagctccggtggtgtgggaacggatgtcccaggagcccccacaggaaatggccaaggcccaggatggcaccttctccagcgtgctcacactgaccaacctcactgggctagacacgggagaatacttttgcacccacaatgactcccgtggactggagaccgatgagcggaaacggctctacatctttgtgccagatcccaccgtgggcttcctccctaatgatgccgaggaactattcatctttctcacggaaataactgagatcaccattccatgccgagtaacagacccacagctggtggtgacactgcacgagaagaaaggggacgttgcactgcctgtcccctatgatcaccaacgtggcttttctggtatctttgaggacagaagctacatctgcaaaaccaccattggggacagggaggtggattctgatgcctactatgtctacagactccaggtgtcatccatcaacgtctctgtgaacgcagtgcagactgtggtccgccagggtgagaacatcaccctcatgtgcattgtgatcgggaatgaggtggtcaacttcgagtggacatacccccgcaaagaaagtgggcggctggtggagccggtgactgacttcctcttggatatgccttaccacatccgctccatcctgcacatccccagtgccgagttagaagactcggggacctacacctgcaatgtgacggagagtgtgaatgaccatcaggatgaaaaggccatcaacatcaccgtggttgagagcggctacgtgcggctcctgggagaggtgggcacactacaatttgctgagctgcatcggagccggacactgcaggtagtgttcgaggcctacccaccgcccactgtcctgtggttcaaagacaaccgcaccctgggcgactccagcgctggcgaaatcgccctgtccacgcgcaacgtgtcggagacccggtatgtgtcagagctgacactggttcgcgtgaaggtggcagaggctggccactacaccatgcgggccttccatgaggatgctgaggtccagctctccttccagctacagatcaatgtccctgtccgagtgctggagctaagtgagagccaccctgacagtggggaacagacagtccgctgtcgtggccggggcatgccccagccgaacatcatctggtctgcctgcagagacctcaaaaggtgtccacgtgagctgccgcccacgctgctggggaacagttccgaagaggagagccagctggagactaacgtgacgtactgggaggaggagcaggagtttgaggtggtgagcacactgcgtctgcagcacgtggatcggccactgtcggtgcgctgcacgctgcgcaacgctgtgggccaggacacgcaggaggtcatcgtggtgccacactccttgccctttaaggtggtggtgatctcagccatcctggccctggtggtgctcaccatcatctcccttatcatcctcatcatgctttggcagaagaagccacgttacgagatccgatggaaggtgattgagtctgtgagctctgacggccatgagtacatctacgtggaccccatgcagctgccctatgactccacgtgggagctgccgcgggaccagcttgtgctgggacgcaccctcggctctggggcctttgggcaggtggtggaggccacggctcatggcctgagccattctcaggccacgatgaaagtggccgtcaagatgcttaaatccacagcccgcagcagtgagaagcaagcccttatgtcggagctgaagatcatgagtcaccttgggccccacctgaacgtggtcaacctgttgggggcctgcaccaaaggaggacccatctatatcatcactgagtactgccgctacggagacctggtggactacctgcaccgcaacaaacacaccttcctgcagcaccactccgacaagcgccgcccgcccagcgcggagctctacagcaatgctctgcccgttgggctccccctgcccagccatgtgtccttgaccggggagagcgacggtggctacatggacatgagcaaggacgagtcggtggactatgtgcccatgctggacatgaaaggagacgtcaaatatgcagacatcgagtcctccaactacatggccccttacgataactacgttccctctgcccctgagaggacctgccgagcaactttgatcaacgagtctccagtgctaagctacatggacctcgtgggcttcagctaccaggtggccaatggcatggagtttctggcctccaagaactgcgtccacagagacctggcggctaggaacgtgctcatctgtgaaggcaagctggtcaagatctgtgactttggcctggctcgagacatcatgcgggactcgaattacatctccaaaggcagcacctttttgcctttaaagtggatggctccggagagcatcttcaacagcctctacaccaccctgagcgacgtgtggtccttcgggatcctgctctgggagatcttcaccttgggtggcaccccttacccagagctgcccatgaacgagcagttctacaatgccatcaaacggggttaccgcatggcccagcctgcccatgcctccgacgagatctatgagatcatgcagaagtgctgggaagagaagtttgagattcggccccccttctcccagctggtgctgcttctcgagagactgttgggcgaaggttacaaaaagaagtaccagcaggtggatgaggagtttctgaggagtgaccacccagccatccttcggtcccaggcccgcttgcctgggttccatggcctccgatctcccctggacaccagctccgtcctctatactgccgtgcagcccaatgagggtgacaacgactatatcatccccctgcctgaccccaaacccgaggttgctgacgagggcccactggagggttcccccagcctagccagctccaccctgaatgaagtcaacacctcctcaaccatctcctgtgacagccccctggagccccaggacgaaccagagccagagccccagcttgagctccaggtggagccggagccagagctggaacagttgccggattcggggtgccctgcgcctcgggcggaagcagaggatagcttcctgtagggggctggcccctaccctgccctgcctgaagctccccccctgccagcacccagcatctcctggcctggcctgaccgggcttcctgtcagccaggctgcccttatcagctgtccccttctggaagctttctgctcctgacgtgttgtgccccaaaccctggggctggcttaggaggcaagaaaactgcaggggccgtgaccagccctctgcctccagggaggccaactgactctgagccagggttcccccagggaactcagttttcccatatgtaagatgggaaagttaggcttgatgacccagaatctaggattctctccctggctgacaggtggggagaccgaatccctccctgggaagattcttggagttactgaggtggtaaattaacttttttctgttcagccagctacccctcaaggaatcatagctctctcctcgcacttttatccacccaggagctagggaagagaccctagcctccctggctgctggctgagctagggcctagccttgagcagtgttgcctcatccagaagaaagccagtctcctccctatgatgccagtccctgcgttccctggcccgagctggtctggggccattaggcagcctaattaatgctggaggctgagccaagtacaggacacccccagcctgcagcccttgcccagggcacttggagcacacgcagccatagcaagtgcctgtgtccctgtccttcaggcccatcagtcctggggctttttctttatcaccctcagtcttaatccatccaccagagtctagaaggccagacgggccccgcatctgtgatgagaatgtaaatgtgccagtgtggagtggccacgtgtgtgtgccagtatatggccctggctctgcattggacctgctatgaggctttggaggaatccctcaccctctctgggcctcagtttccccttcaaaaaatgaataagtcggacttattaactctgagtgccttgccagcactaacattctagagtattccaggtggttgcacatttgtccagatgaagcaaggccatataccctaaacttccatcctgggggtcagctgggctcctgggagattccagatcacacatcacactctggggactcaggaaccatgccccttccccaggcccccagcaagtctcaagaacacagctgcacaggccttgacttagagtgacagccggtgtcctggaaagcccccagcagctgccccagggacatgggaagaccacgggacctctttcactacccacgatgacctccgggggtatcctgggcaaaagggacaaagagggcaaatgagatcacctcctgcagcccaccactccagcacctgtgccgaggtctgcgtcgaagacagaatggacagtgaggacagttatgtcttgtaaaagacaagaagcttcagatgggtaccccaagaaggatgtgagaggtgggcgctttggaggtttgcccctcacccaccagctgccccatccctgaggcagcgctccatgggggtatggttttgtcactgcccagacctagcagtgacatctcattgtccccagcccagtgggcattggaggtgccaggggagtcagggttgtagccaagacgcccccgcacggggagggttgggaagggggtgcaggaagctcaacccctctgggcaccaaccctgcattgcaggttggcaccttacttccctgggatccccagagttggtccaaggagggagagtgggttctcaatacggtaccaaagatataatcacctaggtttacaaatatttttaggactcacgttaactcacatttatacagcagaaatgctattttgtatgctgttaagtttttctatctgtgtacttttttttaagggaaagattttaatattaaacctggtgcttctcactcacagactttgtggtctctctcgggtttgggttcctgcccatagggagtgtggagtggggcacatgaggctcacccagacgcagacccccagacaggtcccttcagctctgagtctcattcattcatctgtaaagtggggattttcgctctcccacccctcgctggaagctggggggcctagacttgggcttggtttcccaaggtgggaagcgagcaggcttttctggctccacagagcctggccttgagtcgggcaggagggtgtggggctgcagggctgctccaaggctctggtgctgaggcgtctcactgcctccaccatgtgctttggctttggctatcagctgggacaccctcccctccactccgcccacaggcccggattgaggccggcgtgctctgtgacaggcagctgctagagcccagattccaggtccaggtgagtcatgatcaggccccaggtaggagaagggcagacagagtgtccaaaagcgtgagagcacgaagtgaggagaaggtggagaagagagaagaggaagaggaagaggaagagaggaagcggagggaactgcggccaggctaaaaggggaagaagaggatcagcccaaggaggaggaagaggaaaacaagacaaacagccagtgcagaggagaggaacgtgtgtccagtgtcccgatccctgcggagctagtagctgagagctctgtgccctgggcaccttgcagccctgcacctgcctgccacttccccaccgaggccatgggcccaggagttctgctgctcctgctggtggccacagcttggcatggtcagggaatcccagtgatagagcccagtgtccccgagctggtcgtgaagccaggagcaacggtgaccttgcgatgtgtgggcaatggcagcgtggaatgggatggccccccatcacctcactggaccctgtactctgatggctccagcagcatcctcagcaccaacaacgctaccttccaaaacacggggacctatcgctgcactgagcctggagaccccctgggaggcagcgccgccatccacctctatgtcaaagaccctgcccggccctggaacgtgctagcacaggaggtggtcgtgttcgaggaccaggacgcactactgccctgtctgctcacagacccggtgctggaagcaggcgtctcgctggtgcgtgtgcgtggccggcccctcatgcgccacaccaactactccttctcgccctggcatggcttcaccatccacagggccaagttcattcagagccaggactatcaatgcagtgccctgatgggtggcaggaaggtgatgtccatcagcatccggctgaaagtgcagaaagtcatcccagggcccccagccttgacactggtgcctgcagagctggtgcggattcgaggggaggctgcccagatcgtgtgctcagccagcagcgttgatgttaactttgatgtcttcctccaacacaacaacactaagctcgcaatccctcaacaatctgactttcataataaccgttaccaaaaagtcctgaccctcaacctcgatcaagtagatttccaacatgccggcaactactcctgcgtggccagcaacgtgcagggcaagcactccacctccatgttcttccgggtggtagagagtgcctacttgaacttgagctctgagcagaacctcatccaggaggtgaccgtgggggaggggctcaacctcaaagtcatggtggaggcctacccaggcctgcaaggttttaactggacctacctgggacccttttctgaccaccagcctgagcccaagcttgctaatgctaccaccaaggacacatacaggcacaccttcaccctctctctgccccgcctgaagccctctgaggctggccgctactccttcctggccagaaacccaggaggctggagagctctgacgtttgagctcacccttcgataccccccagaggtaagcgtcatatggacattcatcaacggctctggcacccttttgtgtgctgcctctgggtacccccagcccaacgtgacatggctgcagtgcagtggccacactgataggtgtgatgaggcccaagtgctgcaggtctgggatgacccataccctgaggtcctgagccaggagcccttccacaaggtgacggtgcagagcctgctgactgttgagaccttagagcacaaccaaacctacgagtgcagggcccacaacagcgtggggagtggctcctgggccttcatacccatctctgcaggagcccacacgcatcccccggatgagttcctcttcacaccagtggtggtcgcctgcatgtccatcatggccttgctgctgctgctgctcctgctgctattgtacaagtataagcagaagcccaagtaccaggtccgctggaagatcatcgagagctatgagggcaacagttatactttcatcgaccccacgcagctgccttacaacgagaagtgggagttcccccggaacaacctgcagtttggtaagaccctcggagctggagcctttgggaaggtggtggaggccacggcctttggtctgggcaaggaggatgctgtcctgaaggtggctgtgaagatgctgaagtccacggcccatgctgatgagaaggaggccctcatgtccgagctgaagatcatgagccacctgggccagcacgagaacatcgtcaaccttctgggagcctgtacccatggaggccctgtactggtcatcacggagtactgttgctatggcgacctgctcaactttctgcgaaggaaggctgaggccatgctgggacccagcctgagccccggccaggaccccgagggaggcgtcgactataagaacatccacctcgagaagaaatatgtccgcagggacagtggcttctccagccagggtgtggacacctatgtggagatgaggcctgtctccacttcttcaaatgactccttctctgagcaagacctggacaaggaggatggacggcccctggagctccgggacctgcttcacttctccagccaagtagcccagggcatggccttcctcgcttccaagaattgcatccaccgggacgtggcagcgcgtaacgtgctgttgaccaatggtcatgtggccaagattggggacttcgggctggctagggacatcatgaatgactccaactacattgtcaagggcaatgcccgcctgcctgtgaagtggatggccccagagagcatctttgactgtgtctacacggttcagagcgacgtctggtcctatggcatcctcctctgggagatcttctcacttgggctgaatccctaccctggcatcctggtgaacagcaagttctataaactggtgaaggatggataccaaatggcccagcctgcatttgccccaaagaatatatacagcatcatgcaggcctgctgggccttggagcccacccacagacccaccttccagcagatctgctccttccttcaggagcaggcccaagaggacaggagagagcgggactataccaatctgccgagcagcagcagaagcggtggcagcggcagcagcagcagtgagctggaggaggagagctctagtgagcacctgacctgctgcgagcaaggggatatcgcccagcccttgctgcagcccaacaactatcagttctgctgaggagttgacgacagggagtaccactctcccctcctccaaacttcaactcctccatggatggggcgacacggggagaacatacaaactctgccttcggtcatttcactcaacagctcggcccagctctgaaacttgggaaggtgagggattcaggggaggtcagaggatcccacttcctgagcatgggccatcactgccagtcaggggctgggggctgagccctcaccccccgcctcccctactgttctcatggtgttggcctcgtgtttgctatgccaactagtagaaccttctttcctaatccccttatcttcatggaaatggactgactttatgcctatgaagtccccaggagctacactgatactgagaaaaccaggctctttggggctagacagactggcagagagtgagatctccctctctgagaggagcagcagatgctcacagaccacactcagctcaggccccttggagcaggatggctcctctaagaatctcacaggacctcttagtctctgccctatacgccgccttcactccacagcctcacccctcccacccccatactggtactgctgtaatgagccaagtggcagctaaaagttgggggtgttctgcccagtcccgtcattctgggctagaaggcaggggaccttggcatgtggctggccacaccaagcaggaagcacaaactcccccaagctgactcatcctaactaacagtcacgccgtgggatgtctctgtccacattaaactaacagcattaatgcaaaaaaaaaatggttctttgtgccacatgagtacctgcaaattccctggaacgtctttctttccttccctccttcacatgaagtgacgagctcacagctgtggagcttgaccacactgtgccccatacgatgtgcacggaattgactcctgctacaccaaaaccagataatttaataaactttattcttgttgggggaagagggagggaaaaaaagccacctactccactcaataaattaacacatggccaattcccaggccctaaacaaaccttgggcacttgagccagtcctgctgtttccttatggcccagtctgcttccccttcatagaagggagtttttcctactgctgctaggttatgtcatgaccagggaccacatcccctctgtggagagggtcccaggcccagagaggatattggctgcagcagcagtggccagggaaaggaggaaggggatgctcttcctcaaagcttggggtggagaggacagtgctggaagagagctgtggctgactgttcctccctcctcagcttcccccaaatgtgggtacaggaagagcaagagagaaatgcatccctccttcagggagaatcaagagcccaaagggacccctagagttaatgaggccacccaggcccctagtcaaaggcaacaggctaagcaattcatcagactgagggggctgaaaccagggctcctcaggggtgggagagacctcagcagccttcccacctagtgctggggctcacgccttagcccacccaggacctccaccctgacccacaccgcaggccccacggaacccaccagctacgagcctttccctcagcctcccctccattaaacataccgtgtcccccaagtgctctctcggggccagaagaggtttcctggtaccactcctgacccctggagggttgagaactgaggaccctgggtcccaccatgctcagggaatggaagctctttggtcagtcccagcagtcagaggccctccccacaggagaccacttctgcaggtcccctggatagctctgcctcaggcaagggccttactatggcttgagagatggtgtagtccctgtacaacagcctggcttattctgccactgcggccacctcctcttcctcaccctcctcctctgtctctgtcttgatctgagcaacccaaggcggtagagggtgtcacgaatgaccacctcaccaggctggcagctctgtacaatgtcatggatctgacgattgacaatttcgcggctggtgaggaagtccatgaggcggttgtagaggtaatagtgagtggcattgtcgaaggcaatgggccgctggcggacaccgtttggt

SEQ ID NO: 403697 - DNA, 9783 bp, Homo sapiens
tcctgaggctgccagcagccagcagtgactgcccgccctatctgggacccaggatcgctctgtgagcaacttggagccagagaggagatcaacaaggaggaggagagagccggcccctcagccctgctgcccagcagcagcctgtgctcgccctgcccaacgcagacagccagacccagggcggcccctctggcggctctgctcctcccgaaggatgcttggggagtgaggcgaagctgggccgctcctctcccctacagcagcccccttcctccatccctctgttctcctgagccttcaggagcctgcaccagtcctgcctgtccttctactcagctgttacccactctgggaccagcagtctttctgataactgggagagggcagtaaggaggacttcctggagggggtgactgtccagagcctggaactgtgcccacaccagaagccatcagcagcaaggacaccatgcggcttccgggtgcgatgccagctctggccctcaaaggcgagctgctgttgctgtctctcctgttacttctggaaccacagatctctcagggcctggtcgtcacacccccggggccagagcttgtcctcaatgtctccagcaccttcgttctgacctgctcgggttcagctccggtggtgtgggaacggatgtcccaggagcccccacaggaaatggccaaggcccaggatggcaccttctccagcgtgctcacactgaccaacctcactgggctagacacgggagaatacttttgcacccacaatgactcccgtggactggagaccgatgagcggaaacggctctacatctttgtgccagatcccaccgtgggcttcctccctaatgatgccgaggaactattcatctttctcacggaaataactgagatcaccattccatgccgagtaacagacccacagctggtggtgacactgcacgagaagaaaggggacgttgcactgcctgtcccctatgatcaccaacgtggcttttctggtatctttgaggacagaagctacatctgcaaaaccaccattggggacagggaggtggattctgatgcctactatgtctacagactccaggtgtcatccatcaacgtctctgtgaacgcagtgcagactgtggtccgccagggtgagaacatcaccctcatgtgcattgtgatcgggaatgaggtggtcaacttcgagtggacatacccccgcaaagaaagtgggcggctggtggagccggtgactgacttcctcttggatatgccttaccacatccgctccatcctgcacatccccagtgccgagttagaagactcggggacctacacctgcaatgtgacggagagtgtgaatgaccatcaggatgaaaaggccatcaacatcaccgtggttgagagcggctacgtgcggctcctgggagaggtgggcacactacaatttgctgagctgcatcggagccggacactgcaggtagtgttcgaggcctacccaccgcccactgtcctgtggttcaaagacaaccgcaccctgggcgactccagcgctggcgaaatcgccctgtccacgcgcaacgtgtcggagacccggtatgtgtcagagctgacactggttcgcgtgaaggtggcagaggctggccactacaccatgcgggccttccatgaggatgctgaggtccagctctccttccagctacagatcaatgtccctgtccgagtgctggagctaagtgagagccaccctgacagtggggaacagacagtccgctgtcgtggccggggcatgccccagccgaacatcatctggtctgcctgcagagacctcaaaaggtgtccacgtgagctgccgcccacgctgctggggaacagttccgaagaggagagccagctggagactaacgtgacgtactgggaggaggagcaggagtttgaggtggtgagcacactgcgtctgcagcacgtggatcggccactgtcggtgcgctgcacgctgcgcaacgctgtgggccaggacacgcaggaggtcatcgtggtgccacactccttgccctttaaggtggtggtgatctcagccatcctggccctggtggtgctcaccatcatctcccttatcatcctcatcatgctttggcagaagaagccacgttacgagatccgatggaaggtgattgagtctgtgagctctgacggccatgagtacatctacgtggaccccatgcagctgccctatgactccacgtgggagctgccgcgggaccagcttgtgctgggacgcaccctcggctctggggcctttgggcaggtggtggaggccacggctcatggcctgagccattctcaggccacgatgaaagtggccgtcaagatgcttaaatccacagcccgcagcagtgagaagcaagcccttatgtcggagctgaagatcatgagtcaccttgggccccacctgaacgtggtcaacctgttgggggcctgcaccaaaggaggacccatctatatcatcactgagtactgccgctacggagacctggtggactacctgcaccgcaacaaacacaccttcctgcagcaccactccgacaagcgccgcccgcccagcgcggagctctacagcaatgctctgcccgttgggctccccctgcccagccatgtgtccttgaccggggagagcgacggtggctacatggacatgagcaaggacgagtcggtggactatgtgcccatgctggacatgaaaggagacgtcaaatatgcagacatcgagtcctccaactacatggccccttacgataactacgttccctctgcccctgagaggacctgccgagcaactttgatcaacgagtctccagtgctaagctacatggacctcgtgggcttcagctaccaggtggccaatggcatggagtttctggcctccaagaactgcgtccacagagacctggcggctaggaacgtgctcatctgtgaaggcaagctggtcaagatctgtgactttggcctggctcgagacatcatgcgggactcgaattacatctccaaaggcagcacctttttgcctttaaagtggatggctccggagagcatcttcaacagcctctacaccaccctgagcgacgtgtggtccttcgggatcctgctctgggagatcttcaccttgggtggcaccccttacccagagctgcccatgaacgagcagttctacaatgccatcaaacggggttaccgcatggcccagcctgcccatgcctccgacgagatctatgagatcatgcagaagtgctgggaagagaagtttgagattcggccccccttctcccagctggtgctgcttctcgagagactgttgggcgaaggttacaaaaagaagtaccagcaggtggatgaggagtttctgaggagtgaccacccagccatccttcggtcccaggcccgcttgcctgggttccatggcctccgatctcccctggacaccagctccgtcctctatactgccgtgcagcccaatgagggtgacaacgactatatcatccccctgcctgaccccaaacccgaggttgctgacgagggcccactggagggttcccccagcctagccagctccaccctgaatgaagtcaacacctcctcaaccatctcctgtgacagccccctggagccccaggacgaaccagagccagagccccagcttgagctccaggtggagccggagccagagctggaacagttgccggattcggggtgccctgcgcctcgggcggaagcagaggatagcttcctgtagggggctggcccctaccctgccctgcctgaagctccccccctgccagcacccagcatctcctggcctggcctgaccgggcttcctgtcagccaggctgcccttatcagctgtccccttctggaagctttctgctcctgacgtgttgtgccccaaaccctggggctggcttaggaggcaagaaaactgcaggggccgtgaccagccctctgcctccagggaggccaactgactctgagccagggttcccccagggaactcagttttcccatatgtaagatgggaaagttaggcttgatgacccagaatctaggattctctccctggctgacaggtggggagaccgaatccctccctgggaagattcttggagttactgaggtggtaaattaacttttttctgttcagccagctacccctcaaggaatcatagctctctcctcgcacttttatccacccaggagctagggaagagaccctagcctccctggctgctggctgagctagggcctagccttgagcagtgttgcctcatccagaagaaagccagtctcctccctatgatgccagtccctgcgttccctggcccgagctggtctggggccattaggcagcctaattaatgctggaggctgagccaagtacaggacacccccagcctgcagcccttgcccagggcacttggagcacacgcagccatagcaagtgcctgtgtccctgtccttcaggcccatcagtcctggggctttttctttatcaccctcagtcttaatccatccaccagagtctagaaggccagacgggccccgcatctgtgatgagaatgtaaatgtgccagtgtggagtggccacgtgtgtgtgccagtatatggccctggctctgcattggacctgctatgaggctttggaggaatccctcaccctctctgggcctcagtttccccttcaaaaaatgaataagtcggacttattaactctgagtgccttgccagcactaacattctagagtattccaggtggttgcacatttgtccagatgaagcaaggccatataccctaaacttccatcctgggggtcagctgggctcctgggagattccagatcacacatcacactctggggactcaggaaccatgccccttccccaggcccccagcaagtctcaagaacacagctgcacaggccttgacttagagtgacagccggtgtcctggaaagcccccagcagctgccccagggacatgggaagaccacgggacctctttcactacccacgatgacctccgggggtatcctgggcaaaagggacaaagagggcaaatgagatcacctcctgcagcccaccactccagcacctgtgccgaggtctgcgtcgaagacagaatggacagtgaggacagttatgtcttgtaaaagacaagaagcttcagatgggtaccccaagaaggatgtgagaggtgggcgctttggaggtttgcccctcacccaccagctgccccatccctgaggcagcgctccatgggggtatggttttgtcactgcccagacctagcagtgacatctcattgtccccagcccagtgggcattggaggtgccaggggagtcagggttgtagccaagacgcccccgcacggggagggttgggaagggggtgcaggaagctcaacccctctgggcaccaaccctgcattgcaggttggcaccttacttccctgggatccccagagttggtccaaggagggagagtgggttctcaatacggtaccaaagatataatcacctaggtttacaaatatttttaggactcacgttaactcacatttatacagcagaaatgctattttgtatgctgttaagtttttctatctgtgtacttttttttaagggaaagattttaatattaaacctggtgcttctcactcacagactttgtggtctctctcgggtttgggttcctgcccatagggagtgtggagtggggcacatgaggctcacccagacgcagacccccagacaggtcccttcagctctgagtctcattcattcatctgtaaagtggggattttcgctctcccacccctcgctggaagctggggggcctagacttgggcttggtttcccaaggtgggaagcgagcaggcttttctggctccacagagcctggccttgagtcgggcaggagggtgtggggctgcagggctgctccaaggctctggtgctgaggcgtctcactgcctccaccatgtgctttggctttggctatcagctgggacaccctcccctccactccgcccacaggcccggattgaggccggcgtgctctgtgacaggcagctgctagagcccagattccaggtccaggtgagtcatgatcaggccccaggtaggagaagggcagacagagtgtccaaaagcgtgagagcacgaagtgaggagaaggtggagaagagagaagaggaagaggaagaggaagagaggaagcggagggaactgcggccaggctaaaaggggaagaagaggatcagcccaaggaggaggaagaggaaaacaagacaaacagccagtgcagaggagaggaacgtgtgtccagtgtcccgatccctgcggagctagtagctgagagctctgtgccctgggcaccttgcagccctgcacctgcctgccacttccccaccgaggccatgggcccaggagttctgctgctcctgctggtggccacagcttggcatggtcagggaatcccagtgatagagcccagtgtccccgagctggtcgtgaagccaggagcaacggtgaccttgcgatgtgtgggcaatggcagcgtggaatgggatggccccccatcacctcactggaccctgtactctgatggctccagcagcatcctcagcaccaacaacgctaccttccaaaacacggggacctatcgctgcactgagcctggagaccccctgggaggcagcgccgccatccacctctatgtcaaagaccctgcccggccctggaacgtgctagcacaggaggtggtcgtgttcgaggaccaggacgcactactgccctgtctgctcacagacccggtgctggaagcaggcgtctcgctggtgcgtgtgcgtggccggcccctcatgcgccacaccaactactccttctcgccctggcatggcttcaccatccacagggccaagttcattcagagccaggactatcaatgcagtgccctgatgggtggcaggaaggtgatgtccatcagcatccggctgaaagtgcagaaagtcatcccagggcccccagccttgacactggtgcctgcagagctggtgcggattcgaggggaggctgcccagatcgtgtgctcagccagcagcgttgatgttaactttgatgtcttcctccaacacaacaacactaagctcgcaatccctcaacaatctgactttcataataaccgttaccaaaaagtcctgaccctcaacctcgatcaagtagatttccaacatgccggcaactactcctgcgtggccagcaacgtgcagggcaagcactccacctccatgttcttccgggtggtagagagtgcctacttgaacttgagctctgagcagaacctcatccaggaggtgaccgtgggggaggggctcaacctcaaagtcatggtggaggcctacccaggcctgcaaggttttaactggacctacctggcacccttttgtgtgctgcctctgggtacccccagcccaacgtgacatggctgcatgcagggcccacaacagcgtggggagtggctcctgggccttcatacccatctctgcaggagcccacacgcatcccccggatgagttcctcttcacaccagtggtggtcgcctgcatgtccatcatggccttgctgctgctgctgctcctgctgctattgtacaagtataagcagaagcccaagtaccaggtccgctggaagatcatcgagagctatgagggcaacagttatactttcatcgaccccacgcagctgccttacaacgagaagtgggagttcccccggaacaacctgcagtttggtaagaccctcggagctggagcctttgggaaggtggtggaggccacggcctttggtctgggcaaggaggatgctgtcctgaaggtggctgtgaagatgctgaagtccacggcccatgctgatgagaaggaggccctcatgtccgagctgaagatcatgagccacctgggccagcacgagaacatcgtcaaccttctgggagcctgtacccatggaggccctgtactggtcatcacggagtactgttgctatggcgacctgctcaactttctgcgaaggaaggctgaggccatgctgggacccagcctgagccccggccaggaccccgagggaggcgtcgactataagaacatccacctcgagaagaaatatgtccgcagggacagtggcttctccagccagggtgtggacacctatgtggagatgaggcctgtctccacttcttcaaatgactccttctctgagcaagacctggacaaggaggatggacggcccctggagctccgggacctgcttcacttctccagccaagtagcccagggcatggccttcctcgcttccaagaattgcatccaccgggacgtggcagcgcgtaacgtgctgttgaccaatggtcatgtggccaagattggggacttcgggctggctagggacatcatgaatgactccaactacattgtcaagggcaatgcccgcctgcctgtgaagtggatggccccagagagcatctttgactgtgtctacacggttcagagcgacgtctggtcctatggcatcctcctctgggagatcttctcacttgggctgaatccctaccctggcatcctggtgaacagcaagttctataaactggtgaaggatggataccaaatggcccagcctgcatttgccccaaagaatatatacagcatcatgcaggcctgctgggccttggagcccacccacagacccaccttccagcagatctgctccttccttcaggagcaggcccaagaggacaggagagagcgggactataccaatctgccgagcagcagcagaagcggtggcagcggcagcagcagcagtgagctggaggaggagagctctagtgagcacctgacctgctgcgagcaaggggatatcgcccagcccttgctgcagcccaacaactatcagttctgctgaggagttgacgacagggagtaccactctcccctcctccaaacttcaactcctccatggatggggcgacacggggagaacatacaaactctgccttcggtcatttcactcaacagctcggcccagctctgaaacttgggaaggtgagggattcaggggaggtcagaggatcccacttcctgagcatgggccatcactgccagtcaggggctgggggctgagccctcaccccccgcctcccctactgttctcatggtgttggcctcgtgtttgctatgccaactagtagaaccttctttcctaatccccttatcttcatggaaatggactgactttatgcctatgaagtccccaggagctacactgatactgagaaaaccaggctctttggggctagacagactggcagagagtgagatctccctctctgagaggagcagcagatgctcacagaccacactcagctcaggccccttggagcaggatggctcctctaagaatctcacaggacctcttagtctctgccctatacgccgccttcactccacagcctcacccctcccacccccatactggtactgctgtaatgagccaagtggcagctaaaagttgggggtgttctgcccagtcccgtcattctgggctagaaggcaggggaccttggcatgtggctggccacaccaagcaggaagcacaaactcccccaagctgactcatcctaactaacagtcacgccgtgggatgtctctgtccacattaaactaacagcattaatgca

SEQ ID NO: 403698 - DNA, 8767 bp, Homo sapiens
ctgaggccttgagggtggaggagactcgaggcttgtaagggccagtgtgagccccactttgttaactaccgtcaccactccaaccccaactgggccctttgggtgaagtggggagaagtggcctccgtgctgaggtctggattcatcaggctgggggtctcagccattgctccctcagtggccactcactcagtccaccggccactcggtcaggcatggagcttggagtctgaccgagctgtggcagccccagcaagggtgtggactcagaggagaggtaagccacaacccagccctcaggggctccagggctaatgggaggtccaggcaatggacaggaactcagaacaggatttgcaccccgtccagagctctggcagcaaggccagactgactggcagggctgaagggacgtggaggccagcagtgatctgagtgggggtagttactgaggggatggagtatttacaggacagtctgaacgtgtggcctagagcgagatgctgagggtctgacactgcaggctgatggggaggtgggcgcttctattctggacaggatgtgtacggagggatctatgatgccaaagatggggtgaggggagggtagctgcccagtttgctcatggcctgctctcatctctgcctccagccttgccctttaaggtggtggtgatctcagccatcctggccctggtggtgctcaccatcatctcccttatcatcctcatcatgctttggcagaagaagccacgttacgagatccgatggaaggtgattgagtctgtgagctctgacggccatgagtacatctacgtggaccccatgcagctgccctatgactccacgtgggagctgccgcgggaccagcttgtgctgggacgcaccctcggctctggggcctttgggcaggtggtggaggccacggctcatggcctgagccattctcaggccacgatgaaagtggccgtcaagatgcttaaatccacagcccgcagcagtgagaagcaagcccttatgtcggagctgaagatcatgagtcaccttgggccccacctgaacgtggtcaacctgttgggggcctgcaccaaaggaggacccatctatatcatcactgagtactgccgctacggagacctggtggactacctgcaccgcaacaaacacaccttcctgcagcaccactccgacaagcgccgcccgcccagcgcggagctctacagcaatgctctgcccgttgggctccccctgcccagccatgtgtccttgaccggggagagcgacggtggctacatggacatgagcaaggacgagtcggtggactatgtgcccatgctggacatgaaaggagacgtcaaatatgcagacatcgagtcctccaactacatggccccttacgataactacgttccctctgcccctgagaggacctgccgagcaactttgatcaacgagtctccagtgctaagctacatggacctcgtgggcttcagctaccaggtggccaatggcatggagtttctggcctccaagaactgcgtccacagagacctggcggctaggaacgtgctcatctgtgaaggcaagctggtcaagatctgtgactttggcctggctcgagacatcatgcgggactcgaattacatctccaaaggcagcacctttttgcctttaaagtggatggctccggagagcatcttcaacagcctctacaccaccctgagcgacgtgtggtccttcgggatcctgctctgggagatcttcaccttgggtggcaccccttacccagagctgcccatgaacgagcagttctacaatgccatcaaacggggttaccgcatggcccagcctgcccatgcctccgacgagatctatgagatcatgcagaagtgctgggaagagaagtttgagattcggccccccttctcccagctggtgctgcttctcgagagactgttgggcgaaggttacaaaaagaagtaccagcaggtggatgaggagtttctgaggagtgaccacccagccatccttcggtcccaggcccgcttgcctgggttccatggcctccgatctcccctggacaccagctccgtcctctatactgccgtgcagcccaatgagggtgacaacgactatatcatccccctgcctgaccccaaacccgaggttgctgacgagggcccactggagggttcccccagcctagccagctccaccctgaatgaagtcaacacctcctcaaccatctcctgtgacagccccctggagccccaggacgaaccagagccagagccccagcttgagctccaggtggagccggagccagagctggaacagttgccggattcggggtgccctgcgcctcgggcggaagcagaggatagcttcctgtagggggctggcccctaccctgccctgcctgaagctccccccctgccagcacccagcatctcctggcctggcctgaccgggcttcctgtcagccaggctgcccttatcagctgtccccttctggaagctttctgctcctgacgtgttgtgccccaaaccctggggctggcttaggaggcaagaaaactgcaggggccgtgaccagccctctgcctccagggaggccaactgactctgagccagggttcccccagggaactcagttttcccatatgtaagatgggaaagttaggcttgatgacccagaatctaggattctctccctggctgacaggtggggagaccgaatccctccctgggaagattcttggagttactgaggtggtaaattaacttttttctgttcagccagctacccctcaaggaatcatagctctctcctcgcacttttatccacccaggagctagggaagagaccctagcctccctggctgctggctgagctagggcctagccttgagcagtgttgcctcatccagaagaaagccagtctcctccctatgatgccagtccctgcgttccctggcccgagctggtctggggccattaggcagcctaattaatgctggaggctgagccaagtacaggacacccccagcctgcagcccttgcccagggcacttggagcacacgcagccatagcaagtgcctgtgtccctgtccttcaggcccatcagtcctggggctttttctttatcaccctcagtcttaatccatccaccagagtctagaaggccagacgggccccgcatctgtgatgagaatgtaaatgtgccagtgtggagtggccacgtgtgtgtgccagtatatggccctggctctgcattggacctgctatgaggctttggaggaatccctcaccctctctgggcctcagtttccccttcaaaaaatgaataagtcggacttattaactctgagtgccttgccagcactaacattctagagtattccaggtggttgcacatttgtccagatgaagcaaggccatataccctaaacttccatcctgggggtcagctgggctcctgggagattccagatcacacatcacactctggggactcaggaaccatgccccttccccaggcccccagcaagtctcaagaacacagctgcacaggccttgacttagagtgacagccggtgtcctggaaagcccccagcagctgccccagggacatgggaagaccacgggacctctttcactacccacgatgacctccgggggtatcctgggcaaaagggacaaagagggcaaatgagatcacctcctgcagcccaccactccagcacctgtgccgaggtctgcgtcgaagacagaatggacagtgaggacagttatgtcttgtaaaagacaagaagcttcagatgggtaccccaagaaggatgtgagaggtgggcgctttggaggtttgcccctcacccaccagctgccccatccctgaggcagcgctccatgggggtatggttttgtcactgcccagacctagcagtgacatctcattgtccccagcccagtgggcattggaggtgccaggggagtcagggttgtagccaagacgcccccgcacggggagggttgggaagggggtgcaggaagctcaacccctctgggcaccaaccctgcattgcaggttggcaccttacttccctgggatccccagagttggtccaaggagggagagtgggttctcaatacggtaccaaagatataatcacctaggtttacaaatatttttaggactcacgttaactcacatttatacagcagaaatgctattttgtatgctgttaagtttttctatctgtgtacttttttttaagggaaagattttaatattaaacctggtgcttctcactcacagactttgtggtctctctcgggtttgggttcctgcccatagggagtgtggagtggggcacatgaggctcacccagacgcagacccccagacaggtcccttcagctctgagtctcattcattcatctgtaaagtggggattttcgctctcccacccctcgctggaagctggggggcctagacttgggcttggtttcccaaggtgggaagcgagcaggcttttctggctccacagagcctggccttgagtcgggcaggagggtgtggggctgcagggctgctccaaggctctggtgctgaggcgtctcactgcctccaccatgtgctttggctttggctatcagctgggacaccctcccctccactccgcccacaggcccggattgaggccggcgtgctctgtgacaggcagctgctagagcccagattccaggtccaggtgagtcatgatcaggccccaggtaggagaagggcagacagagtgtccaaaagcgtgagagcacgaagtgaggagaaggtggagaagagagaagaggaagaggaagaggaagagaggaagcggagggaactgcggccaggctaaaaggggaagaagaggatcagcccaaggaggaggaagaggaaaacaagacaaacagccagtgcagaggagaggaacgtgtgtccagtgtcccgatccctgcggagctagtagctgagagctctgtgccctgggcaccttgcagccctgcacctgcctgccacttccccaccgaggccatgggcccaggagttctgctgctcctgctggtggccacagcttggcatggtcagggaatcccagtgatagagcccagtgtccccgagctggtcgtgaagccaggagcaacggtgaccttgcgatgtgtgggcaatggcagcgtggaatgggatggccccccatcacctcactggaccctgtactctgatggctccagcagcatcctcagcaccaacaacgctaccttccaaaacacggggacctatcgctgcactgagcctggagaccccctgggaggcagcgccgccatccacctctatgtcaaagaccctgcccggccctggaacgtgctagcacaggaggtggtcgtgttcgaggaccaggacgcactactgccctgtctgctcacagacccggtgctggaagcaggcgtctcgctggtgcgtgtgcgtggccggcccctcatgcgccacaccaactactccttctcgccctggcatggcttcaccatccacagggccaagttcattcagagccaggactatcaatgcagtgccctgatgggtggcaggaaggtgatgtccatcagcatccggctgaaagtgcagaaagtcatcccagggcccccagccttgacactggtgcctgcagagctggtgcggattcgaggggaggctgcccagatcgtgtgctcagccagcagcgttgatgttaactttgatgtcttcctccaacacaacaacactaagctcgcaatccctcaacaatctgactttcataataaccgttaccaaaaagtcctgaccctcaacctcgatcaagtagatttccaacatgccggcaactactcctgcgtggccagcaacgtgcagggcaagcactccacctccatgttcttccgggtggtagagagtgcctacttgaacttgagctctgagcagaacctcatccaggaggtgaccgtgggggaggggctcaacctcaaagtcatggtggaggcctacccaggcctgcaaggttttaactggacctacctgggacccttttctgaccaccagcctgagcccaagcttgctaatgctaccaccaaggacacatacaggcacaccttcaccctctctctgccccgcctgaagccctctgaggctggccgctactccttcctggccagaaacccaggaggctggagagctctgacgtttgagctcacccttcgataccccccagaggtaagcgtcatatggacattcatcaacggctctggcacccttttgtgtgctgcctctgggtacccccagcccaacgtgacatggctgcagtgcagtggccacactgataggtgtgatgaggcccaagtgctgcaggtctgggatgacccataccctgaggtcctgagccaggagcccttccacaaggtgacggtgcagagcctgctgactgttgagaccttagagcacaaccaaacctacgagtgcagggcccacaacagcgtggggagtggctcctgggccttcatacccatctctgcaggagcccacacgcatcccccggatgagttcctcttcacaccagtggtggtcgcctgcatgtccatcatggccttgctgctgctgctgctcctgctgctattgtacaagtataagcagaagcccaagtaccaggtccgctggaagatcatcgagagctatgagggcaacagttatactttcatcgaccccacgcagctgccttacaacgagaagtgggagttcccccggaacaacctgcagtttggtaagaccctcggagctggagcctttgggaaggtggtggaggccacggcctttggtctgggcaaggaggatgctgtcctgaaggtggctgtgaagatgctgaagtccacggcccatgctgatgagaaggaggccctcatgtccgagctgaagatcatgagccacctgggccagcacgagaacatcgtcaaccttctgggagcctgtacccatggaggccctgtactggtcatcacggagtactgttgctatggcgacctgctcaactttctgcgaaggaaggctgaggccatgctgggacccagcctgagccccggccaggaccccgagggaggcgtcgactataagaacatccacctcgagaagaaatatgtccgcagggacagtggcttctccagccagggtgtggacacctatgtggagatgaggcctgtctccacttcttcaaatgactccttctctgagcaagacctggacaaggaggatggacggcccctggagctccgggacctgcttcacttctccagccaagtagcccagggcatggccttcctcgcttccaagaattgcatccaccgggacgtggcagcgcgtaacgtgctgttgaccaatggtcatgtggccaagattggggacttcgggctggctagggacatcatgaatgactccaactacattgtcaagggcaatgcccgcctgcctgtgaagtggatggccccagagagcatctttgactgtgtctacacggttcagagcgacgtctggtcctatggcatcctcctctgggagatcttctcacttgggctgaatccctaccctggcatcctggtgaacagcaagttctataaactggtgaaggatggataccaaatggcccagcctgcatttgccccaaagaatatatacagcatcatgcaggcctgctgggccttggagcccacccacagacccaccttccagcagatctgctccttccttcaggagcaggcccaagaggacaggagagagcgggactataccaatctgccgagcagcagcagaagcggtggcagcggcagcagcagcagtgagctggaggaggagagctctagtgagcacctgacctgctgcgagcaaggggatatcgcccagcccttgctgcagcccaacaactatcagttctgctgaggagttgacgacagggagtaccactctcccctcctccaaacttcaactcctccatggatggggcgacacggggagaacatacaaactctgccttcggtcatttcactcaacagctcggcccagctctgaaacttgggaaggtgagggattcaggggaggtcagaggatcccacttcctgagcatgggccatcactgccagtcaggggctgggggctgagccctcaccccccgcctcccctactgttctcatggtgttggcctcgtgtttgctatgccaactagtagaaccttctttcctaatccccttatcttcatggaaatggactgactttatgcctatgaagtccccaggagctacactgatactgagaaaaccaggctctttggggctagacagactggcagagagtgagatctccctctctgagaggagcagcagatgctcacagaccacactcagctcaggccccttggagcaggatggctcctctaagaatctcacaggacctcttagtctctgccctatacgccgccttcactccacagcctcacccctcccacccccatactggtactgctgtaatgagccaagtggcagctaaaagttgggggtgttctgcccagtcccgtcattctgggctagaaggcaggggaccttggcatgtggctggccacaccaagcaggaagcacaaactcccccaagctgactcatcctaactaacagtcacgccgtgggatgtctctgtccacattaaactaacagcattaatgca

SEQ ID NO: 403699 - DNA, 9168 bp, Homo sapiens
catcagtcatcctttccctctctagccccctaccctatccccaagctgaagtgctagtggctggtggtgacttccccagacctaagccaatctctctctaccagtgtcatccatcaacgtctctgtgaacgcagtgcagactgtggtccgccagggtgagaacatcaccctcatgtgcattgtgatcgggaatgaggtggtcaacttcgagtggacatacccccgcaaagaaagtgggcggctggtggagccggtgactgacttcctcttggatatgccttaccacatccgctccatcctgcacatccccagtgccgagttagaagactcggggacctacacctgcaatgtgacggagagtgtgaatgaccatcaggatgaaaaggccatcaacatcaccgtggttgagagcggctacgtgcggctcctgggagaggtgggcacactacaatttgctgagctgcatcggagccggacactgcaggtagtgttcgaggcctacccaccgcccactgtcctgtggttcaaagacaaccgcaccctgggcgactccagcgctggcgaaatcgccctgtccacgcgcaacgtgtcggagacccggtatgtgtcagagctgacactggttcgcgtgaaggtggcagaggctggccactacaccatgcgggccttccatgaggatgctgaggtccagctctccttccagctacagatcaatgtccctgtccgagtgctggagctaagtgagagccaccctgacagtggggaacagacagtccgctgtcgtggccggggcatgccccagccgaacatcatctggtctgcctgcagagacctcaaaaggtgtccacgtgagctgccgcccacgctgctggggaacagttccgaagaggagagccagctggagactaacgtgacgtactgggaggaggagcaggagtttgaggtggtgagcacactgcgtctgcagcacgtggatcggccactgtcggtgcgctgcacgctgcgcaacgctgtgggccaggacacgcaggaggtcatcgtggtgccacactccttgccctttaaggtggtggtgatctcagccatcctggccctggtggtgctcaccatcatctcccttatcatcctcatcatgctttggcagaagaagccacgttacgagatccgatggaaggtgattgagtctgtgagctctgacggccatgagtacatctacgtggaccccatgcagctgccctatgactccacgtgggagctgccgcgggaccagcttgtgctgggacgcaccctcggctctggggcctttgggcaggtggtggaggccacggctcatggcctgagccattctcaggccacgatgaaagtggccgtcaagatgcttaaatccacagcccgcagcagtgagaagcaagcccttatgtcggagctgaagatcatgagtcaccttgggccccacctgaacgtggtcaacctgttgggggcctgcaccaaaggaggacccatctatatcatcactgagtactgccgctacggagacctggtggactacctgcaccgcaacaaacacaccttcctgcagcaccactccgacaagcgccgcccgcccagcgcggagctctacagcaatgctctgcccgttgggctccccctgcccagccatgtgtccttgaccggggagagcgacggtggctacatggacatgagcaaggacgagtcggtggactatgtgcccatgctggacatgaaaggagacgtcaaatatgcagacatcgagtcctccaactacatggccccttacgataactacgttccctctgcccctgagaggacctgccgagcaactttgatcaacgagtctccagtgctaagctacatggacctcgtgggcttcagctaccaggtggccaatggcatggagtttctggcctccaagaactgcgtccacagagacctggcggctaggaacgtgctcatctgtgaaggcaagctggtcaagatctgtgactttggcctggctcgagacatcatgcgggactcgaattacatctccaaaggcagcacctttttgcctttaaagtggatggctccggagagcatcttcaacagcctctacaccaccctgagcgacgtgtggtccttcgggatcctgctctgggagatcttcaccttgggtggcaccccttacccagagctgcccatgaacgagcagttctacaatgccatcaaacggggttaccgcatggcccagcctgcccatgcctccgacgagatctatgagatcatgcagaagtgctgggaagagaagtttgagattcggccccccttctcccagctggtgctgcttctcgagagactgttgggcgaaggttacaaaaagaagtaccagcaggtggatgaggagtttctgaggagtgaccacccagccatccttcggtcccaggcccgcttgcctgggttccatggcctccgatctcccctggacaccagctccgtcctctatactgccgtgcagcccaatgagggtgacaacgactatatcatccccctgcctgaccccaaacccgaggttgctgacgagggcccactggagggttcccccagcctagccagctccaccctgaatgaagtcaacacctcctcaaccatctcctgtgacagccccctggagccccaggacgaaccagagccagagccccagcttgagctccaggtggagccggagccagagctggaacagttgccggattcggggtgccctgcgcctcgggcggaagcagaggatagcttcctgtagggggctggcccctaccctgccctgcctgaagctccccccctgccagcacccagcatctcctggcctggcctgaccgggcttcctgtcagccaggctgcccttatcagctgtccccttctggaagctttctgctcctgacgtgttgtgccccaaaccctggggctggcttaggaggcaagaaaactgcaggggccgtgaccagccctctgcctccagggaggccaactgactctgagccagggttcccccagggaactcagttttcccatatgtaagatgggaaagttaggcttgatgacccagaatctaggattctctccctggctgacaggtggggagaccgaatccctccctgggaagattcttggagttactgaggtggtaaattaacttttttctgttcagccagctacccctcaaggaatcatagctctctcctcgcacttttatccacccaggagctagggaagagaccctagcctccctggctgctggctgagctagggcctagccttgagcagtgttgcctcatccagaagaaagccagtctcctccctatgatgccagtccctgcgttccctggcccgagctggtctggggccattaggcagcctaattaatgctggaggctgagccaagtacaggacacccccagcctgcagcccttgcccagggcacttggagcacacgcagccatagcaagtgcctgtgtccctgtccttcaggcccatcagtcctggggctttttctttatcaccctcagtcttaatccatccaccagagtctagaaggccagacgggccccgcatctgtgatgagaatgtaaatgtgccagtgtggagtggccacgtgtgtgtgccagtatatggccctggctctgcattggacctgctatgaggctttggaggaatccctcaccctctctgggcctcagtttccccttcaaaaaatgaataagtcggacttattaactctgagtgccttgccagcactaacattctagagtattccaggtggttgcacatttgtccagatgaagcaaggccatataccctaaacttccatcctgggggtcagctgggctcctgggagattccagatcacacatcacactctggggactcaggaaccatgccccttccccaggcccccagcaagtctcaagaacacagctgcacaggccttgacttagagtgacagccggtgtcctggaaagcccccagcagctgccccagggacatgggaagaccacgggacctctttcactacccacgatgacctccgggggtatcctgggcaaaagggacaaagagggcaaatgagatcacctcctgcagcccaccactccagcacctgtgccgaggtctgcgtcgaagacagaatggacagtgaggacagttatgtcttgtaaaagacaagaagcttcagatgggtaccccaagaaggatgtgagaggtgggcgctttggaggtttgcccctcacccaccagctgccccatccctgaggcagcgctccatgggggtatggttttgtcactgcccagacctagcagtgacatctcattgtccccagcccagtgggcattggaggtgccaggggagtcagggttgtagccaagacgcccccgcacggggagggttgggaagggggtgcaggaagctcaacccctctgggcaccaaccctgcattgcaggttggcaccttacttccctgggatccccagagttggtccaaggagggagagtgggttctcaatacggtaccaaagatataatcacctaggtttacaaatatttttaggactcacgttaactcacatttatacagcagaaatgctattttgtatgctgttaagtttttctatctgtgtacttttttttaagggaaagattttaatattaaacctggtgcttctcactcacagactttgtggtctctctcgggtttgggttcctgcccatagggagtgtggagtggggcacatgaggctcacccagacgcagacccccagacaggtcccttcagctctgagtctcattcattcatctgtaaagtggggattttcgctctcccacccctcgctggaagctggggggcctagacttgggcttggtttcccaaggtgggaagcgagcaggcttttctggctccacagagcctggccttgagtcgggcaggagggtgtggggctgcagggctgctccaaggctctggtgctgaggcgtctcactgcctccaccatgtgctttggctttggctatcagctgggacaccctcccctccactccgcccacaggcccggattgaggccggcgtgctctgtgacaggcagctgctagagcccagattccaggtccaggtgagtcatgatcaggccccaggtaggagaagggcagacagagtgtccaaaagcgtgagagcacgaagtgaggagaaggtggagaagagagaagaggaagaggaagaggaagagaggaagcggagggaactgcggccaggctaaaaggggaagaagaggatcagcccaaggaggaggaagaggaaaacaagacaaacagccagtgcagaggagaggaacgtgtgtccagtgtcccgatccctgcggagctagtagctgagagctctgtgccctgggcaccttgcagccctgcacctgcctgccacttccccaccgaggccatgggcccaggagttctgctgctcctgctggtggccacagcttggcatggtcagggaatcccagtgatagagcccagtgtccccgagctggtcgtgaagccaggagcaacggtgaccttgcgatgtgtgggcaatggcagcgtggaatgggatggccccccatcacctcactggaccctgtactctgatggctccagcagcatcctcagcaccaacaacgctaccttccaaaacacggggacctatcgctgcactgagcctggagaccccctgggaggcagcgccgccatccacctctatgtcaaagaccctgcccggccctggaacgtgctagcacaggaggtggtcgtgttcgaggaccaggacgcactactgccctgtctgctcacagacccggtgctggaagcaggcgtctcgctggtgcgtgtgcgtggccggcccctcatgcgccacaccaactactccttctcgccctggcatggcttcaccatccacagggccaagttcattcagagccaggactatcaatgcagtgccctgatgggtggcaggaaggtgatgtccatcagcatccggctgaaagtgcagaaagtcatcccagggcccccagccttgacactggtgcctgcagagctggtgcggattcgaggggaggctgcccagatcgtgtgctcagccagcagcgttgatgttaactttgatgtcttcctccaacacaacaacactaagctcgcaatccctcaacaatctgactttcataataaccgttaccaaaaagtcctgaccctcaacctcgatcaagtagatttccaacatgccggcaactactcctgcgtggccagcaacgtgcagggcaagcactccacctccatgttcttccgggtggtagagagtgcctacttgaacttgagctctgagcagaacctcatccaggaggtgaccgtgggggaggggctcaacctcaaagtcatggtggaggcctacccaggcctgcaaggttttaactggacctacctgggacccttttctgaccaccagcctgagcccaagcttgctaatgctaccaccaaggacacatacaggcacaccttcaccctctctctgccccgcctgaagccctctgaggctggccgctactccttcctggccagaaacccaggaggctggagagctctgacgtttgagctcacccttcgataccccccagaggtaagcgtcatatggacattcatcaacggctctggcacccttttgtgtgctgcctctgggtacccccagcccaacgtgacatggctgcagtgcagtggccacactgataggtgtgatgaggcccaagtgctgcaggtctgggatgacccataccctgaggtcctgagccaggagcccttccacaaggtgacggtgcagagcctgctgactgttgagaccttagagcacaaccaaacctacgagtgcagggcccacaacagcgtggggagtggctcctgggccttcatacccatctctgcaggagcccacacgcatcccccggatgagttcctcttcacaccagtggtggtcgcctgcatgtccatcatggccttgctgctgctgctgctcctgctgctattgtacaagtataagcagaagcccaagtaccaggtccgctggaagatcatcgagagctatgagggcaacagttatactttcatcgaccccacgcagctgccttacaacgagaagtgggagttcccccggaacaacctgcagtttggtaagaccctcggagctggagcctttgggaaggtggtggaggccacggcctttggtctgggcaaggaggatgctgtcctgaaggtggctgtgaagatgctgaagtccacggcccatgctgatgagaaggaggccctcatgtccgagctgaagatcatgagccacctgggccagcacgagaacatcgtcaaccttctgggagcctgtacccatggaggccctgtactggtcatcacggagtactgttgctatggcgacctgctcaactttctgcgaaggaaggctgaggccatgctgggacccagcctgagccccggccaggaccccgagggaggcgtcgactataagaacatccacctcgagaagaaatatgtccgcagggacagtggcttctccagccagggtgtggacacctatgtggagatgaggcctgtctccacttcttcaaatgactccttctctgagcaagacctggacaaggaggatggacggcccctggagctccgggacctgcttcacttctccagccaagtagcccagggcatggccttcctcgcttccaagaattgcatccaccgggacgtggcagcgcgtaacgtgctgttgaccaatggtcatgtggccaagattggggacttcgggctggctagggacatcatgaatgactccaactacattgtcaagggcaatgcccgcctgcctgtgaagtggatggccccagagagcatctttgactgtgtctacacggttcagagcgacgtctggtcctatggcatcctcctctgggagatcttctcacttgggctgaatccctaccctggcatcctggtgaacagcaagttctataaactggtgaaggatggataccaaatggcccagcctgcatttgccccaaagaatatatacagcatcatgcaggcctgctgggccttggagcccacccacagacccaccttccagcagatctgctccttccttcaggagcaggcccaagaggacaggagagagcgggactataccaatctgccgagcagcagcagaagcggtggcagcggcagcagcagcagtgagctggaggaggagagctctagtgagcacctgacctgctgcgagcaaggggatatcgcccagcccttgctgcagcccaacaactatcagttctgctgaggagttgacgacagggagtaccactctcccctcctccaaacttcaactcctccatggatggggcgacacggggagaacatacaaactctgccttcggtcatttcactcaacagctcggcccagctctgaaacttgggaaggtgagggattcaggggaggtcagaggatcccacttcctgagcatgggccatcactgccagtcaggggctgggggctgagccctcaccccccgcctcccctactgttctcatggtgttggcctcgtgtttgctatgccaactagtagaaccttctttcctaatccccttatcttcatggaaatggactgactttatgcctatgaagtccccaggagctacactgatactgagaaaaccaggctctttggggctagacagactggcagagagtgagatctccctctctgagaggagcagcagatgctcacagaccacactcagctcaggccccttggagcaggatggctcctctaagaatctcacaggacctcttagtctctgccctatacgccgccttcactccacagcctcacccctcccacccccatactggtactgctgtaatgagccaagtggcagctaaaagttgggggtgttctgcccagtcccgtcattctgggctagaaggcaggggaccttggcatgtggctggccacaccaagcaggaagcacaaactcccccaagctgactcatcctaactaacagtcacgccgtgggatgtctctgtccacattaaactaacagcattaatgca

SEQ ID NO: 403700 - DNA, 472 bp, Homo sapiens
ggtttcggatcctctttcgcttctctatctcgagaaacttgaaactgcgtcctctaggattgcatcaaactgcatcttgagcgtggaggaggactgctgagccccacgggttcgccgggctggagaggtcttgcgcaacctgagggttggggagagaggggtgttagcggagggaatgggccctgacggccctagaagcttccccgagcgcctcccacctccagcggacttgctgttaaaaacgcaattaatgcgtcctgtgagtcagaataaggatgactacttatggaagaggaaggagtgactggggtggggcgcgtggagagacttctgctgtggctggcaaagttctttttcttggtctcggaggcagttcactttgtagtaattagttaagccgtacatcagaaccattggattctgtatccgggttttatttttacaataaaaatacgtttaaaataatcagtta

SEQ ID NO: 403701 - DNA, 371 bp, Homo sapiens
caggttggaatgcagggaaacactttcacgtaaggagcaggtggaggagaagccaggtgaggagatgagaaatgatgaagcaaaggaggctgggcaccgtggcttactcctgtaatcctagcactttgggaggccaaggcaggcagatctcttgagcccaggggtttgagaccagcctgggcaacacggcaaaaccccatctctacaaaataatacaaaaattagtcaggcttggtggtatgcgcctgtagtcccaactactcaagaggctgagataggaggatcacttgagcctgggaggtcaaggctgcagtgagctatgatcgtgccactgcattccagcctgggtgatacagcaagaacctgtctca

SEQ ID NO: 403702 - DNA, 379 bp, Homo sapiens
aaaagtaagatattctgaaagagagcctatcccagaagccatgagacctgggcctgatctaagagggaagggaaacctgagattcctgtgaaccagctgggactagattttaaactagaagtcattctgatgtgcagctgagtttgagatctaataagttaaagatactaaaaagaagcaatcgaccaaatccagaatgtgaggcattttataaaacagaaggttcaagttcctcaacaaataaatggcatttttaccaaaaggagtgggagggaatgggaactgtcatagattagaagactgaacagacttatcaaataaatgcaaatggtgaaccatattcggaccccactgaaaacaacaactgtaaaaagactgt

SEQ ID NO: 403703 - DNA, 534 bp, Homo sapiens
atgtgatagacttcctcgattgagaacggattaaagcaagtccctaaaatttcatttcgtgacttgatgacccatctggaaaaacagacacacagtcactcactgaagcatcaaaaccttgctagtcccaggtgactgcaactgcctgcctggaaccctgctgttgtctgcctctaaaccaagcaggtgcctggcagtcaggacagaccatcagtggggctggaggagaggaccctggtttaataaactttacactctcaccttgctctggtaactgcagaaatagggttatgatttatatggtacattatggaaaaatcacattaacgggccaggtacatcatagggtctcagtaagtgttactttccttctgccactaactttggcaattttttgtggatatttggaggaggagagagggaaggaaggaaggtcagagatgggaagactcactttgctgttagtgaaatgggatcctgagtcgggtttcaggggccactgtgctatggttagaattactacttgggggaaaa

SEQ ID NO: 403704 - DNA, 446 bp, Homo sapiens
cccacacatcactgccgcccaactacagccaagcaaagcatctgcaatggctcaacagggtcaaccttaaagggcaaaatgctcttgttttcttgtttctcaggcaaagcttaattcactgggggcagtgcagggagaagaggggaggttcctttctgatgtcattggttctgacagtgtttcctgcccatcaacctttgtcatcaggctggatacagacaacagctgtatccattcatcatacttaggccactaatcacagagtgtgtgacaaaatgaccagggcctgccctagaagccagtcattgtctgtgaacatgcaccggctgactgattcaagcaatacctgtgtggataaagccacccggagcctcatctcacttagggatttttgttttgccatttgtttgttctgggtaaggattatgagggcactgttagtcaca

SEQ ID NO: 403705 - DNA, 394 bp, Homo sapiens
tgggattatagacgtgagccatcgtgtgcagccacttgggatgtctttattgtagagtaggtgtgaagaaatttaggtgtatctacaatgcttatataatatagctagatgtaatttttccattagtgagatgtttctttttaacagtattttagggaacatttttaaggccaagataaggagaaatacaataatacaaagttaactttgaaatggcgcacaattggtgatgactgtaataatttatagccatacagttggaacttcctgcccttttatgggctatatttttttggtaatgttttataatgttttataattatttgtaattaactgggacagataagcttactcaagtgtactctttcattctaggtggaaattactggtcttg

SEQ ID NO: 403706 - DNA, 213 bp, Homo sapiens
ttacacagatagaaggaaatatcagcttagggtgctagtttcactatttggtataaaagtgttgaaactggcctgtatgtaagcttcatagaaatctgaccgtttacatggagggaaacaagggaagaggacggttgcctcccccactcaaaggttggaattgtagtacagatactcgtggaaatcatcaatggtagtatttgggtaaagtct

SEQ ID NO: 403707 - DNA, 1485 bp, Homo sapiens
tactctactttgttatccaggagatgcaatacaaaacccattaattaaaacattaacagatactattaaaatactttgggataaggtcagaaatgctaaatgttacttattattttagacacattacctgatgcgaggcatatagtgcagatgattatggttagagttgtgattttctaaactcaaatacttctatatgtgaacatttttgggagatttttgtcacaactggagaaagattatttttaaattttagtaaactacttacaaaaactgaaccagacaaaaataattcaagaagctagaaatatgacaacatggtgcaataggaaatccttgaataaaaaatatatatatgtatatatacaccataaaatatagaatggtatattctgtatcattctatattccttttctaaagcatcattattattatttgagatgagggggagatctaaccatgttgcctgggctggtcttgaacccctgtcctcaagcaatcttccttcctcagcctcctgagtagttgggattacagacacataccactatgcccaccttaaagcttgcttgcttgcttgcttgcttttttttttttttttttttgagacaggatcttgctctgttgctcaggttggagtgaagtggcacgatctcagctcactgcaacactccagcctgagcaacagagcagactccatcttggggaaagaaagaaaaaaaaaaagaactatacatctaccaaaagcttcagttaaatgtttgggtatattgaaaacacactggatataaatttgaaaccactgttaaacgtgtgacaggaaaatcgagttgagactgccatgcccgtgtcaactgaccatgggttcttgggctctcaatgcaatagaacattgacatgaggccaaaagagttttctcaaagcttcactggagcttttgtccagccataagggaggcagaacgagagagaaagagagatagagagagacagagagagagagagagagagtattccctgacagactccacctataaaagaacaggtaggacttttttattaggcaaagtacagaactgacatcagaagtagagtgtacacaggctgggcaaggcaaacaatgtgaggggtagggtagcaggtcagcatatccagttgtgatggttatcttgagtaatgggccacctggtagtctggcctgtgacaacaagactataaatcaattgtccagcagcattcctttctgaggtgggacactctgcaaccttggttagctcctaaagccagttcctggaattctttaagtaaaaagactattagcagcgaggtaatggtgtgggttttgtgatgtgtgggaatgctctaatgggggtgaaccaaagccaggctctgtctctactgtgtctcaccagtaaaaacacaattacaaacagcatgcaatgctcttttttgtgatgatggttaataaagaatacacattctaaa

SEQ ID NO: 403708 - DNA, 515 bp, Homo sapiens
tctggccctgcagaggccaggcttgggctaccgagtcagtcacctcgtcctgcctggggagaggggatgcgccaccccaggaagcaaactccctggtctgtgctgaccggagccgacttcccgaggatctgctggttctaacctgggcttctccacctcagcactgctgacgtctggggctggatcattcttggttgtgggacctgcccctgtgcgttacaggatgtggagcagtgtacctgcctgccacccaccagacaccagtagcacccccaccccctcaagtaatgccaaccagatatgcctctggacattaccagagggtcctttgggtggcaaaattacccctggtggtgaatcacaaacattttcaccctggtgatttcactgacatgaagctggcaggggaaggtccccgatggccaggccacacccacccggtgccagcagcacaaagagaatgccctccgcgaacgtggggcacggaaaagcacctgcgatacgtcggcgatgaa

SEQ ID NO: 403709 - DNA, 2650 bp, Homo sapiens
  misc_feature (1012)..(1012): n is a, c, g, or t
  misc_feature (1014)..(1014): n is a, c, g, or t
tctcaataagtgtgtgtgctcagaggcagggagcgcaccatggcagatcccgggcctgtctgtgggagggagccctggcggagccaaggagagtgcagtgctcagatgagccatgacaagttggagctgctggatttaaaccacctacatcatcagtgggatttttattcctcgcattcagcaccttccaaaaaacaagtgacatttctaatattcaggtttcctcctctcccctttaaagttgtccatgtagaaatttcatatattaaggaactaagatttctttgataagcaaatgtttttcttcggaatgcgatttcatcactgtgtctaggggagggagtgttatttttagaaagggagggactaacgcttggtagttacagtaattagagagaattatactttagcagcaatgagattacttcatctgccttatatttgagagctaatttgtacaagtagctcctggggctgtgaagggcttgccaagagtaaaaggttcaaggagtgaaatagttaatgagattcgtgatagaaatgggaatatgattgtccacaaaagggaacatcttccttttggagggtgttttttagtatatcaactagtattgtttgcctttcagcctaaaatccttcctcttaaagattgtgcttgcttggctggatttttgctgatgctgtttaattttaagctcttttccacatggagctattccagctcatttttaaaaatttatttaatgcttccaaaaaatatcctgagttattactggcctttcttccttactgtatacccggtgcctggcaaaaagtaggtgctcaacaaagagaggaaggcagggaggggaaaggtgagcgagaatgagagggcgtcactcttcagacatttggggaatgcgatgataaggcctcagtaagatctgcctggattcaggtttctcatgtgtaattttttgacttttttcctcaccttaagcacgggctacaatcattagagattgtaccttcntncactttcctgattgttgttgacgaaataggccatttagaaaaacagttagctattgtggcagcgaaatagtttcattcctattggcaagtgtaaaatgaaccttttctgcatgtaagaaggatcctgctagagtttcgctcccaacactgctataggcctggcacaaaaatggaataaatataaagccctattcagaaaatatgttacatcacaggaactgtaaaatggggggattttttatacctcctttgttgttcctgagcaaattacatcatcatcaccaccaccattaataggtgacattaaagcacctacagtataccatgtacttcacaggtagtaactcattcagtcctcacagccaccttctgagttaggtgttattgttattcctactttgacagatgtgggaacagagcccctcctccccacacagccccttttatgtaacttgactaagatcaagcagttagtaaatggtagaaagaatatttgaatctacctagtgagtctctagtgcatgcttttgtccggtatcctggaaagcctcccacaaaaagctaatctttgccccattcaaaacatgcaccctgaagaagctgtttgtacaggattgggtttattctgttattaagacaaaggcatcatggcctttgggtgagaggcccgtgtgtgtttgggatttggcaatcagcattccatctctgtcatcaccattattgagaaaatagatggattggttccctctctgcagtcctgtggagcagttggactgctctctctgctctcaggatgatactgtgagaacaatttaaatatgctaagcacatgtcaggaaacagttttgtggtctttggacactcgctgtagccattccgttccatttcaggtgattttattcatttcatttgtagaataaaataaatccatttcacacacacacacacacacacacacacacacacacaccctctatacaccactaaagcctcccattaaacccatagaagacttaaagagctaaaagaggctataatataaaaaaaaaaaaagaaaaggactaaattgggttgacttcacaatggtttgctgtcctgccccttggccatgacttccatccagcatctactcttagaatcagagtgtatactctgaaacagaagcagctctccccaagctggctgtcttctgccaagtctggaggttgcagctctgaaagagggtggtaccaggggccaacgcctggtgcagcctcaggagcaacaggaccataggctcctgaggaaattgtccaagagagccagagcaccagtgttctctgcagtatgacttgggcatttgtttagtctggatttcctgtgtaatcagtgttttcctctgggactgtaatagaaccagtctactctccaagaggcctttagccaaagctcataatgataggactagctattaattgtctactactttctgtctactatactaaacattttacgtatgccatctaatttaacaagcctatctgctaggtactattaatccccttttgatagatgaagactttgagatttagagaggttaagccacttgccctggtcacgcagtgacaggatctgaatctgggcttcctctcttcct

SEQ ID NO: 403710 - DNA, 192 bp, Homo sapiens
tgctctgttttcatccctttagataactgtgacacctagaattttatgttaagtagagagtattcattgaaaatcaaggccaggtgcagtggctcacacctgtcaccccagcactttgggaggcagaggtgggcgtatcacttcaggccaggagtttgagaccagcctggccaaccgagcgaaaccccatct

SEQ ID NO: 403711 - DNA, 477 bp, Homo sapiens
gtggtggtgtttgtttttgtttcattttttatgagctaatattttaaaatgagagctcttacataaaaacacatggatttattgtttttcttgaaaggctggcaacattaaatctgtattcccactagggagaaattggctggagttgagaaaccactgccatctgcagttgggatattcattctccagttcctcatactcttcaccactcttttctcttacaagctcccgatataaatagagaaatcaattgtatggcccttgaagagaaagtgtgtgtgtgtttgtgtgtgtgtgtgagagagagagagacaggcgtgcatcagtagaaatgcagacacagaggaggagacatttgaactaagtcttgaagaatgatcaggatttcaagagatgaaagaaagaattcccggtggagggacaagtgtaagacagagcaccagagatagatagtgtgggcaatccaggcatagatta

SEQ ID NO: 403712 - DNA, 327 bp, Homo sapiens
atatcgtcgacccacgcgtccggaaatgtttaagacactccattgttcaatatttttgtgcatttgatattttatgcattttccacatgtaagaaatatttggattaacaggtcagtgtcctgttttcatacaatctaacatgtatgactaagcatacatgttcagtctaacatgtgtgactaagcacgtgataaaaaatttgcaattttaagttgaaatcttactgagtatgcaggcagtatcagcacatttaagagaacttaagaatttcttgacgatttttaaacttttttgtgagaatttcttaaatggagcggactagcata

SEQ ID NO: 403713 - DNA, 145 bp, Homo sapiens
tgagttaaatgattcaaggtttaagtgttgaaaataaaaattagcgattaaactatctgatgtcacaaagttattttaaaaattaatattgttttaaagctctaatcagagttttattcctgtgtgaaatagactcttaaaaaaa

SEQ ID NO: 403714 - DNA, 89 bp, Homo sapiens
tgaaaggcactcaaagtcagtaaagagagatttaaaagcaaaagcaaatgaagaaagtctgaaatgtaaaaactagaccaaactgtata

SEQ ID NO: 403715 - DNA, 376 bp, Homo sapiens
cccttcccactacaccaccaggcttcagcctccaaagagacaagtgcttggtacctacatgcaaagtgtgtgtgctggggggtgggagggctgcccagaacaggggagaggatggtgtaaaaaaagacctactcctttcctgttaccctctccccacatgtaccaaccttcctgttgctccctccatccacagaataatagctaccatttataaaatgtttactctgggctgggagcagtggctcacacctgtaatcccaacactttgagaggctgaggtgggatgatcacttgaggccaggagttcgagaccagcctgagcaacactgtgagacccccccgccatctctacataaataataaaaacttttaaaaa

SEQ ID NO: 403716 - DNA, 553 bp, Homo sapiens
ctaaatcaactgtgggctagaaactggctcttagactttatcttttatggtaacttacaccataatcaagagaaagctttttagttccaaggaattgtaattcagtaagatactctaaattcagtcatccatttctccctgttgccccaaaccactaggaagtaaagaaactgagcaaaagctgtatagctcttcattataatgctactgttttgttttgtttcatttattattattttttaatttgtcttttgtgttgcacatgacaggtgattgggtattttctttactaagtcttccatgtcactagagggttttaaaaataaagtgtggtggtgtttcttgataacagagttgagtatcaagtgcacgtgtctccctcgtatagggttaaatagtcatggtgagaatgtcttagaaatgatcagataaggccaggcgcggtggctcacgcttgtaatcccagcactttgggaggccgaggcaggtggatcatgaggtcaggagattgagaccatcctggcgctaacacggtgaaaccccatctctacta

SEQ ID NO: 403717 - DNA, 446 bp, Homo sapiens
tctatctgacattaataaacattccaagaagaatgtctgcaaagaggagagactgagaattactagccactcaattaggtcacttaacatcttatattagctgctcatttcatttgggagcaaggagaactgggttctcattcttcagccaatgagctggagaaacctggacaaataatttaattgcttgaggcttaattgtccaatcactgaaatgtaagaaaataagaaataatctttaaatttactttcaattaaataaaacactgattgttaatacatatttgaaaatatactagaaactgaacgtgcaaattaggataatgaattgcactctaaatttaaaatgcaagaaatgatgtattttatttcttatttatacatatatattatttcaagaattataaatctcaacatgctttccatataataaaaatgtttaatat

SEQ ID NO: 403718 - DNA, 675 bp, Homo sapiens
  misc_feature (62)..(62): n is a, c, g, or t
  misc_feature (98)..(98): n is a, c, g, or t
  misc_feature (118)..(118): n is a, c, g, or t
  misc_feature (125)..(125): n is a, c, g, or t
  misc_feature (132)..(133): n is a, c, g, or t
  misc_feature (145)..(145): n is a, c, g, or t
  misc_feature (160)..(160): n is a, c, g, or t
  misc_feature (186)..(186): n is a, c, g, or t
ttgagcccgtgcaatatttgatctccttcatcagcagtgcacaactcaagttgtcagcttcncagatgatctacaagcgctaacatctattgcatccntggtctggccatgcagattngtgtganttattcnnttagtaagaccnatatatcagctgtcntttaaagggctatcagtgtagagtcnatttttccactctgctgcattctcacttggaaaggttatggagtatattgtataattaaatatttgtagaaatgacccctgtcaagccttcctttaaagctatgatgtagttgatcttcagcaaaaatctggaattgaagaggtttgatcctgaaaataatagctgacttcaacatggtcatagtttcttccagtctttcacctagatacattttctcaacaggctgtattttcagactacacctgtcccacctgcggggatgagcagcgggacaagcgctgctcgcgcctctcaccgcaccgcatccgcctcccgccagccaggaagccactgcggcctgcggcttcccgccaccacggcccgctccttcctccggggacacggggagctggctgaaggcgtaaaggagcgagcagaagcctcaggccagacacagagccaccacgcgcggtagcgccgcatggccccagcggcgttcctcggtctcc

SEQ ID NO: 403719 - DNA, 575 bp, Homo sapiens
cagtggctcatgcctgtaatccttgaactttggtaggtcaaggtgggtggatagcctgagcccaggagttcaagccccacctggacaacacagacagatcccatctctacaaattttttttttaaacattagctggttatggtggcacgcgcttgttgtcccagctacttaggaggttgagatgggaggattgcttgagcccaggaggtggtggctgcagcgagctgtgatcacaccactacactccagctcgtgcaacagagcaagactcggtctcaaaaaaagaaagagagaattgaaagacagaggaagaaagaaggaagagaagaggaaagaaagggcaaaactgggattcaaacccaggctgtctgagttccgtatctagtctgtgcctaaccagtcaacccccctgcaaatgacagctgtacactgaacaaaatacaaaaaaacagcttcctgagggttcagctgaatgcagttagtccctcccttcccccacaactttttctctctggtttgccctcaggatggcagccatagcccagggcggcagcagcaggccaggggtcaggggt

SEQ ID NO: 403720 - DNA, 695 bp, Homo sapiens
gcaccacgctgacaataagtgggcgtttctttgatcagacagatttccccgtcagagttctagttggaggtgaaccttgtgatattttgaatgtcacagaaaatagtatatgttgcaagacaccccccaaacctcatattctcaaaactgtatatccaggagggagaggcctgaagcttgaggtgtggaataatagccgtccaatacgtttggaagagatactggaatacaatgaaaaaacgcctgggtacatgggtgccagttgggtagattcagcttcctatatttggctcatggaacaagacacatttgttgcacgctttagtggatttttggtggctccagattctgatgtttatagattctacatcaagggtgatgaccgttatgctatttattttagccagactggacttccagaagataaggtgaggattgcatatcattctgctaatgccaacagttatttttccagtccaacacaaagatcagatgatattcatctgcagaaaggaaaagaatactatattgaaatcttgctgcaggagtacagattaagtgcatttgttgatgttggactgtaccagtatcgaaatgtttatactgaacaacaaacaggagatgcagtgaatgaagaacaagttatcaaatcccagtcgacaatcctccaggaagtacaggtttgctatgattgc

SEQ ID NO: 403721 - DNA, 562 bp, Homo sapiens
ataagatgccatggaagggatggcaataagcgttttccataaacaacccgagagagagaaacagaaaacgctgtccaagctaagccttgcttccacactgggctttgcagattttccaatgagccaccaacgaggtggttaaaacatcagagactgcatccgattccccaagacaccaaggctctcgggatgggaacaggcaaatcgtcgtcgttctttgctgagcctgcgggctgcggtcaccagaacgaatctgggcccagcaggtgccaagggctcgacctcccgccttgcatccggcaggccgcacacacccctcggaagtcggcgagatcgctgaggcaaagcgactccagggcgcagagacccacacgcgacgctctaaaggaagtgacctttaggggctgttactctcagaccaggcccagcagcacccggcgcatttacgtcggatctgacccctgcaagcaccggcgcgaccgcgctagcggctgggaacacgcgacggtcccgcccactgcgacctgactcggccaatcccgggtggcgcatgctgcggccg

SEQ ID NO: 403722 - DNA, 387 bp, Homo sapiens
cattgcattacaacattatgatggctacagcgtcactagaggataggaatttttcagctacgttttattatcttatgggaccacagtgatatatgtggtctgtcattgactgaaacgtcattatgtggtgcctgactacatatatggaaactctgagtgtagtcatgttttacaaatgagtttatcttgcagtgagtttaaatatcaagtaaaaatactaatttcattgtaatgtatgaagagattggcctttctcctcatgttgaaggtatcaaaacaaaatagaaaatatttggcttcctgagtggcatggctacaattcacatgctgagttggtgatgaggcaagatcccttgactttgcaataccagaaaaatgcacatagtt

SEQ ID NO: 403723 - DNA, 460 bp, Homo sapiens
ctactttgttcctttcttaccactctctcctggggccgacacgttgggacagcacaccatagcataaagctaggggatgcatggaaatagcagcttgaaactaggaggtaacaagaaagcttctaggaagtagatgttccatatcttcaaaatgcctcctccaattttgtaagaatgctagctaggtattcctgggattattatactgagatatatatatatacacacacacacacatatgtgtatatatgtatatatatatgtgagtatatatacacacacacacacacacacacatatatatatatacacacacgcacacatatatgttgctgcagcataaagaaattgaaataaaagtttaaaatagtacccggttcaatgaaagagcctaaaccatcttaactcagctttaaaacaaaaattaaatcaggaaaaaatgaaaaaaaaactgcatgaa

SEQ ID NO: 403724 - DNA, 144 bp, Homo sapiens
aggtgaatatgcttagcatatggtaaggtactcaggtcttagttttatttcttcattatttattacatagctctttcctcttaaattctattaagacttagttctttttcactccccttttaagaaaagcaaacgggaatcttt

SEQ ID NO: 403725 - DNA, 409 bp, Homo sapiens
tgccttaattttatttttagagtttgggagataccctggccctatgagcatcccaatgttaaataatctcattcattatgttgtgatttctgctacaggatgatcttttaaatcttaatttctttctgggtgtggtggctcacgcctgtaatcccagcacattgggaggccgaggtgggtgggtcacttgaggtctggagtttgataccagcctggccaacatagcaaaaccccgtgtctactaaaaatacaaaaattagccaggcgtggtggtgtgtgcctgtaatcccagctgctcaggaggttgaggcacaagaattgcttgaacccaggaggcggaggttccagtgagctgagattgtgccactgcactccagcctgagcaacagagtgaaactgtttcacaaaa

SEQ ID NO: 403726 - DNA, 375 bp, Homo sapiens
cagcccataaggggaagggcattattaacaacatcttgaagataagaaacctgggcttccatcctagtttcttcttcaataaaacaaacaaaacgggctgggcacagtggctcacgcctgtaatcccagcacttttggaggccgaggtgggcggatcatgatatcaagagatcgagaccatcctggccaacatggtgaaaccccgtctctactaaaaatgtgaaaaaattagcttgatgtggtggtgcgcgcctgtagtcccagctactcaggaggctgaggcaggagaatcgcttgaacctgggaggcggaggttacagtgagctgggaccacgccactgcactccagcctgatgacagagcgagactccatct

SEQ ID NO: 403727 - DNA, 876 bp, Homo sapiens
gcatggtgttttaccgtggtaggggatggggaaacaggagctgagagaagaggtcttcgattggaggtgagccaacctctattttattagggtggtggtgggcaggggagcaagcaccttgggagcagctctacccactgcttgccctcttgcaggaaggtcctagtgggtgactggaagtaggatagggatggggagttgggtgtggctggaaaaagcgatgacaccagctctgagccatgaagcatctttctaattccaagatggagctggatggggtggggtagggtggagcagagcaggggccttccggtccagtgcccctcacccttccttcttcccaggactgcgggaagcccctgtcgattgaggcagatgacaatggctgcttccccctggacggtcacgtgctctgtcggaagtgccacactgctagagcccagacctgagtgaggacaggccctcttcagaccgcagtccatgccccattgtggaccacccacactgagaccacctgcccccacctcagttattgttttgatgtctagcccctcccatttccaacccctccctagcatcccaggtgccctgacccaggacccaacatggtctagggatgcaggatccccgccctggggtctggtcctcgcccatcctgcagggattgcccaccgtcttccagacaccccacctgaggggggcaccaggtttagtgctgctgctttcactgctgcacccgcgccctcggccggccccccgagcagcctttgtactctgcttgcggagggctgggagaccctccaggacattcccaccctcccccatgctgccaagttgtagctatagctacaaataaaaaaaaaccttgttttccag

SEQ ID NO: 403728 - DNA, 498 bp, Homo sapiens
  misc_feature (59)..(59): n is a, c, g, or t
gacgagagtgactgtggagacttcccgaatgggtccctgggggatgactttgatgccancgacgaacctgagtgaggacaggccctcttcagaccgcagtccatgccccattgtggaccacccacactgagaccacctgcccccacctcagttattgttttgatgtctagcccctcccatttccaacccctccctagcatcccaggtgccctgacccaggacccaacatggtctagggatgcaggatccccgccctggggtctggtcctcgcccatcctgcagggattgcccaccgtcttccagacaccccacctgaggggggcaccaggtttagtgctgctgctttcactgctgcacccgcgccctcggccggccccccgagcagcctttgtactctgcttgcggagggctgggagaccctccaggacattcccaccctcccccatgctgccaagttgtagctatagctacaaataaaaaaaaaccttgttttccag

SEQ ID NO: 403729 - DNA, 300 bp, Homo sapiens
  misc_feature (42)..(43): n is a, c, g, or t
tctgaggatcctttagactgcgagaagagactgtgcgagtgnntgccctggacaagaacttccacatgaagtgttacaagtgtgaggactgcgggaagcccctgtcgattgaggcagatgacaatggctgcttccccctggacggtcacgtgctctgtcggaagtgccacactgctagagcccagacctgagtgaggacaggccctcttcagaccgcagtccatgccccattgtggaccacccacactgagaccacctgcccccgggccgccccggttccttctcttctttcatctccct

SEQ ID NO: 403730 - DNA, 2293 bp, Homo sapiens
aaggctgtctggtctggaatttttgggatgtcctccccgcccggctggaggctgctccggaccgggacgcagagtctgcggacccggcgccgaggcggccacccgagacgcggcgcgcacgctccggcctgcgcagcccggcccggccatggcggccccccgcccgtctcccgcgatctccgtttcggtctcggctccggctttttacgccccgcagaagaagttcggccctgtggtggccccaaagcccaaagtgaatcccttccggcccggggacagcgagcctcccccggcacccggggcccagcgcgcacagatgggccgggtgggcgagattcccccgccgccccggaagactttcccctgcctccacctccccttgctggggatggcgacgatgcagagggtgctctgggaggtgccttcccgccgccccctcccccgatcgaggaatcatttccccctgcgcctctggaggaggagatcttcccttccccgccgcctcctccggaggaggagggagggcctgaggcccccataccgcccccaccacagcccagggagaaggtgagcagtattgatttggagatcgactctctgtcctcactgctggatgacatgaccaagaatgatcctttcaaagcccgggtgtcatctggatatgtgcccccaccagtggccactccattcagttccaagtccagtaccaagcctgcagccgggggcacagcacccctgcctccttggaagtccccttccagctcccagcctctgccccaggttccggctccggctcagagccagacacagttccatgttcagccccagccccagcccaagcctcaggtccaactccatgtccagtcccagacccagcctgtgtctttggctaacacccagccccgagggcccccagcctcatctccggctccagcccctaagttttctccagtgactcctaagtttactcctgtggcttccaagttcagtcctggagccccaggtggatctgggtcacaaccaaatcaaaaattggggcaccccgaagctctttctgctggcacaggctcccctcaacctcccagcttcacctatgcccagcagagggagaagccccgagtgcaggagaagcagcaccccgtgcccccaccggctcagaaccaaaaccaggtgcgctcccctggggccccagggcccctgactctgaaggaggtggaggagctggagcagctgacccagcagctaatgcaggacatggagcatcctcagaggcagaatgtggctgtcaacgaactctgcggccgatgccatcaacccctggcccgggcgcagccagccgtccgcgctctagggcagctgttccacatcgcctgcttcacctgccaccagtgtgcgcagcagctccagggccagcagttctacagtctggagggggcgccgtactgcgagggctgttacactgacaccctggagaagtgtaacacctgcggggagcccatcactgaccgcatgctgagggccacgggcaaggcctatcacccgcactgcttcacctgtgtggtctgcgcccgccccctggagggcacctccttcatcgtggaccaggccaaccggccccactgtgtccccgactaccacaagcagtacgccccgaggtgctccgtctgctctgagcccatcatgcctgagcctggccgagatgagactgtgcgagtggtcgccctggacaagaacttccacatgaagtgttacaagtgtgaggactgcgggaagcccctgtcgattgaggcagatgacaatggctgcttccccctggacggtcacgtgctctgtcggaagtgccacactgctagagcccagacctgagtgaggacaggccctcttcagaccgcagtccatgccccattgtggaccacccacactgagaccacctgcccccacctcagttattgttttgatgtctagcccctcccatttccaacccctccctagcatcccaggtgccctgacccaggacccaacatggtctagggatgcaggatccccgccctggggtctggtcctcgcccatcctgcagggattgcccaccgtcttccagacaccccacctgaggggggcaccaggtttagtgctgctgctttcactgctgcacccgcgccctcggccggccccccgagcagcctttgtactctgcttgcggagggctgggagaccctccaggacattcccaccctcccccatgctgccaagttgtagctatagctacaaataaaaaaaaaccttgttttccag

SEQ ID NO: 403731 - DNA, 2439 bp, Homo sapiens
aaggctgtctggtctggaatttttgggatgtcctccccgcccggctggaggctgctccggaccgggacgcagagtctgcggacccggcgccgaggcggccacccgagacgcggcgcgcacgctccggcctgcgtgaggcgcggggagcggcagggcggccccacggggagggggcgcggggcgccgggagggggcgagtgggggtcaccaaggggagctgggaccgcctggggctcctgagcccggctccgcgctgcgtaacccggcgacccaccccagcagcccggcccggccatggcggccccccgcccgtctcccgcgatctccgtttcggtctcggctccggctttttacgccccgcagaagaagttcggccctgtggtggccccaaagcccaaagtgaatcccttccggcccggggacagcgagcctcccccggcacccggggcccagcgcgcacagatgggccgggtgggcgagattcccccgccgccccggaagactttcccctgcctccacctccccttgctggggatggcgacgatgcagagggtgctctgggaggtgccttcccgccgccccctcccccgatcgaggaatcatttccccctgcgcctctggaggaggagatcttcccttccccgccgcctcctccggaggaggagggagggcctgaggcccccataccgcccccaccacagcccagggagaaggtgagcagtattgatttggagatcgactctctgtcctcactgctggatgacatgaccaagaatgatcctttcaaagcccgggtgtcatctggatatgtgcccccaccagtggccactccattcagttccaagtccagtaccaagcctgcagccgggggcacagcacccctgcctccttggaagtccccttccagctcccagcctctgccccaggttccggctccggctcagagccagacacagttccatgttcagccccagccccagcccaagcctcaggtccaactccatgtccagtcccagacccagcctgtgtctttggctaacacccagccccgagggcccccagcctcatctccggctccagcccctaagttttctccagtgactcctaagtttactcctgtggcttccaagttcagtcctggagccccaggtggatctgggtcacaaccaaatcaaaaattggggcaccccgaagctctttctgctggcacaggctcccctcaacctcccagcttcacctatgcccagcagagggagaagccccgagtgcaggagaagcagcaccccgtgcccccaccggctcagaaccaaaaccaggtgcgctcccctggggccccagggcccctgactctgaaggaggtggaggagctggagcagctgacccagcagctaatgcaggacatggagcatcctcagaggcagaatgtggctgtcaacgaactctgcggccgatgccatcaacccctggcccgggcgcagccagccgtccgcgctctagggcagctgttccacatcgcctgcttcacctgccaccagtgtgcgcagcagctccagggccagcagttctacagtctggagggggcgccgtactgcgagggctgttacactgacaccctggagaagtgtaacacctgcggggagcccatcactgaccgcatgctgagggccacgggcaaggcctatcacccgcactgcttcacctgtgtggtctgcgcccgccccctggagggcacctccttcatcgtggaccaggccaaccggccccactgtgtccccgactaccacaagcagtacgccccgaggtgctccgtctgctctgagcccatcatgcctgagcctggccgagatgagactgtgcgagtggtcgccctggacaagaacttccacatgaagtgttacaagtgtgaggactgcgggaagcccctgtcgattgaggcagatgacaatggctgcttccccctggacggtcacgtgctctgtcggaagtgccacactgctagagcccagacctgagtgaggacaggccctcttcagaccgcagtccatgccccattgtggaccacccacactgagaccacctgcccccacctcagttattgttttgatgtctagcccctcccatttccaacccctccctagcatcccaggtgccctgacccaggacccaacatggtctagggatgcaggatccccgccctggggtctggtcctcgcccatcctgcagggattgcccaccgtcttccagacaccccacctgaggggggcaccaggtttagtgctgctgctttcactgctgcacccgcgccctcggccggccccccgagcagcctttgtactctgcttgcggagggctgggagaccctccaggacattcccaccctcccccatgctgccaagttgtagctatagctacaaataaaaaaaaaccttgttttccag

SEQ ID NO: 403732 - DNA, 2213 bp, Homo sapiens
aaggctgtctggtctggaatttttgggatgtcctccccgcccggctggaggctgctccggaccgggacgcagagtctgcggacccggcgccgaggcggccacccgagacgcggcgcgcacgctccggcctgcgcagcccggcccggccatggcggccccccgcccgtctcccgcgatctccgtttcggtctcggctccggctttttacgccccgcagaagaagttcggccctgtggtggccccaaagcccaaagtgaatcccttccccccggaagactttcccctgcctccacctccccttgctggggatggcgacgatgcagagggtgctctgggaggtgccttcccgccgccccctcccccgatcgaggaatcatttccccctgcgcctctggaggaggagatcttcccttccccgccgcctcctccggaggaggagggagggcctgaggcccccataccgcccccaccacagcccagggagaaggtgagcagtattgatttggagatcgactctctgtcctcactgctggatgacatgaccaagaatgatcctttcaaagcccgggtgtcatctggatatgtgcccccaccagtggccactccattcagttccaagtccagtaccaagcctgcagccgggggcacagcacccctgcctccttggaagtccccttccagctcccagcctctgccccaggttccggctccggctcagagccagacacagttccatgttcagccccagccccagcccaagcctcaggtccaactccatgtccagtcccagacccagcctgtgtctttggctaacacccagccccgagggcccccagcctcatctccggctccagcccctaagttttctccagtgactcctaagtttactcctgtggcttccaagttcagtcctggagccccaggtggatctgggtcacaaccaaatcaaaaattggggcaccccgaagctctttctgctggcacaggctcccctcaacctcccagcttcacctatgcccagcagagggagaagccccgagtgcaggagaagcagcaccccgtgcccccaccggctcagaaccaaaaccaggtgcgctcccctggggccccagggcccctgactctgaaggaggtggaggagctggagcagctgacccagcagctaatgcaggacatggagcatcctcagaggcagaatgtggctgtcaacgaactctgcggccgatgccatcaacccctggcccgggcgcagccagccgtccgcgctctagggcagctgttccacatcgcctgcttcacctgccaccagtgtgcgcagcagctccagggccagcagttctacagtctggagggggcgccgtactgcgagggctgttacactgacaccctggagaagtgtaacacctgcggggagcccatcactgaccgcatgctgagggccacgggcaaggcctatcacccgcactgcttcacctgtgtggtctgcgcccgccccctggagggcacctccttcatcgtggaccaggccaaccggccccactgtgtccccgactaccacaagcagtacgccccgaggtgctccgtctgctctgagcccatcatgcctgagcctggccgagatgagactgtgcgagtggtcgccctggacaagaacttccacatgaagtgttacaagtgtgaggactgcgggaagcccctgtcgattgaggcagatgacaatggctgcttccccctggacggtcacgtgctctgtcggaagtgccacactgctagagcccagacctgagtgaggacaggccctcttcagaccgcagtccatgccccattgtggaccacccacactgagaccacctgcccccacctcagttattgttttgatgtctagcccctcccatttccaacccctccctagcatcccaggtgccctgacccaggacccaacatggtctagggatgcaggatccccgccctggggtctggtcctcgcccatcctgcagggattgcccaccgtcttccagacaccccacctgaggggggcaccaggtttagtgctgctgctttcactgctgcacccgcgccctcggccggccccccgagcagcctttgtactctgcttgcggagggctgggagaccctccaggacattcccaccctcccccatgctgccaagttgtagctatagctacaaataaaaaaaaaccttgttttccag

SEQ ID NO: 403733 - DNA, 2207 bp, Homo sapiens
  misc_feature (42)..(43): n is a, c, g, or t
tctgaggatcctttagactgcgagaagagactgtgcgagtgnntgccctggacaagaacttccacatgaagtgttacaagtgtgaggactgcgggaagcccctgtcgattgaggcagatgacaatggctgcttccccctggacggtcacgtgctctgtcggaagtgccacactgctagagcccagacctgagtgaggacaggccctcttcagaccgcagtccatgccccattgtggaccacccacactgagaccacctgcccccggaagactttcccctgcctccacctccccttgctggggatggcgacgatgcagagggtgctctgggaggtgccttcccgccgccccctcccccgatcgaggaatcatttccccctgcgcctctggaggaggagatcttcccttccccgccgcctcctccggaggaggagggagggcctgaggcccccataccgcccccaccacagcccagggagaaggtgagcagtattgatttggagatcgactctctgtcctcactgctggatgacatgaccaagaatgatcctttcaaagcccgggtgtcatctggatatgtgcccccaccagtggccactccattcagttccaagtccagtaccaagcctgcagccgggggcacagcacccctgcctccttggaagtccccttccagctcccagcctctgccccaggttccggctccggctcagagccagacacagttccatgttcagccccagccccagcccaagcctcaggtccaactccatgtccagtcccagacccagcctgtgtctttggctaacacccagccccgagggcccccagcctcatctccggctccagcccctaagttttctccagtgactcctaagtttactcctgtggcttccaagttcagtcctggagccccaggtggatctgggtcacaaccaaatcaaaaattggggcaccccgaagctctttctgctggcacaggctcccctcaacctcccagcttcacctatgcccagcagagggagaagccccgagtgcaggagaagcagcaccccgtgcccccaccggctcagaaccaaaaccaggtgcgctcccctggggccccagggcccctgactctgaaggaggtggaggagctggagcagctgacccagcagctaatgcaggacatggagcatcctcagaggcagaatgtggctgtcaacgaactctgcggccgatgccatcaacccctggcccgggcgcagccagccgtccgcgctctagggcagctgttccacatcgcctgcttcacctgccaccagtgtgcgcagcagctccagggccagcagttctacagtctggagggggcgccgtactgcgagggctgttacactgacaccctggagaagtgtaacacctgcggggagcccatcactgaccgcatgctgagggccacgggcaaggcctatcacccgcactgcttcacctgtgtggtctgcgcccgccccctggagggcacctccttcatcgtggaccaggccaaccggccccactgtgtccccgactaccacaagcagtacgccccgaggtgctccgtctgctctgagcccatcatgcctgagcctggccgagatgagactgtgcgagtggtcgccctggacaagaacttccacatgaagtgttacaagtgtgaggactgcgggaagcccctgtcgattgaggcagatgacaatggctgcttccccctggacggtcacgtgctctgtcggaagtgccacactgctagagcccagacctgagtgaggacaggccctcttcagaccgcagtccatgccccattgtggaccacccacactgagaccacctgcccccacctcagttattgttttgatgtctagcccctcccatttccaacccctccctagcatcccaggtgccctgacccaggacccaacatggtctagggatgcaggatccccgccctggggtctggtcctcgcccatcctgcagggattgcccaccgtcttccagacaccccacctgaggggggcaccaggtttagtgctgctgctttcactgctgcacccgcgccctcggccggccccccgagcagcctttgtactctgcttgcggagggctgggagaccctccaggacattcccaccctcccccatgctgccaagttgtagctatagctacaaataaaaaaaaaccttgttttccag

SEQ ID NO: 403734 - DNA, 2962 bp, Homo sapiens
aaggctgtctggtctggaatttttgggatgtcctccccgcccggctggaggctgctccggaccgggacgcagagtctgcggacccggcgccgaggcggccacccgagacgcggcgcgcacgctccggcctgcgcagcccggcccggccatggcggccccccgcccgtctcccgcgatctccgtttcggtctcggctccggctttttacgccccgcagaagaagttcggccctgtggtggccccaaagcccaaagtgaatcccttccggcccggggacagcgagcctcccccggcacccggggcccagcgcgcacagatgggccgggtgggcgagattcccccgccgccccggaagactttcccctgcctccacctccccttgctggggatggcgacgatgcagagggtgctctgggaggtgccttcccgccgccccctcccccgatcgaggaatcatttccccctgcgcctctggaggaggagatcttcccttccccgccgcctcctccggaggaggagggagggcctgaggcccccataccgcccccaccacagcccagggagaaggtgagcagtattgatttggagatcgactctctgtcctcactgctggatgacatgaccaagaatgatcctttcaaagcccgggtgtcatctggatatgtgcccccaccagtggccactccattcagttccaagtccagtaccaagcctgcagccgggggcacagcacccctgcctccttggaagtccccttccagctcccagcctctgccccaggttccggctccggctcagagccagacacagttccatgttcagccccagccccagcccaagcctcaggtccaactccatgtccagtcccagacccagcctgtgtctttggctaacacccagccccgagggcccccagcctcatctccggctccagcccctaagttttctccagtgactcctaagtttactcctgtggcttccaagttcagtcctggagccccaggtggatctgggtcacaaccaaatcaaaaattggggcaccccgaagctctttctgctggcacaggctcccctcaacctcccagcttcacctatgcccagcagagggagaagccccgagtgcaggagaagcagcaccccgtgcccccaccggctcagaaccaaaaccaggtgcgctcccctggggccccagggcccctgactctgaaggaggtggaggagctggagcagctgacccagcagctaatgcaggacatggagcatcctcagaggcagaatgtggctgtcaacgaactctgcggccgatgccatcaacccctggcccgggcgcagccagccgtccgcgctctagggcagctgttccacatcgcctgcttcacctgccaccagtgtgcgcagcagctccagggccagcagttctacagtctggagggggcgccgtactgcgagggctgttacactgacaccctggagaagtgtaacacctgcggggagcccatcactgaccgcatgctgagggccacgggcaaggcctatcacccgcactgcttcacctgtgtggtctgcgcccgccccctggagggcacctccttcatcgtggaccaggccaaccggccccactgtgtccccgactaccacaagcagtacgccccgaggtgctccgtctgctctgagcccatcatgcctgagcctggccgagatgagactgtgcgagtggtcgccctggacaagaacttccacatgaagtgttacaagtgtgaggactgcgggaagcccctgtcgattgaggcagatgacaatggctgcttccccctggacggtcacgtgctctgtcggaagtgccacactgctagagcccagacctgagtgaggacaggccctcttcagaccgcagtccatgccccattgtggaccacccacactgagaccacctgcccccacctcagttattgttttgatgtctagcccctcccatttccaacccctccctagcatcccaggtgccctgacccaggacccaacatggtctagggatgcaggatccccgccctggggtctggtcctcgcccatcctgcagggattgcccaccgtcttccagacaccccacctgaggggggcaccaggtttagtgctgctgctttcactgctgcacccgcgccctcggccggccccccgagcagcctttgtactctgcttgcggagggctgggagaccctccaggacattcccaccctcccccatgctgccaagttgtagctatagctacaaataaaaaaaaaccttgttttccagaaaaaaaaaaaaaaaaaaaaacaaaaaaaaaaaaaaaaaaaaaaaaaaaaaaaaaaacacaaaaaaaaacaagaaaaaagagaggggcggcgcgcgcgcgcgagaaaaaccccacccagcgagggggggcgcacacaagacgcgcaccagccgaccacggagtgcgaacaaaagggcggcgcccacacacgcaggagtcgagttgctactatataataccaacgagtagcagccgcgcgcgcgggcggggagcgagactaaacaacacgagcgagggggcggtgcgagcacaaacaactcgcgacagcagcgcgagcagccctacggagggagagagagagcgacacaaccaactgatgaggcgggcgggggggggggacaacaaagcgggagcaacacaaccccctcccaccacaagacaaggagagagaataagacaccgcccgagacggggaaggcacaaaacaaccacaaggcagcagaagagcggagaaggggggcggtaacagaaacaaaaggaagcggggaaagaaggaacgcgcggcggggaggagaaagaaaagacaggcagcaagcgacggggagggcagcgcgatcgtggcagaagaaaaaagaaatctcgcagcagcgcgagggggcgaggggcgatacgagcccaggggggggggg

SEQ ID NO: 403735 - DNA, 2047 bp, Homo sapiens
aaggctgtctggtctggaatttttgggatgtcctccccgcccggctggaggctgctccggaccgggacgcagagtctgcggacccggcgccgaggcggccacccgagacgcggcgcgcacgctccggcctgcgtgaggcgcggggagcggcagggcggccccacggggagggggcgcggggcgccgggagggggcgagtgggggtcaccaaggggagctgggaccgcctggggctcctgagcccggctccgcgctgcgtaacccggcgacccaccccagcagcccggcccggccatggcggccccccgcccgtctcccgcgatctccgtttcggtctcggctccggctttttacgcctcactgctggatgacatgaccaagaatgatcctttcaaagcccgggtgtcatctggatatgtgcccccaccagtggccactccattcagttccaagtccagtaccaagcctgcagccgggggcacagcacccctgcctccttggaagtccccttccagctcccagcctctgccccaggttccggctccggctcagagccagacacagttccatgttcagccccagccccagcccaagcctcaggtccaactccatgtccagtcccagacccagcctgtgtctttggctaacacccagccccgagggcccccagcctcatctccggctccagcccctaagttttctccagtgactcctaagtttactcctgtggcttccaagttcagtcctggagccccaggtggatctgggtcacaaccaaatcaaaaattggggcaccccgaagctctttctgctggcacaggctcccctcaacctcccagcttcacctatgcccagcagagggagaagccccgagtgcaggagaagcagcaccccgtgcccccaccggctcagaaccaaaaccaggtgcgctcccctggggccccagggcccctgactctgaaggaggtggaggagctggagcagctgacccagcagctaatgcaggacatggagcatcctcagaggcagaatgtggctgtcaacgaactctgcggccgatgccatcaacccctggcccgggcgcagccagccgtccgcgctctagggcagctgttccacatcgcctgcttcacctgccaccagtgtgcgcagcagctccagggccagcagttctacagtctggagggggcgccgtactgcgagggctgttacactgacaccctggagaagtgtaacacctgcggggagcccatcactgaccgcatgctgagggccacgggcaaggcctatcacccgcactgcttcacctgtgtggtctgcgcccgccccctggagggcacctccttcatcgtggaccaggccaaccggccccactgtgtccccgactaccacaagcagtacgccccgaggtgctccgtctgctctgagcccatcatgcctgagcctggccgagatgagactgtgcgagtggtcgccctggacaagaacttccacatgaagtgttacaagtgtgaggactgcgggaagcccctgtcgattgaggcagatgacaatggctgcttccccctggacggtcacgtgctctgtcggaagtgccacactgctagagcccagacctgagtgaggacaggccctcttcagaccgcagtccatgccccattgtggaccacccacactgagaccacctgcccccacctcagttattgttttgatgtctagcccctcccatttccaacccctccctagcatcccaggtgccctgacccaggacccaacatggtctagggatgcaggatccccgccctggggtctggtcctcgcccatcctgcagggattgcccaccgtcttccagacaccccacctgaggggggcaccaggtttagtgctgctgctttcactgctgcacccgcgccctcggccggccccccgagcagcctttgtactctgcttgcggagggctgggagaccctccaggacattcccaccctcccccatgctgccaagttgtagctatagctacaaataaaaaaaaaccttgttttccag

SEQ ID NO: 403736 - DNA, 2242 bp, Homo sapiens
  misc_feature (1124)..(1124): n is a, c, g, or t
  misc_feature (1143)..(1143): n is a, c, g, or t
aaggctgtctggtctggaatttttgggatgtcctccccgcccggctggaggctgctccggaccgggacgcagagtctgcggacccggcgccgaggcggccacccgagacgcggcgcgcacgctccggcctgcgcagcccggcccggccatggcggccccccgcccgtctcccgcgatctccgtttcggtctcggctccggctttttacgccccgcagaagaagttcggccctgtggtggccccaaagcccaaagtgaatcccttccggcccggggacagcgagcctcccccggcacccggggcccagcgcgcacagatgggccgggtgggcgagattcccccgccgccccggaagactttcccctgcctccacctccccttgctggggatggcgacgatgcagagggtgctctgggaggtgccttcccgccgccccctcccccgatcgaggaatcatttccccctgcgcctctggaggaggagatcttcccttccccgccgcctcctccggaggaggagggagggcctgaggcccccataccgcccccaccacagcccagggagaaggtgagcagtattgatttggagatcgactctctgtcctcactgctggatgacatgaccaagaatgatcctttcaaagcccgggtgtcatctggatatgtgcccccaccagtggccactccattcagttccaagtccagtaccaagcctgcagccgggggcacagcacccctgcctccttggaagtccccttccagctcccagcctctgccccaggttccggctccggctcagagccagacacagttccatgtccagtcccagacccagcctgtgtctttggctaacacccagccccgagggcccccagcctcatctccggctccagcccctaagttttctccagtgactcctaagtttactcctgtggcttccaagttcagtcctggagccccaggtggatctgggtcacaaccaaatcaaaaattggggcaccccgaagctctttctgctggcacaggctcccctcaacctcccagcttcacctatgcccagcagagggagaagccccgagtgcaggagaagcagcaccccgtgcccccaccggtcagaaccaaaancaggtgcgctccctggggncccaggtcccctgactctgaaggaggtggaggagctggagcagtgaccagcagctatgcaggacatggagcatctcagaggcgatgtggctgtcaacgaactctgcggacgatgccatcaaccctggcccgggcgcagccagccgtccgcgctctagggcagctgttccacatcgcctgcttcacctgccaccagtgtgcgcagcagctccagggccagcagttctacagtctggagggggcgccgtactgcgagggctgttacactgacaccctggagaagtgtaacacctgcggggagcccatcactgaccgcatgctgagggccacgggcaaggcctatcacccgcactgcttcacctgtgtggtctgcgcccgccccctggagggcacctccttcatcgtggaccaggccaaccggccccactgtgtccccgactaccacaagcagtacgccccgaggtgctccgtctgctctgagcccatcatgcctgagcctggccgagatgagactgtgcgagtggtcgccctggacaagaacttccacatgaagtgttacaagtgtgaggactgcgggaagcccctgtcgattgaggcagatgacaatggctgcttccccctggacggtcacgtgctctgtcggaagtgccacactgctagagcccagacctgagtgaggacaggccctcttcagaccgcagtccatgccccattgtggaccacccacactgagaccacctgcccccacctcagttattgttttgatgtctagcccctcccatttccaacccctccctagcatcccaggtgccctgacccaggacccaacatggtctagggatgcaggatccccgccctggggtctggtcctcgcccatcctgcagggattgcccaccgtcttccagacaccccacctgaggggggcaccaggtttagtgctgctgctttcactgctgcacccgcgccctcggccggccccccgagcagcctttgtactctgcttgcggagggctgggagaccctccaggacattcccaccctcccccatgctgccaagttgtagctatagctacaaataaaaaaaaaccttgttttccag

SEQ ID NO: 403737 - DNA, 2025 bp, Homo sapiens
aaggctgtctggtctggaatttttgggatgtcctccccgcccggctggaggctgctccggaccgggacgcagagtctgcggacccggcgccgaggcggccacccgagacgcggcgcgcacgctccggcctgcgcagcccggcccggccatggcggccccccgcccgtctcccgcgatctccgtttcggtctcggctccggctttttacgccccgcagaagaagttcggccctgtggtggccccaaagcccaaagtgaatcccttccggcccggggacagcgagcctcccccggcacccggggcccagcgcgcacagatgggccgggtgggcgagattcccccgccgccccggaagactttcccctgcctccacctccccttgctggggatggcgacgatgcagagggtgctctgggaggtgccttcccgccgccccctcccccgatcgaggaatcatttccccctgcgcctctggaggaggagatcttcccttccccgccgcctcctccggaggaggagggagggcctgaggcccccataccgcccccaccacagcccagggagaaggtgagcagtattgatttggagatcgactctctgtcctcactgctggatgacatgaccaagaatgatcctttcaaagcccgggtgtcatctggatatgtgcccccaccagtggccactccattcagttccaagtccagtaccaagcctgcagccgggggcacagcacccctgcctccttggaagtccccttccagctcccagcctctgccccaggttccggctccggctcagagccagacacagttccatgttcagccccagccccagcccaagcctcaggtccaactccatgtccagtcccagacccagcctgtgtctttggctaacacccagccccgagggcccccagcctcatctccggctccagcccctaagttttctccagtgactcctaagtttactcctgtggcttccaagttcagtcctggagccccaggtggatctgggtcacaaccaaatcaaaaattggggcaccccgaagctctttctgctggcacaggctcccctcaacctcccagcttcacctatgcccagcagagggagaagccccgagtgcaggagaagcagcaccccgtgcccccaccggctcagaaccaaaaccaggtgcgctcccctggggccccagggcccctgactctgaaggaggtggaggagctggagcagctgacccagcagctaatgcaggacatggagcatcctcagaggcagaatgtggctgtcaacgaactctgcggccgatgccatcaacccctggcccgggcgcagccagccgtccgcgctctagggcagctgttccacatcgcctgcttcacctgccaccagtgtgcgcagcagctccagggccagcagttctacagtctggagggggcgccgtactgcgagggctgttacactgacaccctggagaagtgtaacacctgcggggagcccatcactgaccgcatgctgagggccacgggcaaggcctatcacccgcactgcttcacctgtgtggtctgcgcccgccccctggagggcacctccttcatcgtggaccaggccaaccggccccactgtgtccccgactaccacaagcagtacgccccgaggtgctccgtctgctctgagcccatcatgcctgagcctggccgagatgagactgtgcgagtggtcgccctggacaagaacttccacatgaagtgttacaagtgtgaggactgcgggaagcccctgtcgattgaggcagatgacaatggctgcttccccctggacggtcacgtgctctgtcggaagtgccacactgctagagcccagacctgagtgaggacaggccctcttcagaccgcagtccatgccccattgtggaccacccacactgagaccacctgcccccacctcagttattgttttgatgtctagctcccccatgctgccaagttgtagctatagctacaaataaaaaaaaaccttgttttccag

SEQ ID NO: 403738 - DNA, 1002 bp, Homo sapiens
cccacgcgtccgcggaccgcgtgggcctggcccgggcgcagccagccgtccgcgctctagggcagctgttccacatcgcctgcttcacctgccaccagtgtgcgcagcagctccagggccagcagttctacagtctggagggggcgccgtactgcgagggctgttacactgacaccctggagaagtgtaacacctgcggggagcccatcactgaccgcatgctgagggccacgggcaaggcctatcacccgcactgcttcacctgtgtggtctgcgcccgccccctggagggcacctccttcatcgtggaccaggccaaccggccccactgtgtccccgactaccacaagcagtacgccccgaggtgctccgtctgctctgagcccatcatgcctgagcctggccgagatgagactgtgcgagtggtcgccctggacaagaacttccacatgaagtgttacaagtgtgaggactgcgggaagcccctgtcgattgaggcagatgacaatggctgcttccccctggacggtcacgtgctctgtcggaagtgccacactgctagagcccagacctgagtgaggacaggccctcttcagaccgcagtccatgccccattgtggaccacccacactgagaccacctgcccccacctcagttattgttttgatgtctagcccctcccatttccaacccctccctagcatcccaggtgccctgacccaggacccaacatggtctagggatgcaggatccccgccctggggtctggtcctcgcccatcctgcagggattgcccaccgtcttccagacaccccacctgaggggggcaccaggtttagtgctgctgctttcactgctgcacccgcgccctcggccggccccccgagcagcctttgtactctgcttgcggagggctgggagaccctccaggacattcccaccctcccccatgctgccaagttgtagctatagctacaaataaaaaaaaaccttgttttccag

SEQ ID NO: 403739 - DNA, 1162 bp, Homo sapiens
cgcagctctacatacttccttctatttactgctgtcttctctggccttcccagaactctgcggccgatgccatcaacccctggcccgggcgcagccagccgtccgcgctctagggcagctgttccacatcgcctgcttcacctgccaccagtgtgcgcagcagctccagggccagcagttctacagtctggagggggcgccgtactgcgagggctgttacactgtgagtcgggctgtgctgggctgtgctgggctgtgctgggcagtcgggccctggaagcttgctgtggggtgccggttccctgccaacctcctcctgctgcctcctcagacaccctggagaagtgtaacacctgcggggagcccatcactgaccgcatgctgagggccacgggcaaggcctatcacccgcactgcttcacctgtgtggtctgcgcccgccccctggagggcacctccttcatcgtggaccaggccaaccggccccactgtgtccccgactaccacaagcagtacgccccgaggtgctccgtctgctctgagcccatcatgcctgagcctggccgagatgagactgtgcgagtggtcgccctggacaagaacttccacatgaagtgttacaagtgtgaggactgcgggaagcccctgtcgattgaggcagatgacaatggctgcttccccctggacggtcacgtgctctgtcggaagtgccacactgctagagcccagacctgagtgaggacaggccctcttcagaccgcagtccatgccccattgtggaccacccacactgagaccacctgcccccacctcagttattgttttgatgtctagcccctcccatttccaacccctccctagcatcccaggtgccctgacccaggacccaacatggtctagggatgcaggatccccgccctggggtctggtcctcgcccatcctgcagggattgcccaccgtcttccagacaccccacctgaggggggcaccaggtttagtgctgctgctttcactgctgcacccgcgccctcggccggccccccgagcagcctttgtactctgcttgcggagggctgggagaccctccaggacattcccaccctcccccatgctgccaagttgtagctatagctacaaataaaaaaaaaccttgttttccag

SEQ ID NO: 403740 - DNA, 1735 bp, Homo sapiens
aaggctgtctggtctggaatttttgggatgtcctccccgcccggctggaggctgctccggaccgggacgcagagtctgcggacccggcgccgaggcggccacccgagacgcggcgcgcacgctccggcctgcgcagcccggcccggccatggcggccccccgcccgtctcccgcgatctccgtttcggtctcggctccggctttttacgccccgcagaagaagttcggccctgtggtggccccaaagcccaaagtgaatcccttccggcccggggacagcgagcctcccccggcacccggggcccagcgcgcacagatgggccgggtgggcgagattcccccgccgccccggaagactttcccctgcctccacctccccttgctggggatggcgacgatgcagagggtgctctgggaggtgccttcccgccgccccctcccccgatcgaggaatcatttccccctgcgcctctggaggaggagatcttcccttccccgccgcctcctccggaggaggagggagggcctgaggcccccataccgcccccaccacagcccagggagaaggtgagcagtattgatttggagatcgactctctgtcctcactgctggatgacatgaccaagaatgatcctttcaaagcccgggtgtcatctggatatgtgcccccaccagtggccactccattcagttccaagtccagtaccaagcctgcagccgggggcacagcacccctgcctccttggaagtccccttccagctcccagcctctgccccaggttccggctccggctcagagccagacacagttccatgttcagccccagccccagcccaagcctcaggtccaactccatgtccagtcccagacccagcctgtgtctttggctaacacccagccccgagggcccccagcctcatctccggctccagcccctaagttttctccagtgactcctaagtttactcctgtggcttccaagttcagtcctggagccccaggtggatctgggtcacaaccaaatcaaaaattggggcaccccgaagctctttctgctggcacaggctcccctcaacctcccagcttcacctatgcccagcagagggagaagccccgagtgcaggagaagcagcaccccgtgcccccaccggctcagaaccaaaaccaggtgcgctcccctggggccccagggcccctgactctgaaggaggtggaggagctggagcagctgacccagcagctaatgcaggacatggagcatcctcagaggcagaatgtggctgtcaacgaactctgcggccgatgccatcaacccctggcccgggcgcagccagccgtccgcgctctagggcagctgttccacatcgcctgcttcacctgccaccagtgtgcgcagcagctccagggccagcagttctacagtctggagggggcgccgtactgcgagggctgttacactgacaccctggagaagtgtaacacctgcggggagcccatcactgaccgcatgctgagggccacgggcaaggcctatcacccgcactgcttcacctgtgtggtctgcgcccgccccctggagggcacctccttcatcgtggaccagggccggccccccgagcagcctttgtactctgcttgcggagggctgggagaccctccaggacattcccaccctcccccatgctgccaagttgtagctatagctacaaataaaaaaaaaccttgttttccag

SEQ ID NO: 403741 - DNA, 604 bp, Homo sapiens
  misc_feature (22)..(22): n is a, c, g, or t
  misc_feature (32)..(32): n is a, c, g, or t
gtccagggctgttacggtcccnaagtcgtttnattggacaagaacttccacatgaagtgttacaagtgtgaggactgcgggaagcccctgtcgattgaggcagatgacaatggctgcttccccctggacggtcacgtgctctgtcggaagtgccacactgctagagcccagacctgagtgaggacaggccctcttcagaccgcagtccatgccccattgtggaccacccacactgagaccacctgcccccacctcagttattgttttgatgtctagcccctcccatttccaacccctccctagcatcccaggtgccctgacccaggacccaacatggtctagggatgcaggatccccgccctggggtctggtcctcgcccatcctgcagggattgcccaccgtcttccagacaccccacctgaggggggcaccaggtttagtgctgctgctttcactgctgcacccgcgccctcggccggccccccgagcagcctttgtactctgcttgcggagggctgggagaccctccaggacattcccaccctcccccatgctgccaagttgtagctatagctacaaataaaaaaaaaccttgttttccag

SEQ ID NO: 403742 - DNA, 1731 bp, Homo sapiens
aaggctgtctggtctggaatttttgggatgtcctccccgcccggctggaggctgctccggaccgggacgcagagtctgcggacccggcgccgaggcggccacccgagacgcggcgcgcacgctccggcctgcgcagcccggcccggccatggcggccccccgcccgtctcccgcgatctccgtttcggtctcggctccggctttttacgccccgcagaagaagttcggccctgtggtggccccaaagcccaaagtgaatcccttccggcccggggacagcgagcctcccccggcacccggggcccagcgcgcacagatgggccgggtgggcgagattcccccgccgccccggaagactttcccctgcctccacctccccttgctggggatggcgacgatgcagagggtgctctgggaggtgccttcccgccgccccctcccccgatcgaggaatcatttccccctgcgcctctggaggaggagatcttcccttccccgccgcctcctccggaggaggagggagggcctgaggcccccataccgcccccaccacagcccagggagaaggtgagcagtattgatttggagatcgactctctgtcctcactgctggatgacatgaccaagaatgatcctttcaaagcccgggtgtcatctggatatgtgcccccaccagtggccactccattcagttccaagtccagtaccaagcctgcagccgggggcacagcacccctgcctccttggaagtccccttccagctcccagcctctgccccaggttccggctccggctcagagccagacacagttccatgttcagccccagccccagcccaagcctcaggtccaactccatgtccagtcccagaccccacctgaggggggcaccaggtttagtgctgctgctttcactgctgcacccgcgccctcggccggccccccgagcagcctttgtactctgcttgcggagggctgggagaccctccaggacattcccaccctcccccatgctgccaagttgtagctatagctacaaataaaaaaaaaccttgttttccagaaaaaaaaaaaaaaaaaaaaacaaaaaaaaaaaaaaaaaaaaaaaaaaaaaaaaaaacacaaaaaaaaacaagaaaaaagagaggggcggcgcgcgcgcgcgagaaaaaccccacccagcgagggggggcgcacacaagacgcgcaccagccgaccacggagtgcgaacaaaagggcggcgcccacacacgcaggagtcgagttgctactatataataccaacgagtagcagccgcgcgcgcgggcggggagcgagactaaacaacacgagcgagggggcggtgcgagcacaaacaactcgcgacagcagcgcgagcagccctacggagggagagagagagcgacacaaccaactgatgaggcgggcgggggggggggacaacaaagcgggagcaacacaaccccctcccaccacaagacaaggagagagaataagacaccgcccgagacggggaaggcacaaaacaaccacaaggcagcagaagagcggagaaggggggcggtaacagaaacaaaaggaagcggggaaagaaggaacgcgcggcggggaggagaaagaaaagacaggcagcaagcgacggggagggcagcgcgatcgtggcagaagaaaaaagaaatctcgcagcagcgcgagggggcgaggggcgatacgagcccaggggggggggg

SEQ ID NO: 403743 - DNA, 1294 bp, Homo sapiens
  misc_feature (1268)..(1268): n is a, c, g, or t
aaggctgtctggtctggaatttttgggatgtcctccccgcccggctggaggctgctccggaccgggacgcagagtctgcggacccggcgccgaggcggccacccgagacgcggcgcgcacgctccggcctgcgcagcccggcccggccatggcggccccccgcccgtctcccgcgatctccgtttcggtctcggctccggctttttacgccccgcagaagaagttcggccctgtggtggccccaaagcccaaagtgaatcccttccggcccggggacagcgagcctcccccggcacccggggcccagcgcgcacagatgggccgggtgggcgagattcccccgccgccccggaagactttcccctgcctccacctccccttgctggggatggcgacgatgcagagggtgctctgggaggtgccttcccgccgccccctcccccgatcgaggaatcatttccccctgcgcctctggaggaggagatcttcccttccccgccgcctcctccggaggaggagggagggcctgaggcccccataccgcccccaccacagcccagggagaaggtgagcagtattgatttggagatcgactctctgtcctcactgctggatgacatgaccaagaatgatcctttcaaagcccgggtgtcatctggatatgtgcccccaccagtggccactccattcagttccaagtccagtaccaagcctgcagccgggggcacagcacccctgcctccttggaagtccccttccagctcccagcctctgccccaggttccggctccggctcagagccagacacagttccatgttcagccccagccccagcccaagcctcaggtccaactccatgtccagtcccagacccagcctgtgtctttggctaacacccagccccgtgcccccaccggctcagaaccaaaaccaggtgcgctcccctggggccccagggcccctgactctgaaggaggtggaggagctggagcagctgacccagcagctaatgcaggacatggagcatcctcagaggcagaatgtggctgtcaacgaactctgcggccgatgccatcaacctcccagcttcactatgcccagcagagggagaagccccgagtgcaggagaagcagcacccgtgccccctggagggcacctccttcatcgtggaccaggccaaccggccccactgtgtccccgactaccacaagcagtacgccccgaggtgctccgtctgctctgagcccatcatgctgagctggcgaangagacgtccatggcccctgacagacc

SEQ ID NO: 403744 - DNA, 976 bp, Homo sapiens
ggctggtacgctcggagtacgggatcaggacccaacatggtctagggatgcaggatccccgccctggggtctggtcctcgcccatcctgcagggattgcccaccgtcttccagacaccccacctgaggggggcaccaggtttagtgctgctgctttcactgctgcacccgcgccctcggccggccccccgagcagcctttgtactctgcttgcggagggctgggagaccctccaggacattcccaccctcccccatgctgccaagttgtagctatagctacaaataaaaaaaaaccttgttttccagaaaaaaaaaaaaaaaaaaaaacaaaaaaaaaaaaaaaaaaaaaaaaaaaaaaaaaaacacaaaaaaaaacaagaaaaaagagaggggcggcgcgcgcgcgcgagaaaaaccccacccagcgagggggggcgcacacaagacgcgcaccagccgaccacggagtgcgaacaaaagggcggcgcccacacacgcaggagtcgagttgctactatataataccaacgagtagcagccgcgcgcgcgggcggggagcgagactaaacaacacgagcgagggggcggtgcgagcacaaacaactcgcgacagcagcgcgagcagccctacggagggagagagagagcgacacaaccaactgatgaggcgggcgggggggggggacaacaaagcgggagcaacacaaccccctcccaccacaagacaaggagagagaataagacaccgcccgagacggggaaggcacaaaacaaccacaaggcagcagaagagcggagaaggggggcggtaacagaaacaaaaggaagcggggaaagaaggaacgcgcggcggggaggagaaagaaaagacaggcagcaagcgacggggagggcagcgcgatcgtggcagaagaaaaaagaaatctcgcagcagcgcgagggggcgaggggcgatacgagcccaggggggggggg

SEQ ID NO: 403745 - DNA, 661 bp, Homo sapiens
  misc_feature (83)..(83): n is a, c, g, or t
ccatcgatgattactcacgtgcgttcctcggttttaatttcgtacgggggtgtcgttcccttctcggttagtggcctgttgcntgacagtgacgcagagtctgcggacccggcgccgaggcggccacccgagacgcggcgcgcacgctccggcctgcgcagcccggcccggccatggcggccccccgcccgtctcccgcgatctccgtttcggtctcggctccggctttttacgccccgcagaagaagttcggccctgtggtggccccaaagcccaaagtgaatcccttccggcccggggacagcgagcctcccccggcacccggggcccagcgcgcacagatgggccgggtgggcgagattcccccgccgtcctccggaagactttctcccttgtcgtccatccttccctcgttgctggagtgactggctgagcagagtgacgagatgtggtgactctgagtggaggggtgtcgcatttcctcgtcatgacgcacttctgcgcctaaactacgtcaggagatatacctcaagcagcctcatgcacgtcattcttgcgcagcgtagtgcactagtcaatcccattatgcacactggttaaacagtcagcgcacaaaggaagggaagcgagtaccggcaccgtcaaaacagggctgatcaaa

SEQ ID NO: 403746 - DNA, 604 bp, Homo sapiens
tctagagatcccctcgaagaggaggtgttcgccctggacaagaacttccacatgaagtgttacaagtgtgaggactgcgggaagcccctgtcgattgaggcagatgacaatggctgcttccccctggacggtcacgtgctctgtcggaagtgccacactgctagagcccagacctgagtgaggacaggccctcttcagaccgcagtccatgccccattgtggaccacccacactgagaccacctgcccccacctcagttattgttttgatgtctagcccctcccatttccaacccctccctagcatcccaggtgccctgacccaggacccaacatggtctagggatgcaggatccccgccctggggtctggtcctcgcccatcctgcagggattgcccaccgtcttccagacaccccacctgaggggggcaccaggtttagtgctgctgctttcactgctgcacccgcgccctcggccggccccccgagcagcctttgtactctgcttgcggagggctgggagaccctccaggacattcccaccctcccccatgctgccaagttgtagctatagctacaaataaaaaaaaaccttgttttccag

SEQ ID NO: 403747 - DNA, 954 bp, Homo sapiens
cacggaaatagtaggagtcggtcccgggtttaatttcatgacgggggtgtccgtttcccgtgtaggctagtagggcagttgctgcgaccagtgacgcagagtctgcggacccggcgccgaggcggccacccgagacgcggcgcgcacgctccggcctgcgcagcccggcccggccatggcggccccccgcccgtctcccgcgatctccgtttcggtctcggctccggctttttacgccccgcagaagaagttcggccctgtggtggccccaaagcccaaagtgaatcccttccggcccggggacagcgagcctcccccggcacccggggcccagcgcgcacagatgggccgggtgggcgagattcccccgccgacgacgacccgcggaaagattacgcctgcctggactctactgtgctggggatgcccgacgatgcagatggtgactcgtgcgagggattgcatgtctgcgcacgtaactatgcccgagggcacgtactacacttattggcaaggagatcattgaccctggatgttggaccgatattcgcaagctggctgaccagtgcaccggtcttcagggcttcttggtttttccacagcttctggtgggggaactggttctgggttcacctccctgtcatggcaacgtctctcaggttgattgatggccaagaagtccaagctggagttctccatttaccccagcaccccgaggtttgcacagctgatagctagagccctacaactccgatccttcaccacccagagcagcctggagcactctgattgtgccttcatgggcagaacaatgaggcccatgtactgacactcgtgtcgtcgcaacttcgcatttcgagcggcaaaccttaactaccttaatcgacttgattaggcacattgggctctcaacaaatgcttcccgacgattgaggaccccgaagggtcctgaag

SEQ ID NO: 403748 - DNA, 2318 bp, Homo sapiens
  misc_feature (83)..(83): n is a, c, g, or t
ccatcgatgattactcacgtgcgttcctcggttttaatttcgtacgggggtgtcgttcccttctcggttagtggcctgttgcntgacagtgacgcagagtctgcggacccggcgccgaggcggccacccgagacgcggcgcgcacgctccggcctgcgcagcccggcccggccatggcggccccccgcccgtctcccgcgatctccgtttcggtctcggctccggctttttacgccccgcagaagaagttcggccctgtggtggccccaaagcccaaagtgaatcccttccggcccggggacagcgagcctcccccggcacccggggcccagcgcgcacagatgggccgggtgggcgagattcccccgccgccccggaagactttcccctgcctccacctccccttgctggggatggcgacgatgcagagggtgctctgggaggtgccttcccgccgccccctcccccgatcgaggaatcatttccccctgcgcctctggaggaggagatcttcccttccccgccgcctcctccggaggaggagggagggcctgaggcccccataccgcccccaccacagcccagggagaaggtgagcagtattgatttggagatcgactctctgtcctcactgctggatgacatgaccaagaatgatcctttcaaagcccgggtgtcatctggatatgtgcccccaccagtggccactccattcagttccaagtccagtaccaagcctgcagccgggggcacagcacccctgcctccttggaagtccccttccagctcccagcctctgccccaggttccggctccggctcagagccagacacagttccatgttcagccccagccccagcccaagcctcaggtccaactccatgtccagtcccagacccagcctgtgtctttggctaacacccagccccgagggcccccagcctcatctccggctccagcccctaagttttctccagtgactcctaagtttactcctgtggcttccaagttcagtcctggagccccaggtggatctgggtcacaaccaaatcaaaaattggggcaccccgaagctctttctgctggcacaggctcccctcaacctcccagcttcacctatgcccagcagagggagaagccccgagtgcaggagaagcagcaccccgtgcccccaccggctcagaaccaaaaccaggtgcgctcccctggggccccagggcccctgactctgaaggaggtggaggagctggagcagctgacccagcagctaatgcaggacatggagcatcctcagaggcagaatgtggctgtcaacgaactctgcggccgatgccatcaacccctggcccgggcgcagccagccgtccgcgctctagggcagctgttccacatcgcctgcttcacctgccaccagtgtgcgcagcagctccagggccagcagttctacagtctggagggggcgccgtactgcgagggctgttacactgacaccctggagaagtgtaacacctgcggggagcccatcactgaccgcatgctgagggccacgggcaaggcctatcacccgcactgcttcacctgtgtggtctgcgcccgccccctggagggcacctccttcatcgtggaccaggccaaccggccccactgtgtccccgactaccacaagcagtacgccccgaggtgctccgtctgctctgagcccatcatgcctgagcctggccgagatgagactgtgcgagtggtcgccctggacaagaacttccacatgaagtgttacaagtgtgaggactgcgggaagcccctgtcgattgaggcagatgacaatggctgcttccccctggacggtcacgtgctctgtcggaagtgccacactgctagagcccagacctgagtgaggacaggccctcttcagaccgcagtccatgccccattgtggaccacccacactgagaccacctgcccccacctcagttattgttttgatgtctagcccctcccatttccaacccctccctagcatcccaggtgccctgacccaggacccaacatggtctagggatgcaggatccccgccctggggtctggtcctcgcccatcctgcagggattgcccaccgtcttccagacaccccacctgaggggggcaccaggtttagtgctgctgctttcactgctgcacccgcgccctcggccggccccccgagcagcctttgtactctgcttgcggagggctgggagaccctccaggacattcccaccctcccccatgctgccaagttgtagctatagctacaaataaaaaaaaaccttgttttccag

SEQ ID NO: 403749 - DNA, 1991 bp, Homo sapiens
agctgcaccactcctcggcagtgcgcccggcctttcctgacctgccccggaagactttcccctgcctccacctccccttgctggggatggcgacgatgcagagggtgctctgggaggtgccttcccgccgccccctcccccgatcgaggaatcatttccccctgcgcctctggaggaggagatcttcccttccccgccgcctcctccggaggaggagggagggcctgaggcccccataccgcccccaccacagcccagggagaaggtgagcagtattgatttggagatcgactctctgtcctcactgctggatgacatgaccaagaatgatcctttcaaagcccgggtgtcatctggatatgtgcccccaccagtggccactccattcagttccaagtccagtaccaagcctgcagccgggggcacagcacccctgcctccttggaagtccccttccagctcccagcctctgccccaggttccggctccggctcagagccagacacagttccatgttcagccccagccccagcccaagcctcaggtccaactccatgtccagtcccagacccagcctgtgtctttggctaacacccagccccgagggcccccagcctcatctccggctccagcccctaagttttctccagtgactcctaagtttactcctgtggcttccaagttcagtcctggagccccaggtggatctgggtcacaaccaaatcaaaaattggggcaccccgaagctctttctgctggcacaggctcccctcaacctcccagcttcacctatgcccagcagagggagaagccccgagtgcaggagaagcagcaccccgtgcccccaccggctcagaaccaaaaccaggtgcgctcccctggggccccagggcccctgactctgaaggaggtggaggagctggagcagctgacccagcagctaatgcaggacatggagcatcctcagaggcagaatgtggctgtcaacgaactctgcggccgatgccatcaacccctggcccgggcgcagccagccgtccgcgctctagggcagctgttccacatcgcctgcttcacctgccaccagtgtgcgcagcagctccagggccagcagttctacagtctggagggggcgccgtactgcgagggctgttacactgacaccctggagaagtgtaacacctgcggggagcccatcactgaccgcatgctgagggccacgggcaaggcctatcacccgcactgcttcacctgtgtggtctgcgcccgccccctggagggcacctccttcatcgtggaccaggccaaccggccccactgtgtccccgactaccacaagcagtacgccccgaggtgctccgtctgctctgagcccatcatgcctgagcctggccgagatgagactgtgcgagtggtcgccctggacaagaacttccacatgaagtgttacaagtgtgaggactgcgggaagcccctgtcgattgaggcagatgacaatggctgcttccccctggacggtcacgtgctctgtcggaagtgccacactgctagagcccagacctgagtgaggacaggccctcttcagaccgcagtccatgccccattgtggaccacccacactgagaccacctgcccccacctcagttattgttttgatgtctagcccctcccatttccaacccctccctagcatcccaggtgccctgacccaggacccaacatggtctagggatgcaggatccccgccctggggtctggtcctcgcccatcctgcagggattgcccaccgtcttccagacaccccacctgaggggggcaccaggtttagtgctgctgctttcactgctgcacccgcgccctcggccggccccccgagcagcctttgtactctgcttgcggagggctgggagaccctccaggacattcccaccctcccccatgctgccaagttgtagctatagctacaaataaaaaaaaaccttgttttccag

SEQ ID NO: 403750 - DNA, 2466 bp, Homo sapiens
aaggctgtctggtctggaatttttgggatgtcctccccgcccggctggaggctgctccggaccgggacgcagagtctgcggacccggcgccgaggcggccacccgagacgcggcgcgcacgctccggcctgcgcagcccggcccggccatggcggccccccgcccgtctcccgcgatctccgtttcggtctcggctccggctttttacgccccgcagaagaagttcggccctgtggtggccccaaagcccaaagtgaatcccttccggcccggggacagcgagcctcccccggcacccggggcccagcgcgcacagatgggccgggtgggcgagattcccccgccgccccggaagactttcccctgcctccacctccccttgctggggatggcgacgatgcagagggtgctctgggaggtgccttcccgccgccccctcccccgatcgaggaatcatttccccctgcgcctctggaggaggagatcttcccttccccgccgcctcctccggaggaggagggagggcctgaggcccccataccgcccccaccacagcccagggagaaggtgagcagtattgatttggagatcgactctctgtcctcactgctggatgacatgaccaagaatgatcctttcaaagcccgggtgtcatctggatatgtgcccccaccagtggccactccattcagttccaagtccagtaccaagcctgcagccgggggcacagcacccctgcctccttggaagtccccttccagctcccagcctctgccccaggttccggctccggctcagagccagacacagttccatgttcagccccagccccagcccaagcctcaggtccaactccatgtccagtcccagacccagcctgtgtctttggctaacacccagccccgagggcccccagcctcatctccggctccagcccctaagttttctccagtgactcctaagtttactcctgtggcttccaagttcagtcctggagccccaggtggatctgggtcacaaccaaatcaaaaattggggcaccccgaagctctttctgctggcacaggctcccctcaacctcccagcttcacctatgcccagcagagggagaagccccgagtgcaggagaagcagcaccccgtgcccccaccggctcagaaccaaaaccaggtgcgctcccctggggccccagggcccctgactctgaaggaggtggaggagctggagcagctgacccagcagctaatgcaggacatggagcatcctcagaggcagaatgtggctgtcaacgaactctgcggccgatgccatcaacccctggcccgggcgcagccagccgtccgcgctctagggcagctgttccacatcgcctgcttcacctgccaccagtgtgcgcagcagctccagggccagcagttctacagtctggagggggcgccgtactgcgagggctgttacactgacaccctggagaagtgtaacacctgcggggagcccatcactgaccgcatgctgagggccacgggcaaggcctatcacccgcactgcttcacctgtgtggtctgcgcccgccccctggagggcacctccttcatcgtggaccaggccaaccggccccactgtgtccccgactaccacaagcagtacgccccgaggtgctccgtctgctctgagcccatcatgcctgagcctggccgagatgagactgtgcgagtggtcgccctggacaagaacttccacatgaagtgttacaagtgtgaggactgcgggaagcccctgtcgattgaggcagatgacaatggctgcttccccctggacggtcacgtgctctgtcggaagtgccacactgctagagcccagacctgagtgaggacaggccctcttcagaccgcagtccatgccccattgtggaccacccacactgagaccacctgcccccacctcagttattgttttgatgtctagcccctcccatttccaacccctccctagcatcccaggtgccctgacccaggacccaacatggtctagggatgcaggatccccgccctggggtctggtcctcgcccatcctgcagggattgcccaccgtcttccagacaccccacctgaggggggcaccaggtttagtgctgctgctttcactgctgcacccgcgccctcggccggccccccgagcagcctttgtactctgcttgcggagggctgggagaccctccaggacattcccaccctcccccatgctgccaagttgtagctatagctacaaataaaaaaaaaccttgttttccagaaaaaaaaaaaaaaaaaaaaactcgagggggggccccggtacccaaaattctccctattagggagtcggaattacaatttacacttggcccggtcggttttacaaacctccgtgaacctgggaaaaaaccctgtgcgtttacccccaaactttaattggccctttggaaaacc

SEQ ID NO: 403751 - DNA, 2834 bp, Homo sapiens
aaggctgtctggtctggaatttttgggatgtcctccccgcccggctggaggctgctccggaccgggacgcagagtctgcggacccggcgccgaggcggccacccgagacgcggcgcgcacgctccggcctgcgcagcccggcccggccatggcggccccccgcccgtctcccgcgatctccgtttcggtctcggctccggctttttacgccccgcagaagaagttcggccctgtggtggccccaaagcccaaagtgaatcccttccggcccggggacagcgagcctcccccggcacccggggcccagcgcgcacagatgggccgggtgggcgagattcccccgccgccccggaagactttcccctgcctccacctccccttgctggggatggcgacgatgcagagggtgctctgggaggtgccttcccgccgccccctcccccgatcgaggaatcatttccccctgcgcctctggaggaggagatcttcccttccccgccgcctcctccggaggaggagggagggcctgaggcccccataccgcccccaccacagcccagggagaaggtgagcagtattgatttggagatcgactctctgtcctcactgctggatgacatgaccaagaatgatcctttcaaagcccgggtgtcatctggatatgtgcccccaccagtggccactccattcagttccaagtccagtaccaagcctgcagccgggggcacagcacccctgcctccttggaagtccccttccagctcccagcctctgccccaggttccggctccggctcagagccagacacagttccatgttcagccccagccccagcccaagcctcaggtccaactccatgtccagtcccagacccagcctgtgtctttggctaacacccagccccgagggcccccagcctcatctccggctccagcccctaagttttctccagtgactcctaagtttactcctgtggcttccaagttcagtcctggagccccaggtggatctgggtcacaaccaaatcaaaaattggggcaccccgaagctctttctgctggcacaggctcccctcaacctcccagcttcacctatgcccagcagagggagaagccccgagtgcaggagaagcagcaccccgtgcccccaccggctcagaaccaaaaccaggtgcgctcccctggggccccagggcccctgactctgaaggaggtggaggagctggagcagctgacccagcagctaatgcaggacatggagcatcctcagaggcagaatgtggctgtcaacgaactctgcggccgatgccatcaacccctggcccgggcgcagccagccgtccgcgctctagggcagctgttccacatcgcctgcttcacctgccaccagtgtgcgcagcagctccagggccagcagttctacagtctggagggggcgccgtactgcgagggctgttacactgacaccctggagaagtgtaacacctgcggggagcccatcactgaccgcatgctgagggccacgggcaaggcctatcacccgcactgcttcacctgtgtggtctgcgcccgccccctggagggcacctccttcatcgtggaccaggccaaccggccccactgtgtccccgactaccacaagcagtacgccccgaggtgctccgtctgctctgagcccatcatgcctgagcctggccgagatgagactgtgcgagtggtcgccctggacaagaacttccacatgaagtgttacaagtgtgaggactgcgggaagcccctgtcgattgaggcagatgacaatggctgcttccccctggacggtcacgtgctctgtcggaagtgccacactgctagagcccagacctgagtgaggacaggccctcttcagaccgcagtccatgccccattgtggaccacccacactgagaccacctgcccccacctcagttattgttttgatgtctagcccctcccatttccaacccctccctagcatcccaggtgccctgacccaggacccaacatggtctagggatgcaggatccccgccctggggtctggtcctcgcccatcctgcagggattgcccaccgtcttccagacaccccacctgaggggggcaccaggtttagtgctgctgctttcactgctgcacccgcgccctcggccggccccccgagcagcctttgtactctgcttgcggagggctgggagaccctccaggacattcccaccctcccccatgctgccaagttgtagctatagctacaaataaaaaaaaaccttgttttccagaaaaaaaaaaaaaaaaaaaaaaaaaaaaaaaaaaacacaaaaaaaaaaaagaaaaaaaaaaaaaaaaaaaaaaagggggggggccccaaaaaaaacccccggggggcgccaacaaagcgaccccagttttggagaaaaaaggggcgccccaaaaagagagacggacgataaataaaaaaaggaaacgaccagcggacgaggcagcgtagtaaaaaaaaacgggcagtagaaggagagaaaaacaactccacccgaggcagaaaacatctatggaaaaaaaacacccaaatcattgaggaggggagagaaaccatagtaggagggcaaaaaaaccatgacaaagaaaatatataagagacccactcgagagggaaataaataagagcaagatgtagagaggggataatctatgaggatgttaaacaacaaaagataaaaaaataatgcttacagggaaagaaaaaaagatagtgtgtcacaaggaggagtatattaatataggacaaaattaataacccgagaggatgatataatataaggt

SEQ ID NO: 403752 - DNA, 2284 bp, Homo sapiens
  misc_feature (1166)..(1166): n is a, c, g, or t
  misc_feature (1185)..(1185): n is a, c, g, or t
aaggctgtctggtctggaatttttgggatgtcctccccgcccggctggaggctgctccggaccgggacgcagagtctgcggacccggcgccgaggcggccacccgagacgcggcgcgcacgctccggcctgcgcagcccggcccggccatggcggccccccgcccgtctcccgcgatctccgtttcggtctcggctccggctttttacgccccgcagaagaagttcggccctgtggtggccccaaagcccaaagtgaatcccttccggcccggggacagcgagcctcccccggcacccggggcccagcgcgcacagatgggccgggtgggcgagattcccccgccgccccggaagactttcccctgcctccacctccccttgctggggatggcgacgatgcagagggtgctctgggaggtgccttcccgccgccccctcccccgatcgaggaatcatttccccctgcgcctctggaggaggagatcttcccttccccgccgcctcctccggaggaggagggagggcctgaggcccccataccgcccccaccacagcccagggagaaggtgagcagtattgatttggagatcgactctctgtcctcactgctggatgacatgaccaagaatgatcctttcaaagcccgggtgtcatctggatatgtgcccccaccagtggccactccattcagttccaagtccagtaccaagcctgcagccgggggcacagcacccctgcctccttggaagtccccttccagctcccagcctctgccccaggttccggctccggctcagagccagacacagttccatgttcagccccagccccagcccaagcctcaggtccaactccatgtccagtcccagacccagcctgtgtctttggctaacacccagccccgagggcccccagcctcatctccggctccagcccctaagttttctccagtgactcctaagtttactcctgtggcttccaagttcagtcctggagccccaggtggatctgggtcacaaccaaatcaaaaattggggcaccccgaagctctttctgctggcacaggctcccctcaacctcccagcttcacctatgcccagcagagggagaagccccgagtgcaggagaagcagcaccccgtgcccccaccggtcagaaccaaaancaggtgcgctccctggggncccaggtcccctgactctgaaggaggtggaggagctggagcagtgaccagcagctatgcaggacatggagcatctcagaggcgatgtggctgtcaacgaactctgcggacgatgccatcaaccctggcccgggcgcagccagccgtccgcgctctagggcagctgttccacatcgcctgcttcacctgccaccagtgtgcgcagcagctccagggccagcagttctacagtctggagggggcgccgtactgcgagggctgttacactgacaccctggagaagtgtaacacctgcggggagcccatcactgaccgcatgctgagggccacgggcaaggcctatcacccgcactgcttcacctgtgtggtctgcgcccgccccctggagggcacctccttcatcgtggaccaggccaaccggccccactgtgtccccgactaccacaagcagtacgccccgaggtgctccgtctgctctgagcccatcatgcctgagcctggccgagatgagactgtgcgagtggtcgccctggacaagaacttccacatgaagtgttacaagtgtgaggactgcgggaagcccctgtcgattgaggcagatgacaatggctgcttccccctggacggtcacgtgctctgtcggaagtgccacactgctagagcccagacctgagtgaggacaggccctcttcagaccgcagtccatgccccattgtggaccacccacactgagaccacctgcccccacctcagttattgttttgatgtctagcccctcccatttccaacccctccctagcatcccaggtgccctgacccaggacccaacatggtctagggatgcaggatccccgccctggggtctggtcctcgcccatcctgcagggattgcccaccgtcttccagacaccccacctgaggggggcaccaggtttagtgctgctgctttcactgctgcacccgcgccctcggccggccccccgagcagcctttgtactctgcttgcggagggctgggagaccctccaggacattcccaccctcccccatgctgccaagttgtagctatagctacaaataaaaaaaaaccttgttttccag

SEQ ID NO: 403753 - DNA, 1751 bp, Homo sapiens
  misc_feature (633)..(633): n is a, c, g, or t
  misc_feature (652)..(652): n is a, c, g, or t
cggacgcgtgggcgaccacgagcccagggagaaggtgagcagtattgatttggagatcgactctctgtcctcactgctggatgacatgaccaagaatgatcctttcaaagcccgggtgtcatctggatatgtgcccccaccagtggccactccattcagttccaagtccagtaccaagcctgcagccgggggcacagcacccctgcctccttggaagtccccttccagctcccagcctctgccccaggttccggctccggctcagagccagacacagttccatgttcagccccagccccagcccaagcctcaggtccaactccatgtccagtcccagacccagcctgtgtctttggctaacacccagccccgagggcccccagcctcatctccggctccagcccctaagttttctccagtgactcctaagtttactcctgtggcttccaagttcagtcctggagccccaggtggatctgggtcacaaccaaatcaaaaattggggcaccccgaagctctttctgctggcacaggctcccctcaacctcccagcttcacctatgcccagcagagggagaagccccgagtgcaggagaagcagcaccccgtgcccccaccggtcagaaccaaaancaggtgcgctccctggggncccaggtcccctgactctgaaggaggtggaggagctggagcagtgaccagcagctatgcaggacatggagcatctcagaggcgatgtggctgtcaacgaactctgcggacgatgccatcaaccctggcccgggcgcagccagccgtccgcgctctagggcagctgttccacatcgcctgcttcacctgccaccagtgtgcgcagcagctccagggccagcagttctacagtctggagggggcgccgtactgcgagggctgttacactgacaccctggagaagtgtaacacctgcggggagcccatcactgaccgcatgctgagggccacgggcaaggcctatcacccgcactgcttcacctgtgtggtctgcgcccgccccctggagggcacctccttcatcgtggaccaggccaaccggccccactgtgtccccgactaccacaagcagtacgccccgaggtgctccgtctgctctgagcccatcatgcctgagcctggccgagatgagactgtgcgagtggtcgccctggacaagaacttccacatgaagtgttacaagtgtgaggactgcgggaagcccctgtcgattgaggcagatgacaatggctgcttccccctggacggtcacgtgctctgtcggaagtgccacactgctagagcccagacctgagtgaggacaggccctcttcagaccgcagtccatgccccattgtggaccacccacactgagaccacctgcccccacctcagttattgttttgatgtctagcccctcccatttccaacccctccctagcatcccaggtgccctgacccaggacccaacatggtctagggatgcaggatccccgccctggggtctggtcctcgcccatcctgcagggattgcccaccgtcttccagacaccccacctgaggggggcaccaggtttagtgctgctgctttcactgctgcacccgcgccctcggccggccccccgagcagcctttgtactctgcttgcggagggctgggagaccctccaggacattcccaccctcccccatgctgccaagttgtagctatagctacaaataaaaaaaaaccttgttttccag

SEQ ID NO: 403754 - DNA, 1451 bp, Homo sapiens
aaggctgtctggtctggaatttttgggatgtcctccccgcccggctggaggctgctccggaccgggacgcagagtctgcggacccggcgccgaggcggccacccgagacgcggcgcgcacgctccggcctgcgcagcccggcccggccatggcggccccccgcccgtctcccgcgatctccgtttcggtctcggctccggctttttacgccccgcagaagaagttcggccctgtggtggccccaaagcccaaagtgaatcccttccggcccggggacagcgagcctcccccggcacccggggcccagcgcgcacagatgggccgggtgggcgagattcccccgccgccccggaagactttcccctgcctccacctccccttgctggggatggcgacgatgcagagggtgctctgggaggtgccttcccgccgccccctcccccgatcgaggaatcatttccccctgcgcctctggaggaggagatcttcccttccccgccgcctcctccggaggaggagggagggcctgaggcccccataccgcccccaccacagcccagggagaaggtgagcagtattgatttggagatcgactctctgtcctcactgctggatgacatgaccaagaatgatcctttcaaagcccgggtgtcatctggatatgtgcccccaccagtggccactccattcagttccaagtccagtaccaagcctgcagccgggggcacagcacccctgcctccttggaagtccccttccagctcccaaccggccccactgtgtccccgactaccacaagcagtacgccccgaggtgctccgtctgctctgagcccatcatgcctgagcctggccgagatgagactgtgcgagtggtcgccctggacaagaacttccacatgaagtgttacaagtgtgaggactgcgggaagcccctgtcgattgaggcagatgacaatggctgcttccccctggacggtcacgtgctctgtcggaagtgccacactgctagagcccagacctgagtgaggacaggccctcttcagaccgcagtccatgccccattgtggaccacccacactgagaccacctgcccccacctcagttattgttttgatgtctagcccctcccatttccaacccctccctagcatcccaggtgccctgacccaggacccaacatggtctagggatgcaggatccccgccctggggtctggtcctcgcccatcctgcagggattgcccaccgtcttccagacaccccacctgaggggggcaccaggtttagtgctgctgctttcactgctgcacccgcgccctcggccggccccccgagcagcctttgtactctgcttgcggagggctgggagaccctccaggacattcccaccctcccccatgctgccaagttgtagctatagctacaaataaaaaaaaaccttgttttccag

SEQ ID NO: 403755 - DNA, 1785 bp, Homo sapiens
  misc_feature (1700)..(1700): n is a, c, g, or t
  misc_feature (1703)..(1703): n is a, c, g, or t
  misc_feature (1708)..(1708): n is a, c, g, or t
  misc_feature (1710)..(1710): n is a, c, g, or t
  misc_feature (1716)..(1716): n is a, c, g, or t
  misc_feature (1723)..(1723): n is a, c, g, or t
  misc_feature (1726)..(1726): n is a, c, g, or t
  misc_feature (1740)..(1740): n is a, c, g, or t
  misc_feature (1743)..(1743): n is a, c, g, or t
  misc_feature (1747)..(1747): n is a, c, g, or t
aaggctgtctggtctggaatttttgggatgtcctccccgcccggctggaggctgctccggaccgggacgcagagtctgcggacccggcgccgaggcggccacccgagacgcggcgcgcacgctccggcctgcgcagcccggcccggccatggcggccccccgcccgtctcccgcgatctccgtttcggtctcggctccggctttttacgccccgcagaagaagttcggccctgtggtggccccaaagcccaaagtgaatcccttccggcccggggacagcgagcctcccccggcacccggggcccagcgcgcacagatgggccgggtgggcgagattcccccgccgccccggaagactttcccctgcctccacctccccttgctggggatggcgacgatgcagagggtgctctgggaggtgccttcccgccgccccctcccccgatcgaggaatcatttccccctgcgcctctggaggaggagatcttcccttccccgccgcctcctccggaggaggagggagggcctgaggcccccataccgcccccaccacagcccagggagaaggtgagcagtattgatttggagatcgactctctgtcctcactgctggatgacatgaccaagaatgatcctttcaaagcccgggtgtcatctggatatgtgcccccaccagtggccactccattcagttccaagtccagtaccaagcctgcagccgggggcacagcacccctgcctccttggaagtccccttccagctcccagcctctgccccaggttccggctccggctcagagccagacacagttccatgttcagccccagccccagcccaagcctcaggtccaactccatgtccagtcccagacccagcctgtgtctttggctaacacccagccccgagggcccccagcctcatctccggctccagcccctaagttttctccagtgactcctaagtttactcctgtggcttccaagttcagtcctggagccccaggtggatctgggtcacaaccaaatcaaaaattggggcaccccgaagctctttctgctggcacaggctcccctcaacctcccagcttcacctatgcccagcagagggagaagccccgagtgcaggagaagcagcaccccgtgcccccaccggctcagaaccaaaaccaggtgcgctcccctggggccccagggcccctgactctgaaggaggtggaggagctggagcagctgacccagcagctaatgcaggacatggagcatcctcagaggcagaatgtggctgtcaacgaactctgcggccgatgccatcaacccctggcccgggcgcagccagccgtccgcgctctagggcagctgttccacatcgcctgcttcacctgccaccagtgtgcgcagcagctccagggccagcagttctacagtctggagggggcgccgtactgcgagggctgttacactgacaccctggagaagtgtaacacctgcggggagcccatcactgaccgcatgctgagggccacgggcaaggcctatcacccgcactgcttcacctgtgtggtctgcgcccgccccctggagggcacctccttcatcgtggaccaggccaaccggccccactgtgtccccgactaccacaagcagtacgccccgaggtgctccgtctgctctgagcccatcatgcctgagctggcgagatngantgggnantggcgnccggcanganttccctgatgtccntgngagntggggagccctgtcggtgagccttatcaggctctccca

SEQ ID NO: 403756 - DNA, 917 bp, Homo sapiens
acagtaagggtcgagtgggagagaacaccgtggcaggtgtgtgggaggctcccttgctttgggagagtgactggtgaggcaggaaattccctttgatgagggccagtcatggtgtctcactcttaggcccttctggtgagcttccttcacctggagatgcagggcagagaagtctgcttccttgctgcccaacctggcttatgcgtgcgcacaccggggatgaaagccctggctaactcggctggccctttctgccccttccaggcagtacgccccgaggtgctccgtctgctctgagcccatcatgcctgagcctggccgagatgagactgtgcgagtggtcgccctggacaagaacttccacatgaagtgttacaagtgtgaggactgcgggaagcccctgtcgattgaggcagatgacaatggctgcttccccctggacggtcacgtgctctgtcggaagtgccacactgctagagcccagacctgagtgaggacaggccctcttcagaccgcagtccatgccccattgtggaccacccacactgagaccacctgcccccacctcagttattgttttgatgtctagcccctcccatttccaacccctccctagcatcccaggtgccctgacccaggacccaacatggtctagggatgcaggatccccgccctggggtctggtcctcgcccatcctgcagggattgcccaccgtcttccagacaccccacctgaggggggcaccaggtttagtgctgctgctttcactgctgcacccgcgccctcggccggccccccgagcagcctttgtactctgcttgcggagggctgggagaccctccaggacattcccaccctcccccatgctgccaagttgtagctatagctacaaataaaaaaaaaccttgttttccag

SEQ ID NO: 403757 - DNA, 1316 bp, Homo sapiens
  misc_feature (281)..(281): n is a, c, g, or t
aaggctgtctggtctggaatttttgggatgtcctccccgcccggctggaggctgctccggaccgggacgcagagtctgcggacccggcgccgaggcggccacccgccggccccccgagcagcctttgtactctgcttgcggagggctgggagaccctccaggacattcccaccctcccccatgctgccaagttgtagctatagctacaaataaaaaaaaaccttgttttccagaaaaaaaaaaaaaaaaaaaaaaaaaaaaaaaaaaacacaaaaaaaaanaaaaaacaaaaaaaaaaaacaagagagggggcgcgccgccgcactgagataacattccgccgagagaacgccacccctgctcggccaccccgccgcagacattgattgatgacaaagagggcggcacccacacagcgagggcagccacattataattaacaccaggcgaggcgcccgacgctgtatctattacacaacactcgcagcgtcggtccggaagaggagagaaacagacatagcgctgcgctcacagctgagtgacctaacttatattgagcagacgaaaaccaaccacaatctatcttacgtgctgtgggtgcgagaacacaccttcgtcggtagcgagcacaccaaactcacccatacgagaaagtagatttatactcactgtccagcaggagggcgaaatataaactataacaattatcatagaacacgtctacaggtatcgctactcgcgatcgaacaaacactcaccacacccatccatacactaagatagatcagacccattgactccgcgccgacacaactcgacgataaacaactaagcccagagctgccatcatcaagtcagatgcgcgatatgaatcatgcttcatcaagacgagaacacaccaccacatctttatacacccacaccagcgagcgtcgtaccaatgataaaacaagacacacccacgcccgaccaccaagcgagcaagatggtgcaagaaacatatgcgaaactacagaaccagcatcacaaacgaaatcagaaatcagaacaatactccacagaagacagatcagaacaaggactgagcgtgattaagtcgagacacgacaaccatcacagtacaggctagagactacataacagtacacagatgataagaaggtgatcgatgacaagagcagaagatagacaaagactctcagattagacatacaaagtgagaaatagcaaaactaacggataacacgacaaatatccatctcatagctaacaaccaaccacactcaaaaaagaggatcatactaagacacgaacaa

SEQ ID NO: 403758 - DNA, 294 bp, Homo sapiens
cactgctggatgacatgaccaagaatgatcctttcaaagcccgggtaagggaccggagagtaggaaaagcagggctcagggccagagagactgggcatagaactaaggaggatggtgtcctcctgactgcatctctcttccctctcccaccccttgcaggtgtcatctggatatgtgcccccaccagtggccactccattcagttccaagtccagtaccaagcctgcagccgggggcacagcacccctgcctccttggaagtccccttccagctcccagcctctgccccaggtt

SEQ ID NO: 403759 - DNA, 491 bp, Homo sapiens
tgattaaacatcagtaactagagtcaacaatcactgtcctcccatgcctggcactctccactccccacccaactgcaatgtggccttgcttttcttatcagtaaaatgggagagctggatttgggggctggaagatatctcacagcttgaccatcctagtggaacggagggagaccagacagagagcagacgaccgacccaggcagcatccggctcagacacagacatatcttcatttcaagggacctattcttactcaaagaaaacccagagaagtcgattgctcagcctgagccggtcatccctaaatggagtcagcttttaggagaagaggaagagttcaggagacagcatcgctctttgtatcagtgtttgactagccaatcaagaaacgtttgctgaattcttcatgtcatacatgtctgtgagctctgcccttcgaggatgtctgttgtgaatgatgactcagtgattaccagcctttatcagaa

SEQ ID NO: 403760 - DNA, 369 bp, Homo sapiens
atgagacagagacactaatagttgtgattcctatgacataccgatacctgtgacctgccaactagaacactgccacctagtcataactacagcaaaagaataattgctatttgctccttttaattggcaatttatatgtagtaactgatttttttccataaactctaattttgatcaatcaaaatggtatattctattgccatagacaagtccacaagggcacaggcctccattcagtatactggccctttctgcaatagcatgcaaagatactagaaatgaagaatcccagaggtgaacacaggccacaccagcgtcggaaatgaagaagatggcagatgctgcgcagaccgcccgggaggaaagtat

SEQ ID NO: 403761 - DNA, 758 bp, Homo sapiens
agggcggggtgcggacccgcttccggttgggcggtgcttgcgcgcgtgagctgagccggtgggtgagcggcggccacggcatcctgtgctgtgggggctacgaggaaagatctaattatcatggacctgcgacagtttcttatgtgcctgtccctgtgcacagcctttgccttgagcaaacccacagaaaagaaggaccgtgtacatcatgagcctcagctcagtgacaaggttcacaatgatgctcagagttttgattatgaccatgatgccttcttgggtgctgaagaagcaaagacctttgatcagctgacaccagaagagagcaaggaaaggcttggaaagattgtaagtaaaatagatggcgacaaggacgggtttgtcactgtggatgagctcaaagactggattaaatttgcacaaaagcgctggatttacgaggatgtagagcgacagtggaaggggcatgacctcaatgaggacggcctcgtttcctgggaggagtataaaaatgccacctacggctacgttttagatgatccagatcctgatgatggatttaactataaacagatgatggttagagatgagcggaggtttaaaatggcagacaaggatggagacctcattgccaccaaggaggagttcacagctttcctgcaccctgaggagtatgactacatgaaagatatagtagtacaggaaaccattggaaggattttgttagaaaatccgaaggggttcattggccctaaaaa

SEQ ID NO: 403762 - DNA, 1526 bp, Homo sapiens
actcaaggttgagcctggatgttggagacttggtgctatagaccaaggaagctgccaagtatttcgctggttcctaatctcatgaacatcagaatcacctgaaaaacatttaaagctacgaatgtctgaattcagcttcagagactctaaatcaataggagaaacttaaagcttcctagatgattctaataaccagccatgtttgaagaccagaccaccaatgcgtacaagaagtaaaggatttggagtcaacatttaaaccttggttctttcacttttaattcttatgaacttgggcaaaaggattaaaattctactttggtatcttttgaaagaaaacagaaagtggacattttaactataagtttcttatcagcctacaatcagatgaaggaaactggtaaaaatttctcactgtaataattgaagagtctgatattccaccatacttattttatggatgaagtaatatttgggataatataaaagacttgcatagatatgtatatcaaattaatagtttaactcggatgtgagcttttaatttcttatttagttattaagcatactgcctcctgaattaactgcttttcattttcttcaagatctaattatcatggacctgcgacagtttcttatgtgcctgtccctgtgcacagcctttgccttgagcaaacccacagaaaagaaggaccgtgtacatcatgagcctcagctcagtgacaaggttcacaatgatgctcagagttttgattatgaccatgatgccttcttgggtgctgaagaagcaaagacctttgatcagctgacaccagaagagagcaaggaaaggcttggaaagattgtaagtaaaatagatggcgacaaggacgggtttgtcactgtggatgagctcaaagactggattaaatttgcacaaaagcgctggatttacgaggatgtagagcgacagtggaaggggcatgacctcaatgaggacggcctcgtttcctgggaggagtataaaaatgccacctacggctacgttttagatgatccagatcctgatgatggatttaactataaacagatgatggttagagatgagcggaggtttaaaatggcagacaaggatggagacctcattgccaccaaggaggagttcacagctttcctgcaccctgaggagtatgactacatgaaagatatagtagtacaggaaacactggaacgatctcggataaggaattgcggatggttgcattgatctagaagagtatgacggggactcgtaccagacatgaagggcactacgatgagcccgaacgggtaaagacacagcaagagagagggagtgacgagataagaaccgggagggcaaacgcaccgagacaacgacgcaggactcacccgcaccagacagggagggcaacacaggaccgggctgtgactcgaccaagaaagaggaagccaaggggagaggacaatgaataacgggcagcggcacaacagcgcgaaacaacacgcacgcacagaccccaccaaaa

SEQ ID NO: 403763 - DNA, 3433 bp, Homo sapiens
  misc_feature (3418)..(3418): n is a, c, g, or t
agggcggggtgcggacccgcttccggttgggcggtgcttgcgcgcgtgagctgagccggtgggtgagcggcggccacggcatcctgtgctgtgggggctacgaggaaagatctaattatcatggacctgcgacagtttcttatgtgcctgtccctgtgcacagcctttgccttgagcaaacccacagaaaagaaggaccgtgtacatcatgagcctcagctcagtgacaaggttcacaatgatgctcagagttttgattatgaccatgatgccttcttgggtgctgaagaagcaaagacctttgatcagctgacaccagaagagagcaaggaaaggcttggaaagattgtaagtaaaatagatggcgacaaggacgggtttgtcactgtggatgagctcaaagactggattaaatttgcacaaaagcgctggatttacgaggatgtagagcgacagtggaaggggcatgacctcaatgaggacggcctcgtttcctgggaggagtataaaaatgccacctacggctacgttttagatgatccagatcctgatgatggatttaactataaacagatgatggttagagatgagcggaggtttaaaatggcagacaaggatggagacctcattgccaccaaggaggagttcacagctttcctgcaccctgaggagtatgactacatgaaagatatagtagtacaggaaacaatggaagatatagataagaatgctgatggtttcattgatctagaagagtatattggtgacatgtacagccatgatgggaatactgatgagccagaatgggtaaagacagagcgagagcagtttgttgagtttcgggataagaaccgtgatgggaagatggacaaggaagagaccaaagactggatccttccctcagactatgatcatgcagaggcagaagccaggcacctggtctatgaatcagaccaaaacaaggatggcaagcttaccaaggaggagatcgttgacaagtatgacttatttgttggcagccaggccacagattttggggaggccttagtacggcatgatgagttctgagctacggaggaaccctcatttcctcaaaagtaatttatttttacagcttctggtttcacatgaaattgtttgcgctactgagactgttactacaaactttttaagacatgaaaaggcgtaatgaaaaccatcccgtccccattcctcctcctctctgagggactggagggaagccgtgcttctgaggaacaactctaattagtacacttgtgtttgtagatttacactttgtattatgtattaacatggcgtgtttatttttgtatttttctctggttgggagtatgatatgaaggatcaagatcctcaactcacacatgtagacaaacattagctctttactctttctcaaccccttttatgattttaataattctcacttaactaattttgtaagcctgagatcaataagaaatgttcaggagagaggaaagaaaaaaaatatatgctccacaatttatatttagagagagaacacttagtcttgcctgtcaaaaagtccaacatttcataggtagtaggggccacatattacattcagttgctataggtccagcaactgaacctgccattacctgggcaaggaaagatccctttgctctaggaaagcttggcccaaattgattttcttctttttccccctgtaggactgactgttggctaattttgtcaagcacagctgtggtgggaagagttagggccagtgtcttgaaaatcaatcaagtagtgaatgtgatctctttgcagagctatagatagaaacagctggaaaactaaaggaaaaatacaagtgttttcggggcatacattttttttctgggtgtgcatctgttgaaatgctcaagacttaattatttgccttttgaaatcactgtaaatgcccccatccggttcctcttcttcccaggtgtgccaaggaattaatcttggtttcactacaattaaaattcactcctttccaatcatgtcattgaaagtgcctttaacgaaagaaatggtcactgaatgggaattctcttaagaaaccctgagattaaaaaaagactatttggataacttataggaaagcctagaacctcccagtagagtggggatttttttcttcttccctttctcttttggacaatagttaaattagcagtattagttatgagtttggttgcagtgttcttatcttgtgggctgatttccaaaaaccacatgctgctgaatttaccagggatcctcatacctcacaatgcaaaccacttactaccaggcctttttctgtgtccactggagagcttgagctcacactcaaagatcagaggacctacagagagggctctttggtttgaggaccatggcttacctttcctgcctttgacccatcacaccccatttcctcctctttccctctccccgctgccaaaaaaaaaaaaaaggaaacgtttatcatgaatcaacagggtttcagtccttatcaaagagagatgtggaaagagctaaagaaaccaccctttgttcccaactccactttacccatattttatgcaacacaaacactgtccttttgggtccctttcttacagatggacctcttgagaagaattatcgtattccacgtttttagccctcaggttaccaagataaatatatgtatatataacctttattattgctatatctttgtggataatacattcaggtggtgctgggtgatttattataatctgaacctaggtatatcctttggtcttccacagtcatgttgaggtgggctccctggtatggtaaaaagccaggtataatgtaacttcaccccagcctttgtactaagctcttgatagtggatatactcttttaagtttagccccaatatagggtaatggaaatttcctgccctctgggttccccatttttactattaagaagaccagtgataatttaataatgccaccaactctggcttagttaagtgagagtgtgaactgtgtggcaagagagcctcacacctcactaggtgcagagagcccaggccttatgttaaaatcatgcacttgaaaagcaaaccttaatctgcaaagacagcagcaagcattatacggtcatcttgaatgatccctttgaaattttttttttgtttgtttgtttaaatcaagcctgaggctggtgaacagtagctacacacccatattgtgtgttctgtgaatgctagctctcttgaatttggatattggttattttttatagagtgtaaaccaagttttatattctgcaatgcgaacaggtacctatctgtttctaaataaaactgtttacattcaaaaaaaaacaacaaaaaaaaaaaaaaagggggggggaaaaaaanccccgggggggccaa

SEQ ID NO: 403764 - DNA, 4068 bp, Homo sapiens
agggcggggtgcggacccgcttccggttgggcggtgcttgcgcgcgtgagctgagccggtgggtgagcggcggccacggcatcctgtgctgtgggggctacgaggaaagatctaattatcatggacctgcgacagtttcttatgtgcctgtccctgtgcacagcctttgccttgagcaaacccacagaaaagaaggaccgtgtacatcatgagcctcagctcagtgacaaggttcacaatgatgctcagagttttgattatgaccatgatgccttcttgggtgctgaagaagcaaagacctttgatcagctgacaccagaagagagcaaggaaaggcttggaaagattgtaagtaaaatagatggcgacaaggacgggtttgtcactgtggatgagctcaaagactggattaaatttgcacaaaagcgctggatttacgaggatgtagagcgacagtggaaggggcatgacctcaatgaggacggcctcgtttcctgggaggagtataaaaatgccacctacggctacgttttagatgatccagatcctgatgatggatttaactataaacagatgatggttagagatgagcggaggtttaaaatggcagacaaggatggagacctcattgccaccaaggaggagttcacagctttcctgcaccctgaggagtatgactacatgaaagatatagtagtacaggaaacaatggaagatatagataagaatgctgatggtttcattgatctagaagagtatattggtgacatgtacagccatgatgggaatactgatgagccagaatgggtaaagacagagcgagagcagtttgttgagtttcgggataagaaccgtgatgggaagatggacaaggaagagaccaaagactggatccttccctcagactatgatcatgcagaggcagaagccaggcacctggtctatgaatcagaccaaaacaaggatggcaagcttaccaaggaggagatcgttgacaagtatgacttatttgttggcagccaggccacagattttggggaggccttagtacggcatgatgagttctgagctacggaggaaccctcatttcctcaaaagtaatttatttttacagcttctggtttcacatgaaattgtttgcgctactgagactgttactacaaactttttaagacatgaaaaggcgtaatgaaaaccatcccgtccccattcctcctcctctctgagggactggagggaagccgtgcttctgaggaacaactctaattagtacacttgtgtttgtagatttacactttgtattatgtattaacatggcgtgtttatttttgtatttttctctggttgggagtatgatatgaaggatcaagatcctcaactcacacatgtagacaaacattagctctttactctttctcaaccccttttatgattttaataattctcacttaactaattttgtaagcctgagatcaataagaaatgttcaggagagaggaaagaaaaaaaatatatgctccacaatttatatttagagagagaacacttagtcttgcctgtcaaaaagtccaacatttcataggtagtaggggccacatattacattcagttgctataggtccagcaactgaacctgccattacctgggcaaggaaagatccctttgctctaggaaagcttggcccaaattgattttcttctttttccccctgtaggactgactgttggctaattttgtcaagcacagctgtggtgggaagagttagggccagtgtcttgaaaatcaatcaagtagtgaatgtgatctctttgcagagctatagatagaaacagctggaaaactaaaggaaaaatacaagtgttttcggggcatacattttttttctgggtgtgcatctgttgaaatgctcaagacttaattatttgccttttgaaatcactgtaaatgcccccatccggttcctcttcttcccaggtgtgccaaggaattaatcttggtttcactacaattaaaattcactcctttccaatcatgtcattgaaagtgcctttaacgaaagaaatggtcactgaatgggaattctcttaagaaaccctgagattaaaaaaagactatttggataacttataggaaagcctagaacctcccagtagagtggggatttttttcttcttccctttctcttttggacaatagttaaattagcagtattagttatgagtttggttgcagtgttcttatcttgtgggctgatttccaaaaaccacatgctgctgaatttaccagggatcctcatacctcacaatgcaaaccacttactaccaggcctttttctgtgtccactggagagcttgagctcacactcaaagatcagaggacctacagagagggctctttggtttgaggaccatggcttacctttcctgcctttgacccatcacaccccatttcctcctctttccctctccccgctgccaaaaaaaaaaaaaaggaaacgtttatcatgaatcaacagggtttcagtccttatcaaagagagatgtggaaagagctaaagaaaccaccctttgttcccaactccactttacccatattttatgcaacacaaacactgtccttttgggtccctttcttacagatggacctcttgagaagaattatcgtattccacgtttttagccctcaggttaccaagataaatatatgtatatataacctttattattgctatatctttgtggataatacattcaggtggtgctgggtgatttattataatctgaacctaggtatatcctttggtcttccacagtcatgttgaggtgggctccctggtatggtaaaaagccaggtataatgtaacttcaccccagcctttgtactaagctcttgatagtggatatactcttttaagtttagccccaatatagggtaatggaaatttcctgccctctgggttccccatttttactattaagaagaccagtgataatttaataatgccaccaactctggcttagttaagtgagagtgtgaactgtgtggcaagagagcctcacacctcactaggtgcagagagcccaggccttatgttaaaatcatgcacttgaaaagcaaaccttaatctgcaaagacagcagcaagcattatacggtcatcttgaatgatccctttgaaattttttttttgtttgtttgtttaaatcaagcctgaggctggtgaacagtagctacacacccatattgtgtgttctgtgaatgctagctctcttgaatttggatattggttattttttatagagtgtaaaccaagttttatattctgcaatgcgaacaggtacctatctgtttctaaataaaactgtttacattcattatggggtatgtatgaccttcattttccaagaaatagaactctagcttagaattatggatgctctaaaatgtcagaatgggaactctcctcgaagttctcccaaactcagagacagcactgccttctcctaaatgattattcttttctccctgttttctggtattttctagcatccttctcaccacagccataacccttttttacttccattaggccgtataactggagagacctgctgctcgttatataattatctgataccaaacacaagcgattctgaatgtacacacacgtttatctatagagcataaggtaaaacaattttgtttaacattttggtattgtttacaaatgttattaaaacatgcaaattcattttgagaacctcgagagaattaaactattaactttagtaaacacacagtttaagacaaatataaaggtttagccaaatgcaacggggaggaagcacctggaataatttgtgcttgctcaggggcttgtggacatggctgttcctgccaaagctgtagcagttatccaaaagttctttcaaactcatatttggggccactgagtttttttttttttgttttttctttatgtctctcccatttctaaagtgttttcttaagtttgttctaattcagcatatatcatctcagaatggatccccagcaggaaaaaaaaaa

SEQ ID NO: 403765 - DNA, 3374 bp, Homo sapiens
agggcggggtgcggacccgcttccggttgggcggtgcttgcgcgcgtgagctgagccggtgggtgagcggcggccacggcatcctgtgctgtgggggctacgaggaaagatctaattatcatggacctgcgacagtttcttatgtgcctgtccctgtgcacagcctttgccttgagcaaacccacagaaaagaaggaccgtgtacatcatgagcctcagctcagtgacaaggttcacaatgatgctcagagttttgattatgaccatgatgccttcttgggtgctgaagaagcaaagacctttgatcagctgacaccagaagagagcaaggaaaggcttggaatgattgtagataaaatagacgcggataaagatgggtttgtgacggagggggagctgaaatcctggattaagcacgcccagaagaaatacatatatgacaatgttgaaaaccaatggcaggagtttgatatgaatcaagacggcttaatctcctgggatgagtacagaaacgtgacttatggcacttacctggatgatccagatcctgatgatggatttaactataaacagatgatggttagagatgagcggaggtttaaaatggcagacaaggatggagacctcattgccaccaaggaggagttcacagctttcctgcaccctgaggagtatgactacatgaaagatatagtagtacaggaaacaatggaagatatagataagaatgctgatggtttcattgatctagaagagtatattggtgacatgtacagccatgatgggaatactgatgagccagaatgggtaaagacagagcgagagcagtttgttgagtttcgggataagaaccgtgatgggaagatggacaaggaagagaccaaagactggatccttccctcagactatgatcatgcagaggcagaagccaggcacctggtctatgaatcagaccaaaacaaggatggcaagcttaccaaggaggagatcgttgacaagtatgacttatttgttggcagccaggccacagattttggggaggccttagtacggcatgatgagttctgagctacggaggaaccctcatttcctcaaaagtaatttatttttacagcttctggtttcacatgaaattgtttgcgctactgagactgttactacaaactttttaagacatgaaaaggcgtaatgaaaaccatcccgtccccattcctcctcctctctgagggactggagggaagccgtgcttctgaggaacaactctaattagtacacttgtgtttgtagatttacactttgtattatgtattaacatggcgtgtttatttttgtatttttctctggttgggagtatgatatgaaggatcaagatcctcaactcacacatgtagacaaacattagctctttactctttctcaaccccttttatgattttaataattctcacttaactaattttgtaagcctgagatcaataagaaatgttcaggagagaggaaagaaaaaaaatatatgctccacaatttatatttagagagagaacacttagtcttgcctgtcaaaaagtccaacatttcataggtagtaggggccacatattacattcagttgctataggtccagcaactgaacctgccattacctgggcaaggaaagatccctttgctctaggaaagcttggcccaaattgattttcttctttttccccctgtaggactgactgttggctaattttgtcaagcacagctgtggtgggaagagttagggccagtgtcttgaaaatcaatcaagtagtgaatgtgatctctttgcagagctatagatagaaacagctggaaaactaaaggaaaaatacaagtgttttcggggcatacattttttttctgggtgtgcatctgttgaaatgctcaagacttaattatttgccttttgaaatcactgtaaatgcccccatccggttcctcttcttcccaggtgtgccaaggaattaatcttggtttcactacaattaaaattcactcctttccaatcatgtcattgaaagtgcctttaacgaaagaaatggtcactgaatgggaattctcttaagaaaccctgagattaaaaaaagactatttggataacttataggaaagcctagaacctcccagtagagtggggatttttttcttcttccctttctcttttggacaatagttaaattagcagtattagttatgagtttggttgcagtgttcttatcttgtgggctgatttccaaaaaccacatgctgctgaatttaccagggatcctcatacctcacaatgcaaaccacttactaccaggcctttttctgtgtccactggagagcttgagctcacactcaaagatcagaggacctacagagagggctctttggtttgaggaccatggcttacctttcctgcctttgacccatcacaccccatttcctcctctttccctctccccgctgccaaaaaaaaaaaaaaggaaacgtttatcatgaatcaacagggtttcagtccttatcaaagagagatgtggaaagagctaaagaaaccaccctttgttcccaactccactttacccatattttatgcaacacaaacactgtccttttgggtccctttcttacagatggacctcttgagaagaattatcgtattccacgtttttagccctcaggttaccaagataaatatatgtatatataacctttattattgctatatctttgtggataatacattcaggtggtgctgggtgatttattataatctgaacctaggtatatcctttggtcttccacagtcatgttgaggtgggctccctggtatggtaaaaagccaggtataatgtaacttcaccccagcctttgtactaagctcttgatagtggatatactcttttaagtttagccccaatatagggtaatggaaatttcctgccctctgggttccccatttttactattaagaagaccagtgataatttaataatgccaccaactctggcttagttaagtgagagtgtgaactgtgtggcaagagagcctcacacctcactaggtgcagagagcccaggccttatgttaaaatcatgcacttgaaaagcaaaccttaatctgcaaagacagcagcaagcattatacggtcatcttgaatgatccctttgaaattttttttttgtttgtttgtttaaatcaagcctgaggctggtgaacagtagctacacacccatattgtgtgttctgtgaatgctagctctcttgaatttggatattggttattttttatagagtgtaaaccaagttttatattctgcaatgcgaacaggtacctatctgtttctaaataaaactgtttacattca

SEQ ID NO: 403766 - DNA, 3236 bp, Homo sapiens
agggcggggtgcggacccgcttccggttgggcggtgcttgcgcgcgtgagctgagccggtgggtgagcggcggccacggcatcctgtgctgtgggggctacgaggaaagatctaattatcatggacctgcgacagtttcttatgtgcctgtccctgtgcacagcctttgccttgagcaaacccacagaaaagaaggaccgtgtacatcatgagcctcagctcagtgacaaggttcacaatgatgctcagagttttgattatgaccatgatgccttcttgggtgctgaagaagcaaagacctttgatcagctgacaccagaagagagcaaggaaaggcttggaaagattgtaagtaaaatagatggcgacaaggacgggtttgtcactgtggatgagctcaaagactggattaaatttgcacaaaagcgctggatttacgaggatgtagagcgacagtggaaggggcatgacctcaatgaggacggcctcgtttcctgggaggagtataaaaatgccacctacggctacgttttagatgatccagatcctgatgatggatttaactataaacagatgatggttagagatgagcggaggtttaaaatggcagacaaggatggagacctcattgccaccaaggaggagttcacagctttcctgcaccctgaggagtatgactacatgaaagatatagtagtacaggaaacaatggaagatatagataagaatgctgatggtttcattgatctagaagagtatattggtgacatgtacagccatgatgggaatactgatgagccagaatgggtaaagacagagcgagagcagtttgttgagtttcgggataagaaccgtgatgggaagatggacaaggaagagaccaaagactggatccttccctcagactatgatcatgcagaggcagaagccaggcacctggtctatgaatcagaccaaaacaaggatggcaagcttaccaaggaggagatcgttgacaagtatgacttatttgttggcagccaggccacagattttggggaggccttagtacggcatgatgagttctgagctacggaggaaccctcatttcctcaaaagtaatttatttttacagcttctggtttcacatgaaattgtttgcgctactgagactgttactacaaactttttaagacatgaaaaggcgtaatgaaaaccatcccgtccccattcctcctcctctctgagggactggagggaagccgtgcttctgaggaacaactctaattagtacacttgtgtttgtagatttacactttgtattatgtattaacatggcgtgtttatttttgtatttttctctggttgggagtatgatatgaaggatcaagatcctcaactcacacatgtagacaaacattagctctttactctttctcaaccccttttatgattttaataattctcacttaactaattttgtaagcctgagatcaataagaaatgttcaggagagaggaaagaaaaaaaatatatgctccacaatttatatttagagagagaacacttagtcttgcctgtcaaaaagtccaacatttcataggtagtaggggccacatattacattcagttgctataggtccagcaactgaacctgccattacctgggcaaggaaagatccctttgctctaggaaagcttggcccaaattgattttcttctttttccccctgtaggactgactgttggctaattttgtcaagcacagctgtggtgggaagagttagggccagtgtcttgaaaatcaatcaagtagtgaatgtgatctctttgcagagctatagatagaaacagctggaaaactaaaggaaaaatacaagtgttttcggggcatacattttttttctgggtgtgcatctgttgaaatgctcaagacttaattatttgccttttgaaatcactgtaaatgcccccatccggttcctcttcttcccaggtgtgccaaggaattaatcttggtttcactacaattaaaattcactcctttccaatcatgtcattgaaagtgcctttaacgaaagaaatggtcactgaatgggaattctcttaagaaaccctgagattaaaaaaagactatttggataacttataggaaagcctagaacctcccagtagagtggggatttttttcttcttccctttctcttttggacaatagttaaattagcagtattagttatgagtttggttgcagtgttcttatcttgtgggctgatttccaaaaaccacatgctgctgaatttaccagggatcctcatacctcacaatgcaaaccacttactaccaggcctttttctgtgtccactggagagcttgagctcacactcaaagatcagaggacctacagagagggctctttggtttgaggaccatggcttacctttcctgcctttgacccatcacaccccatttcctcctctttccctctccccgctgccaaaaaaaaaaaaaaggaaacgtttatcatgaatcaacagggtttcagtccttatcaaagagagatgtggaaagagctaaagaaaccaccctttgttcccaactccactttacccatattttatgcaacacaaacactgtccttttgggtccctttcttacagatggacctcttgagaagaattatcgtattccacgtttttagccctcaggttaccaagataaatatatgtatatataacctttattattgctatatctttgtggataatacattcaggtggtgctgggtgatttattataatctgaacctaggtatatcctttggtcttccacagtcatgttgaggtgggctccctggtatggtaaaaagccaggtataatgtaacttcaccccagcctttgtactaagctcttgatagtggatatactcttttaagtttagccccaatatagggtaatggaaatttcctgccctctgggttccccatttttactattaagaagaccagtgataatttaataatgccaccaactctggcttagttaagtgagagtgtgaactgtgtggcaagagagcctcacacctcactaggtgcagagagcccaggcctttttctgtgtccactggagagcttgagctcacactcaaagatcagaggacctacagagagggctctttggtttgaggaccatggcttacctttcctgcctttgacccatcacaccccatttcctcctctttccctctccccgctgcc

SEQ ID NO: 403767 - DNA, 3870 bp, Homo sapiens
actcaaggttgagcctggatgttggagacttggtgctatagaccaaggaagctgccaagtatttcgctggttcctaatctcatgaacatcagaatcacctgaaaaacatttaaagctacgaatgtctgaattcagcttcagagactctaaatcaataggagaaacttaaagcttcctagatgattctaataaccagccatgtttgaagaccagaccaccaatgcgtacaagaagtaaaggatttggagtcaacatttaaaccttggttctttcacttttaattcttatgaacttgggcaaaaggattaaaattctactttggtatcttttgaaagaaaacagaaagtggacattttaactataagtttcttatcagcctacaatcagatgaaggaaactggtaaaaatttctcactgtaataattgaagagtctgatattccaccatacttattttatggatgaagtaatatttgggataatataaaagacttgcatagatatgtatatcaaattaatagtttaactcggatgtgagcttttaatttcttatttagttattaagcatactgcctcctgaattaactgcttttcattttcttcaagatctaattatcatggacctgcgacagtttcttatgtgcctgtccctgtgcacagcctttgccttgagcaaacccacagaaaagaaggaccgtgtacatcatgagcctcagctcagtgacaaggttcacaatgatgctcagagttttgattatgaccatgatgccttcttgggtgctgaagaagcaaagacctttgatcagctgacaccagaagagagcaaggaaaggcttggaaagattgtaagtaaaatagatggcgacaaggacgggtttgtcactgtggatgagctcaaagactggattaaatttgcacaaaagcgctggatttacgaggatgtagagcgacagtggaaggggcatgacctcaatgaggacggcctcgtttcctgggaggagtataaaaatgccacctacggctacgttttagatgatccagatcctgatgatggatttaactataaacagatgatggttagagatgagcggaggtttaaaatggcagacaaggatggagacctcattgccaccaaggaggagttcacagctttcctgcaccctgaggagtatgactacatgaaagatatagtagtacaggaaacaatggaagatatagataagaatgctgatggtttcattgatctagaagagtatattggtgacatgtacagccatgatgggaatactgatgagccagaatgggtaaagacagagcgagagcagtttgttgagtttcgggataagaaccgtgatgggaagatggacaaggaagagaccaaagactggatccttccctcagactatgatcatgcagaggcagaagccaggcacctggtctatgaatcagaccaaaacaaggatggcaagcttaccaaggaggagatcgttgacaagtatgacttatttgttggcagccaggccacagattttggggaggccttagtacggcatgatgagttctgagctacggaggaaccctcatttcctcaaaagtaatttatttttacagcttctggtttcacatgaaattgtttgcgctactgagactgttactacaaactttttaagacatgaaaaggcgtaatgaaaaccatcccgtccccattcctcctcctctctgagggactggagggaagccgtgcttctgaggaacaactctaattagtacacttgtgtttgtagatttacactttgtattatgtattaacatggcgtgtttatttttgtatttttctctggttgggagtatgatatgaaggatcaagatcctcaactcacacatgtagacaaacattagctctttactctttctcaaccccttttatgattttaataattctcacttaactaattttgtaagcctgagatcaataagaaatgttcaggagagaggaaagaaaaaaaatatatgctccacaatttatatttagagagagaacacttagtcttgcctgtcaaaaagtccaacatttcataggtagtaggggccacatattacattcagttgctataggtccagcaactgaacctgccattacctgggcaaggaaagatccctttgctctaggaaagcttggcccaaattgattttcttctttttccccctgtaggactgactgttggctaattttgtcaagcacagctgtggtgggaagagttagggccagtgtcttgaaaatcaatcaagtagtgaatgtgatctctttgcagagctatagatagaaacagctggaaaactaaaggaaaaatacaagtgttttcggggcatacattttttttctgggtgtgcatctgttgaaatgctcaagacttaattatttgccttttgaaatcactgtaaatgcccccatccggttcctcttcttcccaggtgtgccaaggaattaatcttggtttcactacaattaaaattcactcctttccaatcatgtcattgaaagtgcctttaacgaaagaaatggtcactgaatgggaattctcttaagaaaccctgagattaaaaaaagactatttggataacttataggaaagcctagaacctcccagtagagtggggatttttttcttcttccctttctcttttggacaatagttaaattagcagtattagttatgagtttggttgcagtgttcttatcttgtgggctgatttccaaaaaccacatgctgctgaatttaccagggatcctcatacctcacaatgcaaaccacttactaccaggcctttttctgtgtccactggagagcttgagctcacactcaaagatcagaggacctacagagagggctctttggtttgaggaccatggcttacctttcctgcctttgacccatcacaccccatttcctcctctttccctctccccgctgccaaaaaaaaaaaaaaggaaacgtttatcatgaatcaacagggtttcagtccttatcaaagagagatgtggaaagagctaaagaaaccaccctttgttcccaactccactttacccatattttatgcaacacaaacactgtccttttgggtccctttcttacagatggacctcttgagaagaattatcgtattccacgtttttagccctcaggttaccaagataaatatatgtatatataacctttattattgctatatctttgtggataatacattcaggtggtgctgggtgatttattataatctgaacctaggtatatcctttggtcttccacagtcatgttgaggtgggctccctggtatggtaaaaagccaggtataatgtaacttcaccccagcctttgtactaagctcttgatagtggatatactcttttaagtttagccccaatatagggtaatggaaatttcctgccctctgggttccccatttttactattaagaagaccagtgataatttaataatgccaccaactctggcttagttaagtgagagtgtgaactgtgtggcaagagagcctcacacctcactaggtgcagagagcccaggccttatgttaaaatcatgcacttgaaaagcaaaccttaatctgcaaagacagcagcaagcattatacggtcatcttgaatgatccctttgaaattttttttttgtttgtttgtttaaatcaagcctgaggctggtgaacagtagctacacacccatattgtgtgttctgtgaatgctagctctcttgaatttggatattggttattttttatagagtgtaaaccaagttttatattctgcaatgcgaacaggtacctatctgtttctaaataaaactgtttacattca

SEQ ID NO: 403768 - DNA, 4648 bp, Homo sapiens
ccttatgtctatgtagatagaagaggatatttaagagataactacttttttttctgagacgaagtcttgctctgtcacctgggctggagtgcagtggcgcgatctcaactcattgcaaccgccgcctcccaggttcaagagattctcctgcctcagcctcctgaatagctgagattacaggcatgcgccaccatgcccggctaatttttgtgtttttagtagagactgggtttcaccatgttggccaggctggtctcgaattcctcacctcccgccaggtgatctgcccgcctcggcctcccaaagtgctgagattataggcgtgagccaccgtaccaggccagagataacttcttactggtttacctttcctgttaacattttagagcaagattacacattctctgaaggaaaatgctagttacttacaggatttaagtaatagttgtatctaacacctgatctgtatcaaaatgagtctcttttcttagagtcactagtacttttcaattctgatcactttcctatgttgtattcatgaaatgaacacaagctggggaaagacattatttgctaccaagtgacaatcttttcaatcctgcaaataatagagcataggactataccaagatttctcttctgttggaagttttgacttcaacttcatattccaaactgggctgcttacttgggtgacattacataggatgactttgcccctatagttaagtgattgcacctttaaacagaagttttcatatcatggacatatttttaaatccataagatgacagatctggaagaaagacacttataaagcttcataaagccactgattctttagctttgtggttttgctttataatctacatactaaccctttcagcttattaacattcttataatcagatatacattcttaccacatcatttcctcagagttctctgttttcatgtaaaaatccaattcaacacagtatttaaaagctgctagccattttttagacaagcatcttcctgtctttttatctgttttttaaaaataatcttgccttgagatataaatgatcccagaacttttctgatatctttgtatttttatcaaaagtgttactttttctaaaatcagctaaatttttgaagtctgatgtaactattttgaatttttagaaaaccatgattatttaccaagaattggagtttctcttctgtaagcaataaagaaaaataaagttcagccacatcttcactagagaaaataaaaatgaaaacaaggaaaaacaaagttttacatgttgtttgatgcaaagagtggagaacttggataggaatggatattcactcctgaattctaaccataggctgaaatctacctccaaagagataggctgagtttgcttttggatccaagtgcaccagccatgactgtgttgaccttattcacgtggcttattacagaccagtaatggaccatttttttcagttgctggcctggcagttttgttttggagacaattttttatttctgtgcattagccctgggcacacacctggctaagtccagagttctgtgtctttttaaccttttgctggatttctctgcattttctacagaaaagattgtaagtaaaatagatggcgacaaggacgggtttgtcactgtggatgagctcaaagactggattaaatttgcacaaaagcgctggatttacgaggatgtagagcgacagtggaaggggcatgacctcaatgaggacggcctcgtttcctgggaggagtataaaaatgccacctacggctacgttttagatgatccagatcctgatgatggatttaactataaacagatgatggttagagatgagcggaggtttaaaatggcagacaaggatggagacctcattgccaccaaggaggagttcacagctttcctgcaccctgaggagtatgactacatgaaagatatagtagtacaggaaacaatggaagatatagataagaatgctgatggtttcattgatctagaagagtatattggtgacatgtacagccatgatgggaatactgatgagccagaatgggtaaagacagagcgagagcagtttgttgagtttcgggataagaaccgtgatgggaagatggacaaggaagagaccaaagactggatccttccctcagactatgatcatgcagaggcagaagccaggcacctggtctatgaatcagaccaaaacaaggatggcaagcttaccaaggaggagatcgttgacaagtatgacttatttgttggcagccaggccacagattttggggaggccttagtacggcatgatgagttctgagctacggaggaaccctcatttcctcaaaagtaatttatttttacagcttctggtttcacatgaaattgtttgcgctactgagactgttactacaaactttttaagacatgaaaaggcgtaatgaaaaccatcccgtccccattcctcctcctctctgagggactggagggaagccgtgcttctgaggaacaactctaattagtacacttgtgtttgtagatttacactttgtattatgtattaacatggcgtgtttatttttgtatttttctctggttgggagtatgatatgaaggatcaagatcctcaactcacacatgtagacaaacattagctctttactctttctcaaccccttttatgattttaataattctcacttaactaattttgtaagcctgagatcaataagaaatgttcaggagagaggaaagaaaaaaaatatatgctccacaatttatatttagagagagaacacttagtcttgcctgtcaaaaagtccaacatttcataggtagtaggggccacatattacattcagttgctataggtccagcaactgaacctgccattacctgggcaaggaaagatccctttgctctaggaaagcttggcccaaattgattttcttctttttccccctgtaggactgactgttggctaattttgtcaagcacagctgtggtgggaagagttagggccagtgtcttgaaaatcaatcaagtagtgaatgtgatctctttgcagagctatagatagaaacagctggaaaactaaaggaaaaatacaagtgttttcggggcatacattttttttctgggtgtgcatctgttgaaatgctcaagacttaattatttgccttttgaaatcactgtaaatgcccccatccggttcctcttcttcccaggtgtgccaaggaattaatcttggtttcactacaattaaaattcactcctttccaatcatgtcattgaaagtgcctttaacgaaagaaatggtcactgaatgggaattctcttaagaaaccctgagattaaaaaaagactatttggataacttataggaaagcctagaacctcccagtagagtggggatttttttcttcttccctttctcttttggacaatagttaaattagcagtattagttatgagtttggttgcagtgttcttatcttgtgggctgatttccaaaaaccacatgctgctgaatttaccagggatcctcatacctcacaatgcaaaccacttactaccaggcctttttctgtgtccactggagagcttgagctcacactcaaagatcagaggacctacagagagggctctttggtttgaggaccatggcttacctttcctgcctttgacccatcacaccccatttcctcctctttccctctccccgctgccaaaaaaaaaaaaaaggaaacgtttatcatgaatcaacagggtttcagtccttatcaaagagagatgtggaaagagctaaagaaaccaccctttgttcccaactccactttacccatattttatgcaacacaaacactgtccttttgggtccctttcttacagatggacctcttgagaagaattatcgtattccacgtttttagccctcaggttaccaagataaatatatgtatatataacctttattattgctatatctttgtggataatacattcaggtggtgctgggtgatttattataatctgaacctaggtatatcctttggtcttccacagtcatgttgaggtgggctccctggtatggtaaaaagccaggtataatgtaacttcaccccagcctttgtactaagctcttgatagtggatatactcttttaagtttagccccaatatagggtaatggaaatttcctgccctctgggttccccatttttactattaagaagaccagtgataatttaataatgccaccaactctggcttagttaagtgagagtgtgaactgtgtggcaagagagcctcacacctcactaggtgcagagagcccaggccttatgttaaaatcatgcacttgaaaagcaaaccttaatctgcaaagacagcagcaagcattatacggtcatcttgaatgatccctttgaaattttttttttgtttgtttgtttaaatcaagcctgaggctggtgaacagtagctacacacccatattgtgtgttctgtgaatgctagctctcttgaatttggatattggttattttttatagagtgtaaaccaagttttatattctgcaatgcgaacaggtacctatctgtttctaaataaaactgtttacattca

SEQ ID NO: 403769 - DNA, 3369 bp, Homo sapiens
gggtgcggtgaacggcggtgagagaatgtgatgccctcgtgggggcttcgatgaccagtatcctcaacttatcatagtacctgataacaggaatgaaatgttgcctgattccctgtgtcaccagaccgtgtacgacctgtgcaggccatatccgcacagtagagacagaaggactcgatgctatcagtacactagagtgcgtcgacgctgcagctcgagcaatggctatcactaagatggctcctattttgattatgaccatgatgccttcttgggtgctgaagaagcaaagacctttgatcagctgacaccagaagagagcaaggaaaggcttggaatgattgtagataaaatagacgcggataaagatgggtttgtgacggagggggagctgaaatcctggattaagcacgcccagaagaaatacatatatgacaatgttgaaaaccaatggcaggagtttgatatgaatcaagacggcttaatctcctgggatgagtacagaaacgtgacttatggcacttacctggatgatccagatcctgatgatggatttaactataaacagatgatggttagagatgagcggaggtttaaaatggcagacaaggatggagacctcattgccaccaaggaggagttcacagctttcctgcaccctgaggagtatgactacatgaaagatatagtagtacaggaaacaatggaagatatagataagaatgctgatggtttcattgatctagaagagtatattggtgacatgtacagccatgatgggaatactgatgagccagaatgggtaaagacagagcgagagcagtttgttgagtttcgggataagaaccgtgatgggaagatggacaaggaagagaccaaagactggatccttccctcagactatgatcatgcagaggcagaagccaggcacctggtctatgaatcagaccaaaacaaggatggcaagcttaccaaggaggagatcgttgacaagtatgacttatttgttggcagccaggccacagattttggggaggccttagtacggcatgatgagttctgagctacggaggaaccctcatttcctcaaaagtaatttatttttacagcttctggtttcacatgaaattgtttgcgctactgagactgttactacaaactttttaagacatgaaaaggcgtaatgaaaaccatcccgtccccattcctcctcctctctgagggactggagggaagccgtgcttctgaggaacaactctaattagtacacttgtgtttgtagatttacactttgtattatgtattaacatggcgtgtttatttttgtatttttctctggttgggagtatgatatgaaggatcaagatcctcaactcacacatgtagacaaacattagctctttactctttctcaaccccttttatgattttaataattctcacttaactaattttgtaagcctgagatcaataagaaatgttcaggagagaggaaagaaaaaaaatatatgctccacaatttatatttagagagagaacacttagtcttgcctgtcaaaaagtccaacatttcataggtagtaggggccacatattacattcagttgctataggtccagcaactgaacctgccattacctgggcaaggaaagatccctttgctctaggaaagcttggcccaaattgattttcttctttttccccctgtaggactgactgttggctaattttgtcaagcacagctgtggtgggaagagttagggccagtgtcttgaaaatcaatcaagtagtgaatgtgatctctttgcagagctatagatagaaacagctggaaaactaaaggaaaaatacaagtgttttcggggcatacattttttttctgggtgtgcatctgttgaaatgctcaagacttaattatttgccttttgaaatcactgtaaatgcccccatccggttcctcttcttcccaggtgtgccaaggaattaatcttggtttcactacaattaaaattcactcctttccaatcatgtcattgaaagtgcctttaacgaaagaaatggtcactgaatgggaattctcttaagaaaccctgagattaaaaaaagactatttggataacttataggaaagcctagaacctcccagtagagtggggatttttttcttcttccctttctcttttggacaatagttaaattagcagtattagttatgagtttggttgcagtgttcttatcttgtgggctgatttccaaaaaccacatgctgctgaatttaccagggatcctcatacctcacaatgcaaaccacttactaccaggcctttttctgtgtccactggagagcttgagctcacactcaaagatcagaggacctacagagagggctctttggtttgaggaccatggcttacctttcctgcctttgacccatcacaccccatttcctcctctttccctctccccgctgccaaaaaaaaaaaaaaggaaacgtttatcatgaatcaacagggtttcagtccttatcaaagagagatgtggaaagagctaaagaaaccaccctttgttcccaactccactttacccatattttatgcaacacaaacactgtccttttgggtccctttcttacagatggacctcttgagaagaattatcgtattccacgtttttagccctcaggttaccaagataaatatatgtatatataacctttattattgctatatctttgtggataatacattcaggtggtgctgggtgatttattataatctgaacctaggtatatcctttggtcttccacagtcatgttgaggtgggctccctggtatggtaaaaagccaggtataatgtaacttcaccccagcctttgtactaagctcttgatagtggatatactcttttaagtttagccccaatatagggtaatggaaatttcctgccctctgggttccccatttttactattaagaagaccagtgataatttaataatgccaccaactctggcttagttaagtgagagtgtgaactgtgtggcaagagagcctcacacctcactaggtgcagagagcccaggccttatgttaaaatcatgcacttgaaaagcaaaccttaatctgcaaagacagcagcaagcattatacggtcatcttgaatgatccctttgaaattttttttttgtttgtttgtttaaatcaagcctgaggctggtgaacagtagctacacacccatattgtgtgttctgtgaatgctagctctcttgaatttggatattggttattttttatagagtgtaaaccaagttttatattctgcaatgcgaacaggtacctatctgtttctaaataaaactgtttacattca

SEQ ID NO: 403770 - DNA, 1461 bp, Homo sapiens
  misc_feature (69)..(69): n is a, c, g, or t
cagtccttatcaaagagagatgtggaaagagctaaagaaaccaccctttgttcccaactccactttacncatattttaatcttggtttcactacaattaaaattcactcctttccaatcatgtcattgaaagtgcctttaacgaaagaaatggtcactgaatgggaattctcttaagaaaccctgagattaaaaaaagactatttggataacttataggaaagcctagaacctcccagtagagtggggatttttttcttcttccctttctcttttggacaatagttaaattagcagtattagttatgagtttggttgcagtgttcttatcttgtgggctgatttccaaaaaccacatgctgctgaatttaccagggatcctcatacctcacaatgcaaaccacttactaccaggcctttttctgtgtccactggagagcttgagctcacactcaaagatcagaggacctacagagagggctctttggtttgaggaccatggcttacctttcctgcctttgacccatcacaccccatttcctcctctttccctctccccgctgccaaaaaaaaaaaaaaggaaacgtttatcatgaatcaacagggtttcagtccttatcaaagagagatgtggaaagagctaaagaaaccaccctttgttcccaactccactttacccatattttatgcaacacaaacactgtccttttgggtccctttcttacagatggacctcttgagaagaattatcgtattccacgtttttagccctcaggttaccaagataaatatatgtatatataacctttattattgctatatctttgtggataatacattcaggtggtgctgggtgatttattataatctgaacctaggtatatcctttggtcttccacagtcatgttgaggtgggctccctggtatggtaaaaagccaggtataatgtaacttcaccccagcctttgtactaagctcttgatagtggatatactcttttaagtttagccccaatatagggtaatggaaatttcctgccctctgggttccccatttttactattaagaagaccagtgataatttaataatgccaccaactctggcttagttaagtgagagtgtgaactgtgtggcaagagagcctcacacctcactaggtgcagagagcccaggccttatgttaaaatcatgcacttgaaaagcaaaccttaatctgcaaagacagcagcaagcattatacggtcatcttgaatgatccctttgaaattttttttttgtttgtttgtttaaatcaagcctgaggctggtgaacagtagctacacacccatattgtgtgttctgtgaatgctagctctcttgaatttggatattggttattttttatagagtgtaaaccaagttttatattctgcaatgcgaacaggtacctatctgtttctaaataaaactgtttacattca

SEQ ID NO: 403771 - DNA, 2552 bp, Homo sapiens
  misc_feature (2031)..(2031): n is a, c, g, or t
  misc_feature (2039)..(2039): n is a, c, g, or t
  misc_feature (2042)..(2042): n is a, c, g, or t
agggcggggtgcggacccgcttccggttgggcggtgcttgcgcgcgtgagctgagccggtgggtgagcggcggccacggcatcctgtgctgtgggggctacgaggaaagatctaattatcatggacctgcgacagtttcttatgtgcctgtccctgtgcacagcctttgccttgagcaaacccacagaaaagaaggaccgtgtacatcatgagcctcagctcagtgacaaggttcacaatgatgctcagagttttgattatgaccatgatgccttcttgggtgctgaagaagcaaagacctttgatcagctgacaccagaagagagcaaggaaaggcttggaaagattgtaagtaaaatagatggcgacaaggacgggtttgtcactgtggatgagctcaaagactggattaaatttgcacaaaagcgctggatttacgaggatgtagagcgacagtggaaggggcatgacctcaatgaggacggcctcgtttcctgggaggagtataaaaatgccacctacggctacgttttagatgatccagatcctgatgatggatttaactataaacagatgatggttagagatgagcggaggtttaaaatggcagacaaggatggagacctcattgccaccaaggaggagttcacagctttcctgcaccctgaggagtatgactacatgaaagatatagtagtacaggaaacaatggaagatatagataagaatgctgatggtttcattgatctagaagagtatattggtgacatgtacagccatgatgggaatactgatgagccagaatgggtaaagacagagcgagagcagtttgttgagtttcgggataagaaccgtgatgggaagatggacaaggaagagaccaaagactggatccttccctcagactatgatcatgcagaggcagaagccaggcacctggtctatgaatcagaccaaaacaaggatggcaagcttaccaaggaggagatcgttgacaagtatgacttatttgttggcagccaggccacagattttggggaggccttagtacggcatgatgagttctgagctacggaggaaccctcatttcctcaaaagtaatttatttttacagcttctggtttcacatgaaattgtttgcgctactgagactgttactacaaactttttaagacatgaaaaggcgtaatgaaaaccatcccgtccccattcctcctcctctctgagggactggagggaagccgtgcttctgaggaacaactctaattagtacacttgtgtttgtagatttacactttgtattatgtattaacatggcgtgtttatttttgtatttttctctggttgggagtatgatatgaaggatcaagatcctcaactcacacatgtagacaaacattagctctttactctttctcaaccccttttatgattttaataattctcacttaactaattttgtaagcctgagatcaataagaaatgttcaggagagaggaaagaaaaaaaatatatgctccacaatttatatttagagagagaacacttagtcttgcctgtcaaaaagtccaacatttcataggtagtaggggccacatattacattcagttgctataggtccagcaactgaacctgccattacctgggcaaggaaagatccctttgctctaggaaagcttggcccaaattgattttcttctttttccccctgtaggactgactgttggctaattttgtcaagcacagctgtggtgggaagagttagggccagtgtcttgaaaatcaatcaagtagtgaatgtgatctctttgcagagctatagatagaaacagctggaaaactaaaggaaaaatacaagtgttttcggggcatacattttttttctgggtgtgcatctgttgaaatgctcaagacttaattatttgccttttgaaatcactgtaaatgcccccatccggttcctcttcttcccaggtgtgccaaggaattaatcttggtttcactacaattaaaattcactcctttccaanaaaaaaanaanaaaaaaaaaaaaaaaaaaaaaaaaaaaaaaaaaaaaagaaaaaaaaaaaacaacaaaaaaaaaaaaaaaaaaaggaaaacacaaacaaacacagcaaagataaacaaagaaaagatacacaaagcaagagaaaatacgaaagaagcaatacacagcaccatcacaacgacaaaaagggggggggccgcgacccagcacacgcggcaggagcgaggaaagcacagccccccggcagcacactagagagcaccagcgacagccagaaggtgcgaagtgacgacaaaaaagacggcgcgacggggggagcaaccacaacgaacagcggctggagggacacgacgatcgtagctcgtatgccgacggaggcaacacacatgctgggggggcagacactagccgagcacaccacagcacaaaacactcggtacgggaagaaacacccagaggcaaggtgcggagcgaagacgccacaggccggggaacgcgacgacgagcgagagaaaaaaaaag

SEQ ID NO: 403772 - DNA, 1663 bp, Homo sapiens
actcaaggttgagcctggatgttggagacttggtgctatagaccaaggaagctgccaagtatttcgctggttcctaatctcatgaacatcagaatcacctgaaaaacatttaaagctacgaatgtctgaattcagcttcagagactctaaatcaataggagaaacttaaagcttcctagatgattctaataaccagccatgtttgaagaccagaccaccaatgcgtacaagaagtaaaggatttggagtcaacatttaaaccttggttctttcacttttaattcttatgaacttgggcaaaaggattaaaattctactttggtatcttttgaaagaaaacagaaagtggacattttaactataagtttcttatcagcctacaatcagatgaaggaaactggtaaaaatttctcactgtaataattgaagagtctgatattccaccatacttattttatggatgaagtaatatttgggataatataaaagacttgcatagatatgtatatcaaattaatagtttaactcggatgtgagcttttaatttcttatttagttattaagcatactgcctcctgaattaactgcttttcattttcttcaagatctaattatcatggacctgcgacagtttcttatgtgcctgtccctgtgcacagcctttgccttgagcaaacccacagaaaagaaggaccgaccatggcttacctttcctgcctttgacccatcacaccccatttcctcctctttccctctccccgctgccaaaaaaaaaaaaaaggaaacgtttatcatgaatcaacagggtttcagtccttatcaaagagagatgtggaaagagctaaagaaaccaccctttgttcccaactccactttacccatattttatgcaacacaaacactgtccttttgggtccctttcttacagatggacctcttgagaagaattatcgtattccacgtttttagccctcaggttaccaagataaatatatgtatatataacctttattattgctatatctttgtggataatacattcaggtggtgctgggtgatttattataatctgaacctaggtatatcctttggtcttccacagtcatgttgaggtgggctccctggtatggtaaaaagccaggtataatgtaacttcaccccagcctttgtactaagctcttgatagtggatatactcttttaagtttagccccaatatagggtaatggaaatttcctgccctctgggttccccatttttactattaagaagaccagtgataatttaataatgccaccaactctggcttagttaagtgagagtgtgaactgtgtggcaagagagcctcacacctcactaggtgcagagagcccaggccttatgttaaaatcatgcacttgaaaagcaaaccttaatctgcaaagacagcagcaagcattatacggtcatcttgaatgatccctttgaaattttttttttgtttgtttgtttaaatcaagcctgaggctggtgaacagtagctacacacccatattgtgtgttctgtgaatgctagctctcttgaatttggatattggttattttttatagagtgtaaaccaagttttatattctgcaatgcgaacaggtacctatctgtttctaaataaaactgtttacattca

SEQ ID NO: 403773 - DNA, 1576 bp, Homo sapiens
agggcggggtgcggacccgcttccggttgggcggtgcttgcgcgcgtgagctgagccggtgggtgagcggcggccacggcatcctgtgctgtgggggctacgaggaaagatctaattatcatggacctgcgacagtttcttatgtgcctgtccctgtgcacagcctttgccttgagcaaacccacagaaaagaaggaccgtgtacatcatgagcctcagctcagtgacaaggttcacaatgatgctcagagttttgattatgaccatgatgccttcttgggtgctgaagaagcaaagacctttgatcagctgacaccagaagagagcaaggaaaggcttggaaagattgtaagtaaaatagatggcgacaaggacgggtttgtcactgtggatgagctcaaagactggattaaatttgcacaaaagcgctggatttacgaggatgtagagcgacagtggaaggggcatgacctcaatgaggacggcctcgtttcctgggaggagtataaaaatgccacctacggctacgttttagatgatccagatcctgatgatggatttaactataaacagatgatggttagagatgagcggaggtttaaaatggcagacaaggatggagacctcattgccaccaaggaggagttcacagctttcctgcaccctgaggagtatgactacatgaaagatatagtagtacaggaaacaatggaagatatagataagaatgctgatggtttcattgatctagaagagtatattggtgacatgtacagccatgatgggaatactgatgagccagaatgggtaaagacagagcgagagcagtttgttgagtttcgggataagaaccgtgatgggaagatggacaaggaagagaccaaagactggatccttccctcagactatgatcatgcagaggcagaagccaggcacctggtctatgaatcagaccaaaacaaggatggcaagcttaccaaggaggagatcgttgacaagtatgacttatttgttggcagccaggccacagattttggggaggccttagtacggcatgatgagttctgagctacggaggaaccctcatttcctcaaaagccgtataactggagagacctgctgctcgttatataattatctgataccaaacacaagcgattctgaatgtacacacacgtttatctatagagcataaggtaaaacaattttgtttaacattttggtattgtttacaaatgttattaaaacatgcaaattcattttgagaacctcgagagaattaaactattaactttagtaaacacacagtttaagacaaatataaaggtttagccaaatgcaacggggaggaagcacctggaataatttgtgcttgctcaggggcttgtggacatggctgttcctgccaaagctgtagcagttatccaaaagttctttcaaactcatatttggggccactgagtttttttttttttgttttttctttatgtctctcccatttctaaagtgttttcttaagtttgttctaattcagcatatatcatctcagaatggatccccagcaggaaaaaaaaaa

SEQ ID NO: 403774 - DNA, 3015 bp, Homo sapiens
  misc_feature (2102)..(2102): n is a, c, g, or t
agggcggggtgcggacccgcttccggttgggcggtgcttgcgcgcgtgagctgagccggtgggtgagcggcggccacggcatcctgtgctgtgggggctacgaggaaagatctaattatcatggacctgcgacagtttcttatgtgcctgtccctgtgcacagcctttgccttgagcaaacccacagaaaagaaggaccgtgtacatcatgagcctcagctcagtgacaaggttcacaatgatgctcagagttttgattatgaccatgatgccttcttgggtgctgaagaagcaaagacctttgatcagctgacaccagaagagagcaaggaaaggcttggaatgattgtagataaaatagacgcggataaagatgggtttgtgacggagggggagctgaaatcctggattaagcacgcccagaagaaatacatatatgacaatgttgaaaaccaatggcaggagtttgatatgaatcaagacggcttaatctcctgggatgagtacagaaacgtgacttatggcacttacctgggtaaggggcaagatgtcagcctggcagggaccgtggtcttgagtcaaagaaacaaatgggtcacacagtaaaggaaaggaagcttatcttaaatagttcaattcagtgctaagctgattccctttattaattttaaatttgtatattatgtatttttaaatttgtttaatttttgttttctgaagtctggaagtctggtatcttctacatttttagcattttacatatattttaccattttttctttatgtcatccctcatagagacaatttttggagtagatttcatttaaaagaatacattgggctgggtgccgatagctcacgcctataagcactttgggatgctgaggcaggaggattgcctgggcccaggagtttgagaccaatctgggcaacatagggacaccctgtctctaccaaaaaaaaaaaaaaaaatttaaattagccaagcatggtggcacacacctgtcctagatactcaggaggctaaggtgggaggatcacttaagcccaggaggttgaggcagctgcgagccatgattgcactgctgcacaccagccttggggacagagcgagctctgtccaaaaaaaaaaaaaaaaaaaaaagaggctatgaggctacatacttccaacagtgcaaagcaaggggctttgagatgtttcttgacatggtcccagtaaagtgttggacctaaaattcaaaccaaattagatttctttataactggtgagaagtcttaataaaatagttttccttaataaaatttaactatttcagtatgtctgcttactgaagtttggaaatgaaaatttcccatttgttttctctggcacatgagtttatcagcctgctttgcaagtgctttaaggcaaataaatgttaatttgattgctttttgttgatttgatagcttgtatgcttgggccacctgttagtaattttcttttacttgtaacacttgcctgctgctgaatactaggcagtgagtcttattgagttgatgatccagggtgtttttatttgtgaaattcctctgttgtacatggttacagtttaagacaagaattgtattaatataaatgaatataaatggtactttctccattttaatcctggaaattaggcaaccttctgggttaaagcaagcgttctccgccactgactaacagtgagtgtataatggatctgtttccccacagatagccagctgtctgcattaattacaggactgcatgcatttctggtgaagagacttttatttctgtgtcaggcttgttctcattcctaagactaaagtggcactctctctcaatgcttgacacttagccaagaaccaaacatatccttcacccaattaagaacacatgtattaaacagtcagcacagatggagaggcatcctgcttcttgctctggctgagacccaacaccttcctgatttatttggaattaatgataaatacaaagcaaagagtaggctattggtgatctaaacaaaatggtgtgtaaataaatctcagctccgacctaggcactcacttgctgcccagaatgattcttcggngctgtgtatgattatgtgcataaaaatctgttgagagctctgttgcctcacaaggcagatgattcaacgtaatgggtatttctgctgcctgagactgcataagctgaagcactggctgggaagcaatgtctttataaggcatctttccccagaggcatgagggtggacagcactgagggggtcatgagtcggcttagagaagtgaggagtttttgttactgtgtgttcttgattcaatttggagttcaggtataaatcatcatagctcttagttaaaatctgtctcaatgaatccgctatccatgagagaaaggttaacactgtctctgccacaaggaaaatatgaaatactgagatctaccctgcctatagcaaaactagatcaagagcctacctaaagctgtatacaggccagctagggccaaaactggtgcttaggataaatacagcattccaagcagagctataggaaaataggttttgtcattaaaaataaagttttggacaggcacagtggcttatgcctataatcctagcattttgggaggccgaggcagaaaggttgcttgagtccgggaattcgcgaccagccagggcaacaaagccagaccccgtctttacaaaaaaaatattaaaaattagccaggagtggtaatacttgtcagtagtcctagctacttgggaggccgaagcaggaggattgcttgagccccagagtccaagactgcattgagctatgattgcattgcactccagcctgggccacacagaacaaggacctgactataaattaaaaaaaaaaaaaattgtatcttcctgtttccctccttggggtaaaaggtaaaaatggtgactggactcaaatagcctaatagcaacatgcacatatatatatcagaatggcctcgtgccg

SEQ ID NO: 403775 - DNA, 392 bp, Homo sapiens
tagggggaatgagggctgagtagttcacacttaatttagtagaaatgagaatcttaacttctgattaaccccaattcttctataacagtgtttctgaatttttaatgggaaatatgttcttcttcaattcattgctatctctactttcaggatggcaagcttaccaaggaggagatcgttgacaagtatgacttatttgttggcagccaggccacagattttggggaggccttagtacggcatgatgagttctgagctacggaggaaccctcatttcctcaaaagtaatttatttttacagcttctggtttcacatgaaattgtttgcgctactgagactgttactacaaactttttaagacatgaaaaggcgtaatgaaaaccatcccgtc

SEQ ID NO: 403776 - DNA, 780 bp, Homo sapiens
  misc_feature (729)..(729): n is a, c, g, or t
  misc_feature (760)..(760): n is a, c, g, or t
agggcggggtgcggacccgcttccggttgggcggtgcttgcgcgcgtgagctgagccggtgggtgagcggcggccacggcatcctgtgctgtgggggctacgaggaaagatctaattatcatggacctgcgacagtttcttatgtgcctgtccctgtgcacagcctttgccttgagcaaacccacagaaaagaaggaccgtgtacatcatgagcctcagctcagtgacaaggttcacaatgatgctcagagttttgattatgaccatgatgccttcttgggtgctgaagaagcaaagacctttgatcagctgacaccagaagagagcaaggaaaggcttggaaagattgtaagtaaaatagatggcgacaaggacgggtttgtcactgtggatgagctcaaagactggattaaatttgcacaaaagcgctggatttacgaggatgtagagcgacagtggaaggggcatgacctcaatgaggacggcctcgtttcctgggaggagtataaaaatgccacctacggctacgttttagatgatccagatcctgatgatggatttaactataaacagatgatggttagagatgagcggaggtttaaaatggcagacaaggatggagacctcattgccaccaaggaggagttcacagctttcctgcaccctgaggagtatgactacatgaaagatatagtagtacagggaaacaatgggaagatatagataaanaaatgctgatggttttcatttggattcttanaaagaattatttttgggttg

SEQ ID NO: 403777 - DNA, 3374 bp, Homo sapiens
agggcggggtgcggacccgcttccggttgggcggtgcttgcgcgcgtgagctgagccggtgggtgagcggcggccacggcatcctgtgctgtgggggctacgaggaaagatctaattatcatggacctgcgacagtttcttatgtgcctgtccctgtgcacagcctttgccttgagcaaacccacagaaaagaaggaccgtgtacatcatgagcctcagctcagtgacaaggttcacaatgatgctcagagttttgattatgaccatgatgccttcttgggtgctgaagaagcaaagacctttgatcagctgacaccagaagagagcaaggaaaggcttggaaagattgtaagtaaaatagatggcgacaaggacgggtttgtcactgtggatgagctcaaagactggattaaatttgcacaaaagcgctggatttacgaggatgtagagcgacagtggaaggggcatgacctcaatgaggacggcctcgtttcctgggaggagtataaaaatgccacctacggctacgttttagatgatccagatcctgatgatggatttaactataaacagatgatggttagagatgagcggaggtttaaaatggcagacaaggatggagacctcattgccaccaaggaggagttcacagctttcctgcaccctgaggagtatgactacatgaaagatatagtagtacaggaaacaatggaagatatagataagaatgctgatggtttcattgatctagaagagtatattggtgacatgtacagccatgatgggaatactgatgagccagaatgggtaaagacagagcgagagcagtttgttgagtttcgggataagaaccgtgatgggaagatggacaaggaagagaccaaagactggatccttccctcagactatgatcatgcagaggcagaagccaggcacctggtctatgaatcagaccaaaacaaggatggcaagcttaccaaggaggagatcgttgacaagtatgacttatttgttggcagccaggccacagattttggggaggccttagtacggcatgatgagttctgagctacggaggaaccctcatttcctcaaaagtaatttatttttacagcttctggtttcacatgaaattgtttgcgctactgagactgttactacaaactttttaagacatgaaaaggcgtaatgaaaaccatcccgtccccattcctcctcctctctgagggactggagggaagccgtgcttctgaggaacaactctaattagtacacttgtgtttgtagatttacactttgtattatgtattaacatggcgtgtttatttttgtatttttctctggttgggagtatgatatgaaggatcaagatcctcaactcacacatgtagacaaacattagctctttactctttctcaaccccttttatgattttaataattctcacttaactaattttgtaagcctgagatcaataagaaatgttcaggagagaggaaagaaaaaaaatatatgctccacaatttatatttagagagagaacacttagtcttgcctgtcaaaaagtccaacatttcataggtagtaggggccacatattacattcagttgctataggtccagcaactgaacctgccattacctgggcaaggaaagatccctttgctctaggaaagcttggcccaaattgattttcttctttttccccctgtaggactgactgttggctaattttgtcaagcacagctgtggtgggaagagttagggccagtgtcttgaaaatcaatcaagtagtgaatgtgatctctttgcagagctatagatagaaacagctggaaaactaaaggaaaaatacaagtgttttcggggcatacattttttttctgggtgtgcatctgttgaaatgctcaagacttaattatttgccttttgaaatcactgtaaatgcccccatccggttcctcttcttcccaggtgtgccaaggaattaatcttggtttcactacaattaaaattcactcctttccaatcatgtcattgaaagtgcctttaacgaaagaaatggtcactgaatgggaattctcttaagaaaccctgagattaaaaaaagactatttggataacttataggaaagcctagaacctcccagtagagtggggatttttttcttcttccctttctcttttggacaatagttaaattagcagtattagttatgagtttggttgcagtgttcttatcttgtgggctgatttccaaaaaccacatgctgctgaatttaccagggatcctcatacctcacaatgcaaaccacttactaccaggcctttttctgtgtccactggagagcttgagctcacactcaaagatcagaggacctacagagagggctctttggtttgaggaccatggcttacctttcctgcctttgacccatcacaccccatttcctcctctttccctctccccgctgccaaaaaaaaaaaaaaggaaacgtttatcatgaatcaacagggtttcagtccttatcaaagagagatgtggaaagagctaaagaaaccaccctttgttcccaactccactttacccatattttatgcaacacaaacactgtccttttgggtccctttcttacagatggacctcttgagaagaattatcgtattccacgtttttagccctcaggttaccaagataaatatatgtatatataacctttattattgctatatctttgtggataatacattcaggtggtgctgggtgatttattataatctgaacctaggtatatcctttggtcttccacagtcatgttgaggtgggctccctggtatggtaaaaagccaggtataatgtaacttcaccccagcctttgtactaagctcttgatagtggatatactcttttaagtttagccccaatatagggtaatggaaatttcctgccctctgggttccccatttttactattaagaagaccagtgataatttaataatgccaccaactctggcttagttaagtgagagtgtgaactgtgtggcaagagagcctcacacctcactaggtgcagagagcccaggccttatgttaaaatcatgcacttgaaaagcaaaccttaatctgcaaagacagcagcaagcattatacggtcatcttgaatgatccctttgaaattttttttttgtttgtttgtttaaatcaagcctgaggctggtgaacagtagctacacacccatattgtgtgttctgtgaatgctagctctcttgaatttggatattggttattttttatagagtgtaaaccaagttttatattctgcaatgcgaacaggtacctatctgtttctaaataaaactgtttacattca

SEQ ID NO: 403778 - DNA, 3373 bp, Homo sapiens
  misc_feature (3188)..(3188): n is a, c, g, or t
  misc_feature (3192)..(3192): n is a, c, g, or t
  misc_feature (3201)..(3201): n is a, c, g, or t
  misc_feature (3203)..(3204): n is a, c, g, or t
  misc_feature (3212)..(3212): n is a, c, g, or t
  misc_feature (3218)..(3218): n is a, c, g, or t
  misc_feature (3223)..(3223): n is a, c, g, or t
  misc_feature (3234)..(3234): n is a, c, g, or t
  misc_feature (3240)..(3240): n is a, c, g, or t
  misc_feature (3242)..(3242): n is a, c, g, or t
  misc_feature (3244)..(3245): n is a, c, g, or t
  misc_feature (3249)..(3249): n is a, c, g, or t
  misc_feature (3254)..(3254): n is a, c, g, or t
  misc_feature (3256)..(3256): n is a, c, g, or t
  misc_feature (3271)..(3271): n is a, c, g, or t
  misc_feature (3273)..(3273): n is a, c, g, or t
agggcggggtgcggacccgcttccggttgggcggtgcttgcgcgcgtgagctgagccggtgggtgagcggcggccacggcatcctgtgctgtgggggctacgaggaaagatctaattatcatggacctgcgacagtttcttatgtgcctgtccctgtgcacagcctttgccttgagcaaacccacagaaaagaaggaccgtgtacatcatgagcctcagctcagtgacaaggttcacaatgatgctcagagttttgattatgaccatgatgccttcttgggtgctgaagaagcaaagacctttgatcagctgacaccagaagagagcaaggaaaggcttggaaagattgtaagtaaaatagatggcgacaaggacgggtttgtcactgtggatgagctcaaagactggattaaatttgcacaaaagcgctggatttacgaggatgtagagcgacagtggaaggggcatgacctcaatgaggacggcctcgtttcctgggaggagtataaaaatgccacctacggctacgttttagatgatccagatcctgatgatggatttaactataaacagatgatggttagagatgagcggaggtttaaaatggcagacaaggatggagacctcattgccaccaaggaggagttcacagctttcctgcaccctgaggagtatgactacatgaaagatatagtagtacaggaaacaatggaagatatagataagaatgctgatggtttcattgatctagaagagtatattggtgacatgtacagccatgatgggaatactgatgagccagaatgggtaaagacagagcgagagcagtttgttgagtttcgggataagaaccgtgatgggaagatggacaaggaagagaccaaagactggatccttccctcagactatgatcatgcagaggcagaagccaggcacctggtctatgaatcagaccaaaacaaggatggcaagcttaccaaggaggagatcgttgacaagtatgacttatttgttggcagccaggccacagattttggggaggccttagtacggcatgatgagttctgagctacggaggaaccctcatttcctcaaaagtaatttatttttacagcttctggtttcacatgaaattgtttgcgctactgagactgttactacaaactttttaagacatgaaaaggcgtaatgaaaaccatcccgtccccattcctcctcctctctgagggactggagggaagccgtgcttctgaggaacaactctaattagtacacttgtgtttgtagatttacactttgtattatgtattaacatggcgtgtttatttttgtatttttctctggttgggagtatgatatgaaggatcaagatcctcaactcacacatgtagacaaacattagctctttactctttctcaaccccttttatgattttaataattctcacttaactaattttgtaagcctgagatcaataagaaatgttcaggagagaggaaagaaaaaaaatatatgctccacaatttatatttagagagagaacacttagtcttgcctgtcaaaaagtccaacatttcataggtagtaggggccacatattacattcagttgctataggtccagcaactgaacctgccattacctgggcaaggaaagatccctttgctctaggaaagcttggcccaaattgattttcttctttttccccctgtaggactgactgttggctaattttgtcaagcacagctgtggtgggaagagttagggccagtgtcttgaaaatcaatcaagtagtgaatgtgatctctttgcagagctatagatagaaacagctggaaaactaaaggaaaaatacaagtgttttcggggcatacattttttttctgggtgtgcatctgttgaaatgctcaagacttaattatttgccttttgaaatcactgtaaatgcccccatccggttcctcttcttcccaggtgtgccaaggaattaatcttggtttcactacaattaaaattcactcctttccaatcatgtcattgaaagtgcctttaacgaaagaaatggtcactgaatgggaattctcttaagaaaccctgagattaaaaaaagactatttggataacttataggaaagcctagaacctcccagtagagtggggatttttttcttcttccctttctcttttggacaatagttaaattagcagtattagttatgagtttggttgcagtgttcttatcttgtgggctgatttccaaaaaccacatgctgctgaatttaccagggatcctcatacctcacaatgcaaaccacttactaccaggcctttttctgtgtccactggagagcttgagctcacactcaaagatcagaggacctacagagagggctctttggtttgaggaccatggcttacctttcctgcctttgacccatcacaccccatttcctcctctttccctctccccgctgccaaaaaaaaaaaaaaggaaacgtttatcatgaatcaacagggtttcagtccttatcaaagagagatgtggaaagagctaaagaaaccaccctttgttcccaactccactttacccatattttatgcaacacaaacactgtccttttgggtccctttcttacagatggacctcttgagaagaattatcgtattccacgtttttagccctcaggttaccaagataaatatatgtatatataacctttattattgctatatctttgtggataatacattcaggtggtgctgggtgatttattataatctgaacctaggtatatcctttggtcttccacagtcatgttgaggtgggctccctggtatggtaaaaagccaggtataatgtaacttcaccccagcctttgtactaagctcttgatagtggatatactcttttaagtttagccccaatatagggtaatggaaatttcctgccctctgggttccccatttttactattaagaagaccagtgataatttaataatgccaccaactctggcttagttaagtgagagtgtgaactgtgtggcaagagagcctcacacctcactaggtgcagagagcccaggccttatgttaaaatcatgcacttgaaaagcaaaccttaatctgcaaagacagcagcaagcattatacggtcatcttgaatgatccctttgaaattttttcgngggngtaaatcancnngaggtggngacagngtacnccctttgtggntgggangnannctgnatggnangggtttaagggaccntntttctggcggaacgcctctggctatacgtcttcaaaaaaaaaagggggggcaataaaaagggggaaaaaaattaagagtaaacgcgggacgatgtacaaa

SEQ ID NO: 403779 - DNA, 3180 bp, Homo sapiens
agggcggggtgcggacccgcttccggttgggcggtgcttgcgcgcgtgagctgagccggtgggtgagcggcggccacggcatcctgtgctgtgggggctacgaggaaagatctaattatcatggacctgcgacagtttcttatgtgcctgtccctgtgcacagcctttgccttgagcaaacccacagaaaagaaggaccgtgtacatcatgagcctcagctcagtgacaaggttcacaatgatgctcagagttttgattatgaccatgatgccttcttgggtgctgaagaagcaaagacctttgatcagctgacaccagaagagagcaaggaaaggcttggaaagattgtaagtaaaatagatggcgacaaggacgggtttgtcactgtggatgagctcaaagactggattaaatttgcacaaaagcgctggatttacgaggatgtagagcgacagtggaaggggcatgacctcaatgaggacggcctcgtttcctgggaggagtataaaaatgccacctacggctacgttttagatgatccagatcctgatgatggatttaactataaacagatgatggttagagatgagcggaggtttaaaatggcagacaaggatggagacctcattgccaccaaggaggagttcacagctttcctgcaccctgaggagtatgactacatgaaagatatagtagtacaggaaacaatggaagatatagataagaatgctgatggtttcattgatctagaagagtatattggtgacatgtacagccatgatgggaatactgatgagccagaatgggtaaagacagagcgagagcagtttgttgagtttcgggataagaaccgtgatgggaagatggacaaggaagagaccaaagactggatccttccctcagactatgatcatgcagaggcagaagccaggcacctggtctatgaatcagaccaaaacaaggatggcaagcttaccaaggaggagatcgttgacaagtatgacttatttgttggcagccaggccacagattttggggaggccttagtacggcatgatgagttctgagctacggaggaaccctcatttcctcaaaagtaatttatttttacagcttctggtttcacatgaaattgtttgcgctactgagactgttactacaaactttttaagacatgaaaaggcgtaatgaaaaccatcccgtccccattcctcctcctctctgagggactggagggaagccgtgcttctgaggaacaactctaattagtacacttgtgtttgtagatttacactttgtattatgtattaacatggcgtgtttatttttgtatttttctctggttgggagtatgatatgaaggatcaagatcctcaactcacacatgtagacaaacattagctctttactctttctcaaccccttttatgattttaataattctcacttaactaattttgtaagcctgagatcaataagaaatgttcaggagagaggaaagaaaaaaaatatatgctccacaatttatatttagagagagaacacttagtcttgcctgtcaaaaagtccaacatttcataggtagtaggggccacatattacattcagttgctataggtccagcaactgaacctgccattacctgggcaaggaaagatccctttgctctaggaaagcttggcccaaattgattttcttctttttccccctgtaggactgactgttggctaattttgtcaagcacagctgtggtgggaagagttagggccagtgtcttgaaaatcaatcaagtagtgaatgtgatctctttgcagagctatagatagaaacagctggaaaactaaaggaaaaatacaagtgttttcggggcatacattttttttctgggtgtgcatctgttgaaatgctcaagacttaattatttgccttttgaaatcactgtaaatgcccccatccggttcctcttcttcccaggtgtgccaaggaattaatcttggtttcactacaattaaaattcactcctttccaatcatgtcattgaaagtgcctttaacgaaagaaatggtcactgaatgggaattctcttaagaaaccctgagattaaaaaaagactatttggataacttataggaaagcctagaacctcccagtagagtggggatttttttcttcttccctttctcttttggacaatagttaaattagcagtattagttatgagtttggttgcagtgttcttatcttgtgggctgatttccaaaaaccacatgctgctgaatttaccagggatcctcatacctcacaatgcaaaccacttactaccaggcctttttctgtgtccactggagagcttgagctcacactcaaagatcagaggacctacagagagggctctttggtttgaggaccatggcttacctttcctgcctttgacccatcacaccccatttcctcctctttccctctccccgctgccaaaaaaaaaaaaaaggaaacgtttatcatgaatcaacagggtttcagtccttatcaaagagagatgtggaaagagctaaagaaaccaccctttgttcccaactccactttacccatattttatgcaacacaaacactgtccttttgggtccctttcttacagatggacctcttgagaagaattatcgtattccacgtttttagccctcaggttaccaagataaatatatgtatatataacctttattattgctatatctttgtggataatacattcaggtggtgctgggtgatttattataatctgaacctaggtatatcctttggtcttccacagtcatgttgaggtgggctccctggtatggtaaaaagccaggtataatgtaacttcaccccagcctttgtactaagctcttgatagtggatatactcttttaagtttagccccaatatagggtaatggaaatttcctgccctctgggttccccatttttactattaagaagaccagtgataatttaataatgccaccaactctggcttagttaagtgagagtgtgaactgtgtggcaagagagcttgagctcacactcaaagatcagaggacctacagagagggctctttggtttgaggaccatggcttacctttcctgcctttgacccatcacaccccatttcctcctctttccctctccccgctgcc

SEQ ID NO: 403780 - DNA, 3320 bp, Homo sapiens
agggcggggtgcggacccgcttccggttgggcggtgcttgcgcgcgtgagctgagccggtgggtgagcggcggccacggcatcctgtgctgtgggggctacgaggaaagatctaattatcatggacctgcgacagtttcttatgtgcctgtccctgtgcacagcctttgccttgagcaaacccacagaaaagaaggaccgtgtacatcatgagcctcagctcagtgacaaggttcacaatgatgctcagagttttgattatgaccatgatgccttcttgggtgctgaagaagcaaagacctttgatcagctgacaccagaagagagcaaggaaaggcttggaaagattgtaagtaaaatagatggcgacaaggacgggtttgtcactgtggatgagctcaaagactggattaaatttgcacaaaagcgctggatttacgaggatgtagagcgacagtggaaggggcatgacctcaatgaggacggcctcgtttcctgggaggagtataaaaatgccacctacggctacgttttagatgatccagatcctgatgatggatttaactataaacagatgatggttagagatgagcggaggtttttcctgcaccctgaggagtatgactacatgaaagatatagtagtacaggaaacaatggaagatatagataagaatgctgatggtttcattgatctagaagagtatattggtgacatgtacagccatgatgggaatactgatgagccagaatgggtaaagacagagcgagagcagtttgttgagtttcgggataagaaccgtgatgggaagatggacaaggaagagaccaaagactggatccttccctcagactatgatcatgcagaggcagaagccaggcacctggtctatgaatcagaccaaaacaaggatggcaagcttaccaaggaggagatcgttgacaagtatgacttatttgttggcagccaggccacagattttggggaggccttagtacggcatgatgagttctgagctacggaggaaccctcatttcctcaaaagtaatttatttttacagcttctggtttcacatgaaattgtttgcgctactgagactgttactacaaactttttaagacatgaaaaggcgtaatgaaaaccatcccgtccccattcctcctcctctctgagggactggagggaagccgtgcttctgaggaacaactctaattagtacacttgtgtttgtagatttacactttgtattatgtattaacatggcgtgtttatttttgtatttttctctggttgggagtatgatatgaaggatcaagatcctcaactcacacatgtagacaaacattagctctttactctttctcaaccccttttatgattttaataattctcacttaactaattttgtaagcctgagatcaataagaaatgttcaggagagaggaaagaaaaaaaatatatgctccacaatttatatttagagagagaacacttagtcttgcctgtcaaaaagtccaacatttcataggtagtaggggccacatattacattcagttgctataggtccagcaactgaacctgccattacctgggcaaggaaagatccctttgctctaggaaagcttggcccaaattgattttcttctttttccccctgtaggactgactgttggctaattttgtcaagcacagctgtggtgggaagagttagggccagtgtcttgaaaatcaatcaagtagtgaatgtgatctctttgcagagctatagatagaaacagctggaaaactaaaggaaaaatacaagtgttttcggggcatacattttttttctgggtgtgcatctgttgaaatgctcaagacttaattatttgccttttgaaatcactgtaaatgcccccatccggttcctcttcttcccaggtgtgccaaggaattaatcttggtttcactacaattaaaattcactcctttccaatcatgtcattgaaagtgcctttaacgaaagaaatggtcactgaatgggaattctcttaagaaaccctgagattaaaaaaagactatttggataacttataggaaagcctagaacctcccagtagagtggggatttttttcttcttccctttctcttttggacaatagttaaattagcagtattagttatgagtttggttgcagtgttcttatcttgtgggctgatttccaaaaaccacatgctgctgaatttaccagggatcctcatacctcacaatgcaaaccacttactaccaggcctttttctgtgtccactggagagcttgagctcacactcaaagatcagaggacctacagagagggctctttggtttgaggaccatggcttacctttcctgcctttgacccatcacaccccatttcctcctctttccctctccccgctgccaaaaaaaaaaaaaaggaaacgtttatcatgaatcaacagggtttcagtccttatcaaagagagatgtggaaagagctaaagaaaccaccctttgttcccaactccactttacccatattttatgcaacacaaacactgtccttttgggtccctttcttacagatggacctcttgagaagaattatcgtattccacgtttttagccctcaggttaccaagataaatatatgtatatataacctttattattgctatatctttgtggataatacattcaggtggtgctgggtgatttattataatctgaacctaggtatatcctttggtcttccacagtcatgttgaggtgggctccctggtatggtaaaaagccaggtataatgtaacttcaccccagcctttgtactaagctcttgatagtggatatactcttttaagtttagccccaatatagggtaatggaaatttcctgccctctgggttccccatttttactattaagaagaccagtgataatttaataatgccaccaactctggcttagttaagtgagagtgtgaactgtgtggcaagagagcctcacacctcactaggtgcagagagcccaggccttatgttaaaatcatgcacttgaaaagcaaaccttaatctgcaaagacagcagcaagcattatacggtcatcttgaatgatccctttgaaattttttttttgtttgtttgtttaaatcaagcctgaggctggtgaacagtagctacacacccatattgtgtgttctgtgaatgctagctctcttgaatttggatattggttattttttatagagtgtaaaccaagttttatattctgcaatgcgaacaggtacctatctgtttctaaataaaactgtttacattca

SEQ ID NO: 403781 - DNA, 3104 bp, Homo sapiens
agggcggggtgcggacccgcttccggttgggcggtgcttgcgcgcgtgagctgagccggtgggtgagcggcggccacggcatcctgtgctgtgggggctacgaggaaagatctaattatcatggacctgcgacagtttcttatgtgcctgtccctgtgcacagcctttgccttgagcaaacccacagaaaagaaggaccgtgtacatcatgagcctcagctcagtgacaaggttcacaatgatgctcagagttttgattatgaccatgatgccttcttgggtgctgaagaagcaaagacctttgatcagctgacaccagaagagagcaaggaaaggcttggaaagattgtaagtaaaatagatggcgacaaggacgggtttgtcactgtggatgagctcaaagactggattaaatttgcacaaaagcgctggatttacgaggatgtagagcgacagtggaaggggcatgacctcaatgaggacggcctcgtttcctgggaggagtataaaaatgccacctacggctacgttttagatgatccagatcctgatgatggatttaactataaacagatgatggttagagatgagcggaggtttaaaatggcagacaaggatggagacctcattgccaccaaggaggagttcacagctttcctgcaccctgaggagtatgactacatgaaagatatagtagtacaggaaacaatggaagatatagataagaatgctgatggtttcattgatctagaagagtatattggtgacatgtacagccatgatgggaatactgatgagccagaatgggtaaagacagagcgagagcagtttgttgagtttcgggataagaaccgtgatgggaagatggacaaggaaggagactgttactacaaactttttaagacatgaaaaggcgtaatgaaaaccatcccgtccccattcctcctcctctctgagggactggagggaagccgtgcttctgaggaacaactctaattagtacacttgtgtttgtagatttacactttgtattatgtattaacatggcgtgtttatttttgtatttttctctggttgggagtatgatatgaaggatcaagatcctcaactcacacatgtagacaaacattagctctttactctttctcaaccccttttatgattttaataattctcacttaactaattttgtaagcctgagatcaataagaaatgttcaggagagaggaaagaaaaaaaatatatgctccacaatttatatttagagagagaacacttagtcttgcctgtcaaaaagtccaacatttcataggtagtaggggccacatattacattcagttgctataggtccagcaactgaacctgccattacctgggcaaggaaagatccctttgctctaggaaagcttggcccaaattgattttcttctttttccccctgtaggactgactgttggctaattttgtcaagcacagctgtggtgggaagagttagggccagtgtcttgaaaatcaatcaagtagtgaatgtgatctctttgcagagctatagatagaaacagctggaaaactaaaggaaaaatacaagtgttttcggggcatacattttttttctgggtgtgcatctgttgaaatgctcaagacttaattatttgccttttgaaatcactgtaaatgcccccatccggttcctcttcttcccaggtgtgccaaggaattaatcttggtttcactacaattaaaattcactcctttccaatcatgtcattgaaagtgcctttaacgaaagaaatggtcactgaatgggaattctcttaagaaaccctgagattaaaaaaagactatttggataacttataggaaagcctagaacctcccagtagagtggggatttttttcttcttccctttctcttttggacaatagttaaattagcagtattagttatgagtttggttgcagtgttcttatcttgtgggctgatttccaaaaaccacatgctgctgaatttaccagggatcctcatacctcacaatgcaaaccacttactaccaggcctttttctgtgtccactggagagcttgagctcacactcaaagatcagaggacctacagagagggctctttggtttgaggaccatggcttacctttcctgcctttgacccatcacaccccatttcctcctctttccctctccccgctgccaaaaaaaaaaaaaaggaaacgtttatcatgaatcaacagggtttcagtccttatcaaagagagatgtggaaagagctaaagaaaccaccctttgttcccaactccactttacccatattttatgcaacacaaacactgtccttttgggtccctttcttacagatggacctcttgagaagaattatcgtattccacgtttttagccctcaggttaccaagataaatatatgtatatataacctttattattgctatatctttgtggataatacattcaggtggtgctgggtgatttattataatctgaacctaggtatatcctttggtcttccacagtcatgttgaggtgggctccctggtatggtaaaaagccaggtataatgtaacttcaccccagcctttgtactaagctcttgatagtggatatactcttttaagtttagccccaatatagggtaatggaaatttcctgccctctgggttccccatttttactattaagaagaccagtgataatttaataatgccaccaactctggcttagttaagtgagagtgtgaactgtgtggcaagagagcctcacacctcactaggtgcagagagcccaggccttatgttaaaatcatgcacttgaaaagcaaaccttaatctgcaaagacagcagcaagcattatacggtcatcttgaatgatccctttgaaattttttttttgtttgtttgtttaaatcaagcctgaggctggtgaacagtagctacacacccatattgtgtgttctgtgaatgctagctctcttgaatttggatattggttattttttatagagtgtaaaccaagttttatattctgcaatgcgaacaggtacctatctgtttctaaataaaactgtttacattca

SEQ ID NO: 403782 - DNA, 2548 bp, Homo sapiens
  misc_feature (2533)..(2533): n is a, c, g, or t
agggcggggtgcggacccgcttccggttgggcggtgcttgcgcgcgtgagctgagccggtgggtgagcggcggccacggcatcctgtgctgtgggggctacgaggaaagatctaattatcatggacctgcgacagtttcttatgtgcctgtccctgtgcacagcctttgccttgagcaaacccacagaaaagaaggaccgtgtacatcatgagcctcagctcagtgacaaggttcacaatgatgctcagagttttgattatgaccatgatgccttcttgggtgctgaagaagcaaagacctttgatcagctgacaccagaagagagcaaggaaaggcttggaaagattgtaagtaaaatagatggcgacaaggacgggtttgtcactgtggatgagctcaaagactggattaaatttgcacaaaagcgctggatttacgaggatgtagagcgacagtggaaggggcatgacctcaatgaggacggcctcgtttcctgggaggagtataaaaatgccacctacggctacgttttagatgatccagatcctgatgatggatttaactataaacagatgatggttagagatgagcggaggtttaaaatggcagacaaggatggagacctcattgccaccaaggaggagttcacagctttcctgcaccctgaggagtatgactacatgaaagatatagtagtacaggaaacaatggaagatatagataagaatgctgatggtttcattgatctagaagagtatattggtgacatgtacagccatgatgggaatactgatgagccagaatgggtaaagacagagcgagagcagtttgttgagtttcgggataagaaccgtgatgggaagatggacaaggaagagaccaaagactggatccttccctcagactatgatcatgcagaggcagaagccaggcacctggtctatgaatcagaccaaaacaaggatggcaagcttaccaaggaggagatcgttgacaagtatgacttatttgttggcagccaggccacagattttggggaggccttagtacggcatgatgagttctgagctacggaggaaccctcatttcctcaaaagtaatttatttttacagcttctggtttcacatgaaattgtttgcgctactgagactgttactacaaactttttaagacatgaaaaggcgtaatgaaaaccatcccgtccccattcctcctcctctctgagggactggagggaagccgtgcttctgaggaacaactctaattagtacacttgtgtttgtagatttacactttgtattatgtattaacatggcgtgtttatttttgtatttttctctggttgggagtatgatatgaaggatcaagatcctcaactcacacatgtagacaaacattagctctttactctttctcaaccccttttatgattttaataattctcacttaactaattttgtaagcctgagatcaataagaaatgttcaggagagaggaaagaaaaaaaatatatgctccacaatttatatttagagagagaacacttagtcttgcctgtcaaaaagtccaacatttcataggtagtaggggccacatattacattcagttgctataggtccagcaactgaacctgccattacctgggcaaggaaagatccctttgctctaggaaagcttggcccaaattgattttcttctttttccccctgtaggactgactgttggctaattttgtcaagcacagctgtggtgggaagagttagggccagtgtcttgaaaatcaatcaagtagtgaatgtgatctctttgcagagctatagatagaaacagctggaaaactaaaggaaaaatacaagtgttttcggggcatacattttttttctgggtgtgcatctgttgaaatgctcaagacttaattatttgccttttgaaatcactgtaaatgcccccatccggttcctcttcttcccaggtgtgccaaggaattaatcttggtttcactacaattaaaattcactcctttccaatcatgtcattgaaagtgcctttaacgaaagaaatggtcactgaatgggaattctcttaagaaaccctgagattaaaaaaagactatttggataacttataggaaagcctagaacctcccagtagagtggggatttttttcttcttccctttctcttttggacaatagttaaattagcagtattagttatgagtttggttgcagtgttcttatcttgtgggctgatttccaaaaaccacatgctgctgaatttaccagggatcctcatacctcacaatgcaaaccacttactaccaggcctttttctgtgtccactggagagcttgagctcacactcaaagatcagaggacctacagagagggctctttggtttgaggaccatggcttacctttcctgcctttgacccatcacaccccatttcctcctctttccctctccccgctgccaaaaaaaaaaaaaaggaaaaaaaaaaaaaaaaaaagagggggggggggaaaaaaanccccgggggggccaa

SEQ ID NO: 403783 - DNA, 2030 bp, Homo sapiens
agggcggggtgcggacccgcttccggttgggcggtgcttgcgcgcgtgagctgagccggtgggtgagcggcggccacggcatcctgtgctgtgggggctacgaggaaagatctaattatcatggacctgcgacagtttcttatgtgcctgtccctgtgcacagcctttgccttgagcaaacccacagaaaagaaggaccgtgtacatcatgagcctcagctcagtgacaaggttcacaatgatgctcagagttttgattatgaccatgatgccttcttgggtgctgaagaagcaaagacctttgatcagctgacaccagaagagagcaaggaaaggcttggaaagattgtaagtaaaatagatggcgacaaggacgggtttgtcactgtggatgagctcaaagactggattaaatttgcacaaaagcgctggatttacgaggatgtagagcgacagtggaaggggcatgacctcaatgaggacggcctcgtttcctgggaggagtataaaaatgccacctacggctacgttttagatgatccagatcctgatgatggatttaactataaacagatgatggttagagatgagcggaggtttaaaatggcagacaaggatggagacctcattgccaccaaggaggagttcacagctttcctgcaccctgaggagtatgactacatgaaagatatagtagtacaggaaacaatggaagatatagataagaatgctgatggtttcattgatctagaagagtatattggtgacatgtacagccatgatgggaatactgatgagccagaatgggtaaagacagagcgagagcagtttgttgagtttcgggataagaaccgtgatgggaagatggacaaggaagagaccaaagactggatccttccctcagactatgatcatgcagaggcagaagccaggcacctggtctatgaatcagaccaaaacaaggatggcaagcttaccaaggaggagatcgttgacaagtatgacttatttgttggcagccaggccacagattttggggaggccttagtacggcatgatgagttctgagctacggaggaaccctcatttcctcaaaagtaatttatttttacagcttctggtttcacatgaaattgtttgcgctactgagactgttactacaaactttttaagacatgaaaaggcgtaatgaaaaccatcccgtccccattcctcctcctctctgagggactggagggaagccgtgcttctgaggaacaactctaattagtacacttgtgtttgtagatttacactttgtattatgtattaacatggcgtgtttatttttgtatttttctctggttgggagtatgatatgaaggatcaagatcctcaactcacacatgtagacaaacattagctctttactctttctcaaccccttttatgattttaataattctcacttaactaattttgtaagcctgagatcaataagaaatgttcaggagagaggaaagaaaaaaaatatatgctccacaatttatatttagagagagaacacttagtcttgcctgtcaaaaagtccaacatttcataggtagtaggggccacatattacattcagttgctataggtccagcaactgaacctgccattacctgggcaaggaaagatccctttgctctaggaaagcttggcccaaattgattttcttctttttccccctgtaggactgactgttggctaattttgtcaagcacagctgtggtgggaagagttagggccagtgtcttgaaaatcaatcaagtagtgaatgtgatctctttgcagagctatagatagaaacagctggaaaactaaaggaaaaatacaagtgttttcggggcatacattttttttctgggtgtgcatctgttgaaatgctcaagacttaattatttgccttttgaaatcactgtaaatgcccccatccggttcctcttcttcccaggtgtgccaaggaattaatcttggtttcactacaattaaaattcactcctttccaa

SEQ ID NO: 403784 - DNA, 1404 bp, Homo sapiens
agggcggggtgcggacccgcttccggttgggcggtgcttgcgcgcgtgagctgagccggtgggtgagcggcggccacggcatcctgtgctgtgggggctacgaggaaagatctaattatcatggacctgcgacagtttcttatgtgcctgtccctgtgcacagcctttgccttgagcaaacccacagaaaagaaggaccgtgtacatcatgagcctcagctcagtgacaaggttcacaatgatgctcagagttttgattatgaccatgatgccttcttgggtgctgaagaagcaaagacctttgatcagctgacaccagaagagagcaaggaaaggcttggaaagattgtaagtaaaatagatggcgacaaggacgggtttgtcactgtggatgagctcaaagactggattaaatttgcacaaaagcgctggatttacgaggatgtagagcgacagtggaaggggcatgacctcaatgaggacggcctcgtttcctgggaggagtataaaaatgccacctacggctacgttttagatgatccagatcctgatgatggatttaactataaacagatgatggttagagatgagcggaggtttaaaatggcagacaaggatggagacctcattgccaccaaggaggagttcacagctttcctgcaccctgaggagtatgactacatgaaagatatagtagtacaggaaacaatggaagatatagataagaatgctgatggtttcattgatctagaagagtatattggtgacatgtacagccatgatgggaatactgatgagccagaatgggtaaagacagagcgagagcagtttgttgagtttcgggataagaaccgtgatgggaagatggacaaggaagagaccaaagactggatccttccctcagactatgatcatgcagaggcagaagccaggcacctggtctatgaatcagaccaaaacaaggatggcaagcttaccaaggaggagatcgttgacaagtatgacttatttgttggcagccaggccacagattttggggaggccttagtacggcatgatgagttctgagctacggaggaaccctcatttcctcaaaagtaatttatttttacagcttctggtttcacatgaaattgtttgcgctactgagactgttactacaaactttttaagacatgaaaaggcgtaatgaaaaccatcccgtccccattcctcctcctctctgagggactggagggaagccgtgcttctgaggaacaactctaattagtacacttgtgtttgtagatttacactttgtattatgtattaacatggcgtgtttatttttgtctacatgtgtgagttgaggatcttgatccttcatatcatactcccaaccagagaaaaatacaaaaagtcgac

SEQ ID NO: 403785 - DNA, 564 bp, Homo sapiens
agggcggggtgcggacccgcttccggttgggcggtgcttgcgcgcgtgagctgagccggtgggtgagcggcggccacggcatcctgtgctgtgggggctacgaggaaagatctaattatcatggacctgcgacagtttcttatgtgcctgtccctgtgcacagcctttgccttgagcaaacccacagaaaagaaggaccgtgtacatcatgagcctcagctcagtgacaaggttcacaatgatgctcagagttttgattatgaccatgatgccttcttgggtgctgaagaagcaaagacctttgatcagctgacaccagaagagagcaaggaaaggcttggaaagatgtaagtaaaatagatggtgacaaacccgtccttgtcgcgacacgtcgagccgggtagaagtggaggggccgttcgaagagtcgtgagggggtgacgggttaagattcggagagagaggtgctagtggctggacttgacctggaaagaatcttctgctgactctcaacttttcctggaaaaaatggatcattcccaccatatggggatgagctatatg

SEQ ID NO: 403786 - DNA, 459 bp, Homo sapiens
ataataaggaatttggactttattcttcttcatttctttaacacataattaaagacaaccacagctagatgatttacattacaaagtcccattgagacagtgtgctgttgctgcaaggataaataagtagaccaatggaaagaaaaaacactgttcaatagagcctaaatacaaacaaaaatatatatagtcagttcctttaggccaaatgttaccttatactgtagttgtgaaagcatagtctgagttaattgagtagccaaataggaaatatgtaaacaaatttgtatcttggctcctacctgacactgttctcaaaaatcagtcacagatggattgcagatctaaatgccaatggaaagaaaacatagctgttggggaaaagaaaaaccacatagaatatctttatgatcttaaattaggcaaacattaaagtggtacataaaagctctaaccata

SEQ ID NO: 403787 - DNA, 449 bp, Homo sapiens
cctctctctgggcataatggcatgttattgatcttcccaaaggagtcactcaaatgaggatgttaacacagttgtgcaaagatgtatcgatgtctctctggaggaaagatctaagtgtctgctacagctacacaaaacaatctcagtgcagctcagaaatataatgtttgccaaggaaaccagagacaaaagagtgcttattgtacataattccattcatgagaaaccgaagcagaaaaaactaattgatgtggtgagaagtcaggagaagggttatccttgaaagggagggagttataacaatattggatgtgggcacaagggaggcttctgaggtaccgagaatattctgtgtgccaattacatgggtgtgttcagttcacgaaattcactgagttgtacacatatatgtatgccataagtttcaataaaaagtttaaaaattaaca

SEQ ID NO: 403788 - DNA, 284 bp, Homo sapiens
aaggattttgtctgttatgacatagcaaagtaagagaaaagaaaattgaggtgatgaagaccgaaaatactggataataaaagtttaaaggtcaaagtttttatgaaatgaagagcaggtgaggaaagccataattaaaaaatttttaaataataatccaatgctaacttgactctttgaagttgcagattagaacattaaaaatataaacatataatactatagctctctacatatcttccagcccaagtcctaagttagcttttaatttttctgttttgaga

SEQ ID NO: 403789 - DNA, 433 bp, Homo sapiens
tgatctgaaaaagtccgtgaaagtcctagaagcaaagaaagcaaactagttaactttcaggagatgctcagtcttcctcccagacatcttctgatgtcatacacagctggccacctggtgcagtgagcagtgagtccctatgatataaaccccaggatggtccagatcctgccaaagtaattagcttatatcaaagaagtagattcaaaattaaaacaaagggattttaaatgtgaaactgtaaatgtaaaagtgcacagctgcttatactaagtgggtaaactgctttgaaattggttctgaattggctttgggttcataatgggacttgattatttccacatggtacttagcaggcacataaaattccactaatatgaaagaaatgtattttaaatgttggttgatggaggaaagaatacttttatattac

SEQ ID NO: 403790 - DNA, 438 bp, Homo sapiens
gtgcacttaagctgtttctccctctttaattcttataataaaataaaagatacagtagacatcagataatatttttgtcattgtaccattgtgccttgtgtaactttttctgcaaactgtgaaagtgttctatataatacatattttgtcttaaactttgatattaagtccattgttggttagtgtgaaacaccagaagggtgacaacattataaatttaatgtataaattagtaacttagttacctcaccagataaatgacatttatctggtatgtgaccacaaatttattcatgtatgagggaaatgttgacaaggaacaaaatacatattctatataaggaccgaaattaggccttgacattgtcatgcctttttttaaaacatgttttgacaaagtatcagattgcaataaacttgaaattttaaaacaaaaaa

SEQ ID NO: 403791 - DNA, 450 bp, Homo sapiens
gccttgcagcttactgagagaattatgggggaaaacacataaacacaaaggtcatctgtcttaaggcagcagaaaaagctgtcattttagatgtttaccttgaatctctatagccaagaaaggccaacaagagaaataattgtattccttaatatgaagctgagatgtgtttgtagtaatgaacattggtccttggagaagataagtgtgggtacagctcactattacaggttcttactcttgaccttagataatccaaaagcagaaggaacacttgctacatgttgtatttcgtgatttaaatattgtgctacagttggaagatcaaatgccaattggaatttgattactgttttattagtcctgagtaactcagactttaggaaaaagtaataccattacatcccccagctcaataaacagcaccgccacccacttcgtcgctcaaga

SEQ ID NO: 403792 - DNA, 514 bp, Homo sapiens
tctcctgccagcttcctcaactgacaaatggagctcacagaagattccatcacaattagatgagctagtgtatagacaagagctttacatggggctgtcactcagtgcttaagccgggtgtggtggttcatgcctgtaatccagcgctctgggaggccaggagtttgagagcagcctgggcaacatagtgagactctgtctcaaaaaaaatttaaaaatgtggggccgggcgcagtggctcacgcctgtaatcccagcactttggcaggccaaggcaggtggaccacctgaggtcaggagttcaagaccagcctgaccaacatggagaaaccctgtctctgctaaaaatgcaaaattagctgggagtggtggcgcatgcctgtaatctcagctactcaggaggctgaggcaggagaattgcttgaatctgggaggcggaggttgcggtgaacccagatggagccactgcactccagcttgggcaacaagagtgaaattccatctcaaaaaaaaa

SEQ ID NO: 403793 - DNA, 274 bp, Homo sapiens
atcaaaggaaaattttaagctatgaataattaattttctgggtgtttccaccttgaatgaagagatgaggaggtagaacttacatgagaaactctaagatttctcctgggtgtggggttttcagatgctcccttgactaataaacacacgcaagtttttagttttttttttttttaacttactttcaggattttgtagaattgtggagacctgtgtgtaaatgagataaactattattgtatctgagagagtgcaatgttgtaaatgtaataga

SEQ ID NO: 403794 - DNA, 524 bp, Homo sapiens
agtggctaaacatggattaaaacctagttttgactgacttcggtgcttgtgttcttaatatattgctctgttgtttgttttcgatgctttactgccacatgtcctgcctttaactagaggcttctgtattttgaggacgagagctttgctgattgttatatgcatagtatcagttattcactgtcttctaaaataccaaagaatttacttgtaaggggaaagggccctgtcccagaatcctgtaaagcaacgaagtctaacttcaccgtcagagatcaaattggttctagcagctgaccagctgggtgaccctggataaattactataagtctcggttttcccaccagtaaaatgtggcgaaaggcttttgaaacattccttactatccagaacctcgaaactaagctcagcacctaggcgggtgggtgacctcgcgatgtttctgtgcccaggcagcacatggcagagagcagccctgggcgggctggtacctcccctggaccattagcccctaacgcggccg

SEQ ID NO: 403795 - DNA, 531 bp, Homo sapiens
ggtaaagctcttgacttgactagaaaggtgaaaatgctgaataattgtagattgcattagaaaaatttataatttagtgtgtgttaaaaattcaaaagtagatcacatttgccatctttgagccccccacctctgctgcagttgtagcaggcaatacgtctgtcatccactcctcagtggcttcaccagcctttcagccagatacaaggctgttgtcctagtgattacagccacatgagtcactggtcagctcagcggctatcccgacctgctgcctgactcccataatcttcacccatttatgagtgagaacatgcaatatttgtctttctgtgcctggcttgtttcacttaagataatgatctctagtttcatccatcttgttgtaaaatacataatttcatagttttttaatggctgaatagtattccattacatatgtataatacttttttttatactttcatttattgatggacacatgttgtattagtctgttctcatgctgctaataaagacatacctgagaaa

SEQ ID NO: 403796 - DNA, 468 bp, Homo sapiens
aagtgaaatagagggaaaaagtcctttttaaaagaataggcacaagggatgtttttcttaattataaagacagtatttagagtaagataaaagtataattgcagttgcttaaggcttgaacagttttcaggaaaaaaagtcccgaatgttactttctcagtcaatttcaataaatttctcaggggtctaacatttatttcaaccccagccatacattttcttcctaagtggtcttttgcattgacagtatgtagtgtgagagactaataagatgatcgtgcaattccagtgatattctggtttgcctatcatttaatgattatcaattaatcatttaataccctttaatggccaacttgattttcagggttttgttagataagaccatacagtgctttgttaattaaaacgtgatcttgggaagcatgtaacttttatacaaaataaacttttatacaaagcagagcc

SEQ ID NO: 403797 - DNA, 566 bp, Homo sapiens
ttttaagaacctattattaaacttttacaagaagactgttaacttaattccttgaactactgacttgcatctctatgagtctagaaacctactctgtcttgttaactgtcgtatcttcagggttcacagcaccaagtaggaactcaatagttatttgtttaaggaataaatgaatggaatgtttatacaatgtatacagttagaaaacctattttattctttttaaatccttgaatgaaatttaatttatttgctgtatctaaaggctgcactatgacagaactagtataagaatccatttctcttcatttcttagtactctttttatgaagatacactgtctatttggagttagactttttaattgtatacccaaatatatgtaagccacacaaattagagtacttttattaagtaaatactgttgattaataagaacaaagtcaactatcttaataatgagttaatactccaaaaagcattaataaaagcaatgtgcatccttaagacattggccaagataaaaatttttttgcatttccaaaatgctttctttccagtggtaa

SEQ ID NO: 403798 - DNA, 586 bp, Homo sapiens
gctagttcagccaggaggccctgcgcggctccggggagagctgggtggttatgccacctcattagacacattggtggacgatgccgcggattagcgggatggtttgtgtacaaacgaagccgtgtcacttctcaagtgtcggtgctcaacgtggcaacgcccctcccgcccccagtacagagatcctgcccatccaccgacaatccccctcctcatcttccttcccccaggtgcgagtgattcaaggaaatccgactggagggaacacacgctgcgatgcaccctctcctcttccattgagccaggggtgaccttgagagactcaggccacctcaccaggctctaccaggaacagcgtctacagctggtagagagcacgggctgcagagaggtaaagatggggttcggaagccaaggctccccttgttgcatgggtgacatcaggcaagctactcaacctctaaccctggcttccccttctgtatactggagacagtatcggccccacaggcacttgtggagcaagtgggtttgagctgagctcctctgaaaatcagaggcacactcagagagtagctcagaaaac

SEQ ID NO: 403799 - DNA, 615 bp, Homo sapiens
gctagttcagccaggaggccctgcgcggctccggggagagctgggtggttatgccacctcattagacacattggtggacgatgccgcggattagcgggatggtttgtgtacaaacgaagccgtgtcacttctcaagtgtcggtgctcaacgtggcaacgcccctcccgcccccagtacagagatcctgcccatccaccgacaatccccctcctcatcttccttcccccaggtgcgagtgattcaaggaaatccgactggagggaacacacgctgcgatgcaccctctcctcttccattgagccaggggtgaccttgagagactcaggccacctcaccaggctctaccaggaacagcgtctacagctggtagagagcacgggctgcagagagatggtaacaagaaagtaggtagctgcaggggctgctggcagccatcttgagacatgaaaggtgtccaaattgggatgaattcagcactgaagatggtggtacagagaaacaggagatagggcctttgatcacattgttggatggctggttaagcctctcctgaaatccattctactgctggactttacagttcataaactaataaatcctctttactgtttgaa

SEQ ID NO: 403800 - DNA, 350 bp, Homo sapiens
tgcaaatgttcatgtcagcattatttaatagtcaaaaagtagaaatgacccaaaatgtctgtcagttgatggattgataaagtatggtatgtcattctgtatatgacatgtccagtatagccaaatctatataaacagaaactagagcagtagttgcttgtggcttggagtgagaatgggttgggaggaatgaggagtgactgccgatgggtactttcggggacaatacaaatgttccaaagttagtttacaatgatgattgtacagttgtgtaaacgtattagaaaccgttgtaaagtttaaatgggtggattttatgatatgtaaattatatctcaagctttttaaga

SEQ ID NO: 403801 - DNA, 778 bp, Homo sapiens
aagcaagaaaggtaacattgaggaagcagaagtggcagtgcatagaaggaagaaagaaggacaaagacacaggaatgcaggaaagtatcaatgtttagggaagaaccaaaaatgtttatttgggcaaaggatagacaatctgggaaatcaggaaagaaaaggttaaaaacacgtaaaggtagtttaccaaattgcaaatttgctcttaagtataccagagacacattaaagagagcctctatgatgttacttggtagcagtgaatgaatacgatggattggcctggattatgagagacactgagattctgaaaccttaagataataacagatgtggcaggagggctgaagtttcaaagctgagtcatggggagaattagttttcgtgtaactagttgagaagtgagaatcaagaactgattttgatgagggaagatgattaattgatatgtatttgaggtatacacaatatattcacactgacttatcaaaaagacctttgaaaattgggtgtggtccttgaaaagtgcctctggagaacatgcaatgtactgtgtaggttaccagcattggctgtgaaatcagattgccaagattcaagaagtggctctgccacttccaagttcttgtgaccttctcaagccttggttttcttatctataaaactgtgataatcaattttgcgactatgataatcaattttgtgattcatttgcacggagaagatagtagaagctatgctagtggataagataacaatggagagtatagaaaggaaa

SEQ ID NO: 403802 - DNA, 466 bp, Homo sapiens
ttccgagtagttgggattacagacatgcaccaccactcctggctaacaagaagagcctttcgcctctagccatgattctgagaacttcccagccatgtggaactatccatgtacaagtatattttttcattacaaataactcaagaaaaagaaatcattgaagataaatgaaacgctgtattacattttatgccagattcagcttcttgagagcagtgtctgtttcttactttgttgcaaatgtacattcaccaatcaggcacttgttaaaaagtgcttgaaacggcaaataataaagacgactacttttcagatattgtatctcagcagagatgctgaaaaaagaaagagagaagaatgaggtctttgcagaaagattggaagatgaagaggagataagtagagaaagaaagcaccaggatggaaaaatatgggtcttgccttcaccaaatgaacttgtgtttca

SEQ ID NO: 403803 - DNA, 158 bp, Homo sapiens
aatatgtatgagactcctttggaagttcataatttcatgggagaattggttgtaaacaaataaatgcaaaattgacagatgtgtcctctggaaatagaggagataaattattattggctcttaaaggccaagtagaattttccagctaaagagaagga

SEQ ID NO: 403804 - DNA, 686 bp, Homo sapiens
gtcatcgagccggcccggattgctgatctcaacgtgagtaaagtttaataattcaaagcagaatttgagcttcaaaagaataacaaaatagtgttgcaaatataccattttctgtaaagaataaaagctacatagttttaggaaagcgaaggaaatcctgactcttggtttaactgattcattcactgcctcatttgtttatcaaatacttacttaacagatactgtgtcgacgtgtggctcaggccatcgagacacagcaggggacaaatgtttatacttgaggttggctaactcattaggacaataagtgagatttataatgcgtgccttatttgtacttttagattataaagactggttatcaaatacacataaaaaagaggagattttctttccaattgagtcttctcctgtgtgcagggaatgcatgccttgcctccctggctcgcctctgaaggtattttataaatttacggtgacctgagatatgtgactcagaactgactggaccggcactcgccggtcagccactcacatttcagtccgcggccctttatgctgttgttactcacactgcaggccgcggccctttatgctgttgctctatgccactgattcactgctttctcatcctgactagaatacagactcgttgagatcaggcaatccgggccgagctcgcag

SEQ ID NO: 403805 - DNA, 396 bp, Homo sapiens
aatcaaatgtctctggagttagctggtaatgtaagattatgaattggtaacaaaattcacagccacagtctgagatattttgggaccacgtgagctggctcacttaaccagggtcaccttactagtcctgatgcctggatcttggagtaactagcttccctaagcggttacacaccattcagaatgaatgaagacatgtgcagagttaggagagagatgagtaggtcagtttcccgtcttactggcatccagaaaattaagtgctgatctcaacgtgagtaaagtttaataattcaaagcagaatttgagcttcaaaagaataacaaaatagtgttgcaaatataccattttctgtaaagaataaaagctacatagttttaggaaagcgaaggaaa

SEQ ID NO: 403806 - DNA, 1096 bp, Homo sapiens
taattttttgtgtttttagtggagatgaggtttcataatgttggccaggctggtcttgaactcctgacttcaggtgatctacctgcctcggcctcccaaagtgcagggattacaggcatgagccaccgcgcggcccaggatccatagttttaacatggtggacttagttatgtttatcgaatagggtgatggtagagatcttggggtactggtaaagttcaatattaccctttcagggtttaggtttccacattcctttcttacgccaaatcatgtattgtctcatttgaaactcaataatcctgtaagtagtattcttttagctttacagataaggaaatttatttatagattgattgttgttgggttttgttttattttgttttcttccagacagagtcttactctgttgcccaggctggagtgcagtggtgcaacctcagctcactgcagcctccacctcctaggtttaagcgattgtcctgcctcagctggtattataggcgtgcgccaccacgcccagctaatttttgtatttttagtagagacagggtttcgctatgttgcccaggctggtcccgaacccctgagctcaggcgttgagttgctggcctcagcctcccaaagtactgggatttgattattaaatcccaggttttagaatctaagttaaagattatcaataaatagatagcagtgaataattttttttttccttttaggggcttaaagtacttaaatctctgttgaacagtggataccaccagttataattactttgggagatggtgatttgagtctcttaatctgtgaaatattagaaaagtcttggctaggcacagtggctcattctgggaggcagacacgggaggatcacttgaggccaggagttcgagaccagcctgggcaacatagagacaacatctctacaaaaaatacaaaaactagccaggcatagtggtatgaacctgtagttccagctactcaggaggctgaagtggaaggatcactggagcctgggaggtcaaggctgaagtgagccgagactatgccactgcagtctagcctgggagacagagggagaccctgtctcaaa

SEQ ID NO: 403807 - DNA, 657 bp, Homo sapiens
taattttttgtgtttttagtggagatgaggtttcataatgttggccaggctggtcttgaactcctgacttcaggtgatctacctgcctcggcctcccaaagtgcagggattacaggcatgagccaccgcgcggcccaggatccatagttttaacatggtggacttagttatgtttatcgaatagggtgatggtagagatcttggggtactggtaaagttcaatattaccctttcagggtttaggtttccacattcctttcttacgccaaatcatgtattgtctcatttgaaactcaataatcctgtaagtagtattcttttagctttacagataaggaaatttatttatagattgattgttgttgggttttgttttattttgttttcttccagacagagtcttactctgttgcccaggctggagtgcagtggtgcaacctcagctcactgcagcctccacctcctgggcaacatagagacaacatctctacaaaaaatacaaaaactagccaggcatagtggtatgaacctgtagttccagctactcaggaggctgaagtggaaggatcactggagcctgggaggtcaaggctgaagtgagccgagactatgccactgcagtctagcctgggagacagagggagaccctgtctcaaa

SEQ ID NO: 403808 - DNA, 2220 bp, Homo sapiens
tgcaggtggggaggagggatccagggtggggtgaagcccgtggccacaggaggcttggatgctccacctgctgcgatttcccgacaaagactgtgtccctcttttctccatctcgaaagccttccctgtgtgcggggacagacacagcctgaaaccaaagcctctggggtgcccccccgcccgccctaggccctgtgaggtcagcgtccctgggcctccccaagctggcagaggggccgtggcaggagcaggtggtgcctgcagcgtcctttccattgttctccaaaacgctctaaaacgggaaggctatttgggacaggctgttgctgtctgccgagcagagtaaagatgagtggataggtccccaaaagtgtcaccgtgcggagccgatgaggtctgcactcgggccggggtgggtgccccgatgccgaggtctcgtatctcggggcagtgtgtgagactccgtaatcagcacctgagtttggttcatttattccagctgcaatatttttatgcaacctctgtgccaggctctggggacactgctgaggaaaagggagaaaaaaacaaaaatacatctttaatgcatgctctgaaagacaagaacggggtcagagatggagggtaagtggtggtcggtcacagaccaccagaagggtgtcagtggacaccctttttattaaagagggactcttaaacagatatgaccccccgatgggacggcagatcagagaatcaggctgtgggtacattgtgttgagagcaggcaccttctagggcaaggcctggcaacctacagccctccgaccaaatgcagcccgccacctgtttttgtcaataaagttttgttggcacatggacatgcccattcatttacatatgacagctggcgccccgacaacagcagacctgaagagtcactgcagagcccacctggcctgcaaagcccaatgtatttagaatctggccctttatgggaaagaatgtgctcagccctgacttagaagaagtgggtggtggcagcctccaccctttctctatgcctgcaacaaaatgttctcccatagggacagcccctcagtgcccaggtccaccttggctctcaaaggcttccagttagatggacagtgggcagccaactgcccccgctgccacccgcaggagcgggtggaaaaaggaggctttgaccagggactttgattcatctgtccatctgtccgacccactgggggtgctctgccctctacccttgggccacctgctgcccaagtgctggggtcggggagagcctgacacactcagcctccgacccctgcagctgccccccaccaaccccaccattcacggattgggctccctccccttctgcaatggagagttctggctcccactccaccacggtcaagattcacggctcccatgacggtgctaagatcccgatgtgtctccctctctccctgtggccaccgccccgactcctcccacaacctcaaattgtcccctggccccatgaggcagctctggaactcaagagtcacagcctggtcatgatcatcagggagagaagctcccagggactcccagggccccagagacgaggcacagaacacaaggaagctgggggacacgcctggggccttggcaccagcccggggagggttatttacggattagatttactcagcgctgctgctctgttaatggagaatataaaaattatttgctgctgcaggcagtgtgaggggtgacagcagccaggaggcgggcggaagagtgggtggctcagggcatccgtgcctcccagctaactcggtgacagggacaaatgcctcccttccctgcagcttccagacggaggagggggtccttgtggccacgacagcctccacccccaccagccccagcagctgctttagaaacacaaagccagccatgtacggtggctcacgcctataatcccagcactttgggaggctgaggtgggcggatcacctgagttcaggagtttgagaccagcctgggcaacatggagaaaccccgtttctactaaaaatacaaaaaattagccaggcatggtggtgagtgcctgtaatcccagctactcgggaggctgaggcaggagaatcactagaagccaggaggcagaggttgcagtgagccaagcgcgtgccatttcactccagcctggacaacaagagcaagactccatctcaaaaaaaa

SEQ ID NO: 403809 - DNA, 883 bp, Homo sapiens
ttctcttctgcctgttctactttatttaattctaaatcatagtcgctatctaaagccaaactcctcctctttttgtatgagactcgtagcattttgtagcttctttagagaattggctgacatgtttatttctgcagtcagtataaagactgaaacttgttgcagagcaaaaaaaaattacctcactcttttgcttggaagacttgtaccaggtctttctccagcagtcgggggatgagccagggatgggagctaaccaaaacaggcacatgaaaacatgaatgatgtcaaggtggacattagtttaactctggaaggaaattccaggttggccttttgccctaaacttcttgtcattaagtaaccatttttggataaagaaagaaaatgttttttatttcacttgtcatttattgttattaatattagagagtgatagcgtgacatacagtgtattcatttttttctctgctacaagtgaaaaaatgctaattaaatttttcagataacttaagtagcattagataaaggtttattctctctcagctaatataaatttatcttttttccttagttgtattataagcaaatatctttaaaataaagttatgtcatttgtaggagcaacattttaatttctagatataaaatgtacttatttttcctcttactgatatctgtgcttttatgaatgtctgtgcctttggggctgctttagaaaggaattaaactagcaatggtattattcatgcatttaacaaaatttactggtgcctaatatatgctaggcattgccctccactgaggtaggaaaacagtgtctatgatttcatgcaccttatattctgacttaatacaatacattgtattaaggaggagagag

SEQ ID NO: 403810 - DNA, 793 bp, Homo sapiens
cagtggttccagaaactacattaaaacaatatggatttagaagtcggtagtccatgctgcgagtggaagacttacgaataaatcaatgcagcaacctagtactgctgaatcatattaatcacagcatcacgatgggcatagaggcaatttgtaaagaaaccattctccccacctctgaatctttacagtgaactataaataacttgaataggtagcagaaagaaagcagaaacagtgagatgtacatttaaaatagttaattcaaagcaacctataggttgcttctttgtataggaagaagaccattaattcgagctatgagacactggtcttatcctactcccttatagcacattgcctctaactgtggaggactcaatggagaagcccataaataaccttgtgtttaactagataagaaacactgagttaatgaaggcatgagataaaagctatggggagaggacccaggacagcacagaagaatgagagttctggttctaatgtcaactagctagttgactcaaggaaagtaaaatctctacggttacattttctcaaacgtaagttccgcttttacagtccaagtttttttgaatctgaattatttacaggccaagattctaaagatggcctttacattaatgaagggctatttatagaaaggaaaataaaaataatattttttgagtgctgactatatgccaggaattcttctaggttgttagtacatatttcacttcacttaaagctttcaattagtcctgaggaaacttaagatcaaggatttgcc

SEQ ID NO: 403811 - DNA, 295 bp, Homo sapiens
cactctggagcccccgtctcgccaggttggcacagagctgggtcagagtccacagcagtgactctgcagttctccttgccctagatctgtccctgtggcagggttcaccctggaatccccggaggcccaaccacagcagctcagcccaccccagcacactcttctcaatgactgctgataacagaggggtcgagtgtccttaaatcatttactttttacctaaatgaattctggaacctcatggggtttgggccaatagatttatcttccccagaggtaacatgacataatggaa

SEQ ID NO: 403812 - DNA, 616 bp, Homo sapiens
agaggcattggggaaaaaattgccagcagtgtttataggatcagctggagaaaagcaagcctagttgaaggaaagctttctgttataagctctaggagattctgaagaagtaggagttactttttattaataagatgaaagtggactattaacgatgcctttctgcttcccccttgatctactgtgttaatgcagtagcttcagaggaggcaaggagacaccgtgtggtctagaagctttgcttgggggctagggaactagttctgcactctgaaagaggtttcagtcctcctttttccagagagcacccctgaatttttgctagtgagaagtataagaaatcattatcatgaaattccaatagggcactgtaactactgcatagagtatagagttgtagtctgttatgcatactggactacatctacttgaatgtaggaggataccttcaactgtggaggggttcctttttgtcaagcatagttatcacacctcccctttcctctttttttcttctctcttttcttagtctcttctcttttaaacattgataaatgccttcaactgaaaccttcaaatgttgagacaataagtgtaacttgtatgtgtgagtgtg

SEQ ID NO: 403813 - DNA, 418 bp, Homo sapiens
ccagagttacagcatagtgaaacttcaagactaggtttttctggaccatcccagtgcgcatgaatcagatttaaaaagaaagaaacatacaagaaatacataaatcatactatatgacgatagcccagaagattgcatggaggatctttgtgtttcctgtagaagaaaagaaaaatggaatttccatctcttgcatcagcacttgacagctggagttattgttgaccaggcatcaagaaaggagggatatgcatcagaaatcattttgcctgaaataagcacaactccatggaggacaatgacacattttctctggtgatcttgtaattggggatgatgtaaacatgagtctaatctgcattttgtctaagaaattcttcatcatgagcatcttccaataaaacgtggttccttacaa

SEQ ID NO: 403814 - DNA, 594 bp, Homo sapiens
ccagagttacagcatagtgaaacttcaagactaggtttttctggaccatcccagtgcgcatgaatcaggtgattttatcttttgttcctctccttgctatccctaatctgtcaggcagtcctaaatctataccatcaggcttgtttgttctacttctctatccttttattatggttccattaactcacatccaaggatgtcaagagaataaatagcccaataaaacaaaagaatatacttccagatttaaaaagaaagaaacatacaagaaatacataaatcatactatatgacgatagcccagaagattgcatggaggatctttgtgtttcctgtagaagaaaagaaaaatggaatttccatctcttgcatcagcacttgacagctggagttattgttgaccaggcatcaagaaaggagggatatgcatcagaaatcattttgcctgaaataagcacaactccatggaggacaatgacacattttctctggtgatcttgtaattggggatgatgtaaacatgagtctaatctgcattttgtctaagaaattcttcatcatgagcatcttccaataaaacgtggttccttacaa

SEQ ID NO: 403815 - DNA, 340 bp, Homo sapiens
ccaagaggacatcaggctgctgtccctccccgccactgaacactcagttcctaaagagagaggattactcagaaagcagcttgccaacgctcctacccaagcttcagagccctgtcagattttgccttgaggtggaagagaagcaagctgtgaaacacatagctcctaacctcttgcctaagaattaacttcaattgcaacagatcatgagacatttaagtcaaagggcactccatccttgatgcagtggaaatggggaaatggaggtgaaagacaattcacaggagatttgtggatttaatgaagatactgcctgcactgtaggccagctaatttgtgg

SEQ ID NO: 403816 - DNA, 1082 bp, Homo sapiens
ctgaaggggatgctaagggagataaagccaaggtgaaggacgaaccgcagagaagatccgcgaggttgtctgccaaacctgctcctccaaagccagagcccaagcctagaaagtcccctgtaaagaagggagagaaggtacccaaagggaaaaagggaaaagctgatgctggcaaggaggggaataaccctgcagaaaatggagatgccaaaacagaccaggcacagaaagctgaaggtgctggagatgccaagtgaagtgtgtgcatttttgataactgtgtacttctggtgactgtacagtttgaaatactattttttatcaagttttataaaaatgcagaattttgttttactttttttttttttaaaagctatgttgttagcacacagaacacttcattgttgtttttgggggaaggggcatatgtcactaatagaaagtctccaaagctggattgatgtgaagaaaacacctttcccttctagttttgagagacttcctcttggctcccaggaggagggattccctgactttgacacacatggccaccttggcacaaaagccttgtggtatagaaaaacaaatttgtttttatgtcctcttctccctttccatctttcagcatagacttaactcccttagcccagacatctgttgagacctgacccccagtcattggttaccagtgtgtcaggcaatctggactttccagtgatgccactgagatggcacctgtaaaagagcagtggttccatttctagattgtggatcttcagataaattctgccattttcatttcacttcctgaaagtcagggtcggcttgtgaaaagttgttaaacaacatgctaaatgtgaaatgtcaaccctcactctaaactttccctgttcagagcatcagatgaagacttcattgggttttatagtggctttctgatttttggtagtccattgaagatagggagtttgaaagttgttgtcatactgattaacgattgtctagacgaccatgtcctgcctgaaataccatgattatttatggaaagtatctttaataaagctggatatggtttgaaaaaa

SEQ ID NO: 403817 - DNA, 902 bp, Homo sapiens
ctcaggaggctgaggcaggagaatcacttgaacccaggaggcggaggtggcagtgagccgagattgcgccactacactccagcctgggtgacagaccgagactccatgtcaaaaaaaaaaaaaaaagaaaagaaaagaaaagaaaaaagaaatctaggggaaaatctgtttgttgcctcttccagttgctggttgctgcaggttttccttggttgtggccacatcacaccaacctctgcctcctcttctgagtgtgtcataacacctccctctgcttctctcttataaggatacacgtgattgcatctaaggctcactcagataatccaggagaaattttccatcttcagatccttaattcaatcacatctgcaaacacacttttcccatataaggtgacatttactcattacagggattaggacctgatatcttggggcgggggcatcatttggcccctccttgaactgcattttcttcacctgtaaaatgggactaatcaccatctttgtaccataggtatctgaggatcaggcccgattatacaggaaagatacccactgagcactgggccttgccctgcatgttcatcacactcagtaaaaagaaagagcagtttacagcggggcgcagtggctcacacctgtaatcccagcactttaggaggccaaggcgggcggatcaaaaggtcaggagttcgagaccagcctggccaatatggtgaaaccccgtctctactaaaaatacaaaaattagctgggtgtggtggtggacacctgtagtcctagctactcgggaggctgaggaaggagaatcccgtgaacccgggaagtggaagttgcagcgagccgagattgtgccacagcactgtagcatgagcaacagaccgagactccatgtca

SEQ ID NO: 403818 - DNA, 404 bp, Homo sapiens
acatggaacattttagtgtgctgtacacatgtctagtgtttcttcagactggctggagccacattattttaaatcattttagaggagcatccttactgaggctagaagtaggaactcattttttagtctactattagctttcttttaatgatctccttcagattcaccaacagatacctcacctctgcccattttcaggggctgctaattaagtaataacatttaacttacataagtgtttttttaaaacgaaactccggttatagagctttctgatcaacttagattgtaataaataccatagtgccatgttacacaggaatgttacaccccaaaaaaattcagattcggggggaggagtgaaacatcaaacccatcacatggcgaaagcaaaagatgttaca

SEQ ID NO: 403819 - DNA, 264 bp, Homo sapiens
agtgggttagcgtgcttgtgctggtcagggagggtcttgttgctttttatttttggcccatttctttgtacttcagagtgggacctgatggttagacagttagctaaagttggttgtgttttgaactgcatagaatatagaactatggccgggcgcagtggctcacgtgtgtaattccagctatgccagaggctgaggcgggagaatcacttgaacctgggaggtggagtgagctgagatcgcaccactgcactccagcctggg

SEQ ID NO: 403820 - DNA, 471 bp, Homo sapiens
ccacgtgagaaacgtaggaaaagacgctgcaaatcaaagacgaccaccctggagaagcaggagaaactccccaacttgagtgaatgtatcaacatttcagaaaatgtaggaggtggatgttactgtttaatctgctcagcatccttcccccaccccttttgataactggcctcatccactggacacacttcttggaatgagacccgggctaggccaatcagcctctccctgaagtgtttccctgaagctggaagagaggaactctgttccctcttggattacagagctgaaaggagatgaatttgatgctactagtgttcatgtttctaaccaagggagatggggcctagcaagccttaatggtcttcatatattttccatcagaccttttaagcttcccccatggtgaccagccccagagtaatgcacatttaattcaactttcaatgcaggaaaatcaattgcattgca

SEQ ID NO: 403821 - DNA, 303 bp, Homo sapiens
acataagcagggagtgattccagggtgactgaaagagggcacctgaggcaggctgtcattaggaagctttaacattcatctacacataaaggttactacttagatgggtgttacttgtactacatgctaacaagtctctgagaatttcactacccagcatgttggtgtctataaagaaggtgcagtcatatctttacctgctaaagcaaaatgacatctgtttgtctcagatacatatgttattgtttttcaaatgtttatataagcagtaccttcataaaatgcatttttgctttaaagtat

SEQ ID NO: 403822 - DNA, 376 bp, Homo sapiens
gcctggaggggtccttctacagagacaacttccaggagagaaggaactaaatgcacagggcactgaggttcaggggatgcccccaggccccggcacccatggagccccggaatcccccatcctgcagcagaaagggctcactggactgggacagtacttgctgcccaacactggccatgggctcaccaaaaagttaggggcctgtgcgctttagccctctcctgattttcctccattcctcccatctacagctttgtcctttcattcagtcaacactggcggcgggagctagtgccagaccaccaggctgggcaccaagtgggggctccagagagagtggattctggaggtgagcggtgctctttgggaggaagga

SEQ ID NO: 403823 - DNA, 222 bp, Homo sapiens
ccacactagcagtagaagagtcccttcctgtcaacaatgaagcatttggaaggaaatcagaggcatacaaccaaataggctttttacccccttgggggccatatcaacagcatggctattcaggggccatgctctgtcaccttgaggtcatgccaaagaaacttggacttatacacagatcttaattggctcttgtccccaggacattcttcttgtttacaa

SEQ ID NO: 403824 - DNA, 771 bp, Homo sapiens
atttatatatttttttccttaaagtaagattaataaagctaaattaattcttttatatttcttttaacagcactaaatcaaagctagagttgttgatgcatgcaatgtgtgtggtttttaaattacttttgaatttaaataatccctgtgttttttaatccctcactagtacagatacttaacattgaatgtttgtattctagtgaatgtccattaatagttgcttaaaactttctttaaaatatcagtgaggtaaatagcaatctggaaaagaaaagatggaaagaaagtaaatttggtttgaattaatttcttgtgttatcaaccttaactgaaggcttatatagcccagtgggatctattcatgggcaacatcatgttgccatttggcaggacccacttagattctggcctttggcaagcccctccacaaccaaggctcttccatttgaataaaaactgctcatcatcatgggtgtgtgtgtgtgtgtgtgtgtgtgtgtgtgtgtgtgtcgccttctttcatcttattgatctttgatactttacgtcttgtttcctcagttgtaagctcactggtaaaagtgagatatatttttctttcccttctttaagacaagagcagagcttgtgtgagagctctggactttcactgctacagaatttaaagatgtggtttttcaaaagtctaaggcctgatgtttcttaagtctgaatatgcacaggaatctactgatgaacttagtgaaatgcaaactcctgggacacaac

SEQ ID NO: 403825 - DNA, 474 bp, Homo sapiens
caaggaattgcattcgcctgagattgaggttcctataagaaagaggcaatgaaagacatggttgggaagagagcagaggccaggacgggtcttctaccaaactaagaattgctgttgtgttcatcctgccagaagtggtggatcagtgaggccttttaaacaggagagtaagttagatttatttttaagaaagctcactttagtcataatatgaacgttgtctgaagggatgacggtaggctggccacagtggctcatgcctgtaatcccagcgctttgggaggccaaggcaggaggatagcatgagcctaggagtttgagaccagcctgggcaacatagtgagacctcttctctacaaaaaaattttttaaatcagctgggcgtggtggcctgtgcctgtagtcccagctactcaggaggctgagatggaacgatcacttgatccctggaggtcaaggtgcaatcacggctca

SEQ ID NO: 403826 - DNA, 361 bp, Homo sapiens
ggatcccttattccctggaaatagttgcaaaatttttgacagaaatacacacatattctgagtatgtgtttgcctttttggtcacaaaaacacaaccgatactgttatgcaaggacttacattgttttgacccacttgcaaaggatcacacacaccgtcatgttaaatgcaggaaattacagcaacagctgtgcaggagtcagtacaagatcatgggatctactggccagatttatatactgtatatactataagatgcagaagttgttggcttgatggaatgatagagaagactgttgaagacacaatgcagcagccactcacaggcagtatcttgtgaggctggagcactattctccag

SEQ ID NO: 403827 - DNA, 527 bp, Homo sapiens
tgtaaaggactggtagaattagcaatcagtcaacttgagtgagggtcttaaagaagtacaaggcttattctccgacttcagggtgttcatagttcatgggaatcatgcatacacacaaaccagaataaaccattttgaagcaaatgtgcttgaagttcagcacatctccaggaaggagagggtactgtgagctagatgaactgggtgcacagactctgtcttgacctttcactttatacccaattctttaggctaaattttgacattctaattggacttccagagttagtagttctcacactaaagactgtgtaattacaagttaaccatgtacaggttggtgatagaagcagaagtagatatttctgggctatgcagggctatggtaagggatttggaatgaaataggtctgggcttaaatcttgtatctctagctatgaacttcagtttcctcatcagtctattggaatataactaccttttagggttgtggtgagacttagaatatctgtaacccctctagtgg

SEQ ID NO: 403828 - DNA, 459 bp, Homo sapiens
agtagctgggattacaggtgctcaccacaatgcccggctaatttttttatttttagtagagacggaggttcaccatgttgatcaggctggtcttgaactcctgacctcaagcaacccatgcgcctcggcctcccaaagtgctgggattacttgaagccaggagttcgagaccagcctggccaacatagaccgcgtttccacaaaaataaaaaaaaagaataaaacaaagaaaaacaacgataaataaacttaacagctttaaagaaaagccacgaccacagaaggtttacaacgagtcatctgcgccaagcagcggcacctgagacgctgcgggcggggagggtggggtccgagcgccagcgctgaccgcctgggtggaggccgccccgggccccgggcctcgactaccctgccgcgtccgggcaccggcgctcggctcccacccgggcgtctgagcct

SEQ ID NO: 403829 - DNA, 544 bp, Homo sapiens
cagagtctcactctgtcacccaggctggagtgcagtggggcaatctcggctcactgcaagctccctcccaggttcacaccattctcctgcctcagcctcctgagtagctgggactacaggcacccgccaccacgccccgctaattttgttttggtatttttagtagagatggagtttcaccatgttagccaggatggtctcaatctcctgatctcgtgatctgcctgccttggcctcccaaagtgctgggattacaggcatgagccaccagtccaggcccattctttattatttgtaccacatgtggcatcatcctaaagtcactggaaactgggagcacaagggccacactaggtcctgaagaaatcccgaggtgagtgggaactgtcattaccaataaagagctacctcatttaagtggtctctcctttcagcagagcacagtgtgctgctgccatggctgctgccagcaaaggctgccttccagatcggctcctttctggacatgtgcaaggaaatgtcctgggcaggcaaagtttccatt

SEQ ID NO: 403830 - DNA, 838 bp, Homo sapiens
cagagtctcactctgtcacccaggctggagtgcagtggggcaatctcggctcactgcaagctccctcccaggttcacaccattctcctgcctcagcctcctgagtagctgggactacaggcacccgccaccacgccccgctaattttgttttggtatttttagtagagatggagtttcaccatgttagccaggatggtctcaatctcctgatctcgtgatctgcctgccttggcctcccaaagtgctgggattacaggcatgagccaccagtccaggcccattctttattatttgtaccacatgtggcatcatcctaaagtcactggaaactgggagcacaagggccacactaggtcctgaagaaatcccgaggtgagtgggaactgtcattaccaataaagagctacctcatttaagtggtctctcctttcagcagagcacagtgtgctgctgccatggctgctgccagcaaaggctgccttccagatcggctcccagatgaaggggctgttttccaggggttgatcccaggaaacataaaagtggagaccacctggggcttcagtccaccctgtgatgttattcttgaagattaagataatttaggaagagtaataaaaaatatgagctaatatttgttgtgtgtttgttatgtcaggcactgttctaagcactttgtgtgtgtgttcaggctgaatcattggaacagcttttggagggacatgcatgtattaccctgacagtccagtcactccactgccccactcatctggatgactgtgtcactcctcctctctcccaaagctgcaggggtaccaccttcctcattcttgctgt

SEQ ID NO: 403831 - DNA, 858 bp, Homo sapiens
  misc_feature (512)..(512): n is a, c, g, or t
cttgtttgatcattggagatttcaaacctgttcccccatgatattgacaggtgaggaagacttgtgagaaaggagcccatccaagacatgttccttgttgctcatcatttccagatgagctgttaagactccttctgattctcttctttactttatcccaagcctcattgggtcccttgtctttacctagacataattggctctataaagtatttgggtgaggctttaggcagagattgagtgtagcctggtctggttgtaaagttccctgacaccttgaccgtgggtctgagagaacagaaatacagctccatcgttggcccgctcttatgctgggacatgcatttcctgttgaaacggccatggggtagcacatgctgaggactgcagtgaggaaatatgctaccctttgttgcaggacagccccgtataatgtgttaaacacatacttctcatttatctggaaatttctttggaagtaaatgtctctgaattggaagccagatactctnagaagctatggggttttttgtggatcccaatggtatcatttagaaaattattgctttagggtccaggcatggtggctcacgcctgtaatcctagcactttgggaggccaaggagggcagatcacttgaggtcaggagttcgagaccagcctggccaacatggtgaaactctgtctctaccaaaaaacaagcaaaaaattagctgggcatggtggcgtgcacctgtaatcccatctacccaggaggctgaggcacaagaatcatatgaaaccaggagtcagaggttgcagtgagctgagatcatgccactgcactctagcctgggcgacagagcaagactccatctc

SEQ ID NO: 403832 - DNA, 161 bp, Homo sapiens
aaaaaagagtgtgcagaacaacacagctgaagaacacattcttagatacatcaaaatgggataatccagttgataccattttataaccttggcaacatgaggataatggttcatcctttcatgtcattttctagtctgtgctatgtaatttcaagtgcctt

SEQ ID NO: 403833 - DNA, 353 bp, Homo sapiens
tgtgcactgaaataatattcaactaaagcataattgaatcctggccagtggtgaaggaaagtgatatcccagggaggaccctgaagctccctagagcagggttgctcagccacaccgctattgacatatggggccagatcattctttgctgaggaaggctgtcctgtgcactgtaggatgtgtggcagcatccctggcctctacccactaaatgccagtagcacataccaccaccatcacttccctcccaccaatgtgacaagcaaaaatgtctccagacatatgtaatgtcaatacacatatccccacagaggggaagggcacagttgtccccagttgagaaccactgcccc

SEQ ID NO: 403834 - DNA, 480 bp, Homo sapiens
atgtagctttcctgagttaggttgcatctgggatgcagtgaaaggtagcagcagtctcgctgtggctgtccagtccagaagcagaagaccggcacctgagatatcaaggtatccaatttgggaatgctttttctgtgggtgtgtagaattgcaggaaagaccatagcatattccctgaagtgaacccaaataaggtctgggataaaaaatctgaatctttaggcattaactgtgaaaatgtctagtcagaatgtctttaaaatggcagcttctcttatcagtgtatttgtgctgagaaaaaaaaataagtatagcttctcagtttaccttctctgatccagggacaagaaagaagaaaatgaccactacctcttcttaataagaccccttgatctctacactctccagaaaaccacatcaggatttacctcacagggtggacaaatctgaaacattctaaataaaagtttgaaattccca

SEQ ID NO: 403835 - DNA, 1092 bp, Homo sapiens
aacttggtcggggcgcggatcccgagagggaaagtcataacaaccgcacgagggagttcgactggcgaactggaaggccacgcctcctcccgcctgccccctcagccctgtggctgggggcagagctcagactgtcttctgaagattgatgtctatttccttgagctctttaattttgttgccaatttggataaacatggcacaaatccagcagggaggtccagatgaaaaagaaaagactaccgcactgaaagatttattatctaggatagatttggatgaactaatgaaaaaagatgaaccgcctcttgattttcctgataccctggaaggatttgaatatgcttttaatgaaaagggacagttaagacacataaaaactggggaaccatttgtttttaactaccgggaagatttacacagatggaaccagaaaagatacgaggctctaggagagatcatcacgaagtatgtatatgagctcctggaaaaggattgtaatttgaaaaaagtatctattccagtagatgccactgagagtgaaccaaagagttttatctttatgagtgaggatgctttgacaaatccacagaaactgatggttttaattcatggtagtggtgttgtcagggcagggcagtgggctagaagacttattataaatgaagatctggacagtggcacacagataccgtttattaaaagagctgtggctgaaggatatggagtaatagtactaaatcccaatgaaaactatattgaagtagaaaagccgaagatacacgtacagtcatcatctgatagttcagatgaaccagcagaaaaacgggaaagaaaagataaagtttctaaagaaacaaagaagcgacgtgatttctatgagaagtatcgtaacccccaaagagaaaaagaaatgatgcaattgtatatcagagtgagtgagatcactactttcctttactattttctttaccttgtatatattttattatatgtagattgttttgtttttcttcaagaatattaatttctttatttgtcatcatttatttcccatggtcgtctacttggattaaatgggtttttaaattc

SEQ ID NO: 403836 - DNA, 665 bp, Homo sapiens
aacttggtcggggcgcggatcccgagagggaaagtcataacaaccgcacgagggagttcgactggcgaactggaaggccacgcctcctcccgcctgccccctcagccctgtggctgggggcagagctcagatttattatctaggatagatttggatgaactaatgaaaaaagatgaaccgcctcttgattttcctgataccctggaaggatttgaatatgcttttaatgaaaagggacagttaagacacataaaaactggggaaccatttgtttttaactaccgggaagatttacacagatggaaccagaaaagatacgaggctctaggagagatcatcacgaagtatgtatatgagctcctggaaaaggattgtaatttgaaaaaagtatctattccagtagatgccactgagagtgaaccaaagagttttatctttatgagtgaggatgctttgacaaatccacagaaactgatggttttaattcatggtagtggtgttgtcagggcagggcagtgggctagaagacttattataaatgaagatctggacagtggcacacagataccgtttattaaaagagctgtggctgaaaatggttctcctgaagaacatgcaatctatgttgggatcatttcatagctcaggctgctgctgagaatgtg

SEQ ID NO: 403837 - DNA, 991 bp, Homo sapiens
aacttggtcggggcgcggatcccgagagggaaagtcataacaaccgcacgagggagttcgactggcgaactggaaggccacgcctcctcccgcctgccccctcagccctgtggctgggggcagagctcagactgtcttctgaagattgatgtctatttccttgagctctttaattttgttgccaatttggataaacatggcacaaatccagcagggaggtccagatgaaaaagaaaagactaccgcactgaaagatttattatctaggatagatttggatgaactaatgaaaaaagatgaaccgcctcttgattttcctgataccctggaaggatttgaatatgcttttaatgaaaatcatcacgaagtatgtatatgagctcctggaaaaggattgtaatttgaaaaaagtatctattccagtagatgccactgagagtgaaccaaagagttttatctttatgagtgaggatgctttgacaaatccacagaaactgatggttttaattcatggtagtggtgttgtcagggcagggcagtgggctagaagacttattataaatgaagatctggacagtggcacacagataccgtttattaaaagagctgtggctgaaggatatggagtaatagtactaaatcccaatgaaaactatattgaagtagaaaagccgaagatacacgtacagtcatcatctgatagttcagatgaaccagcagaaaaacgggaaagaaaagataaagtttctaaagaaacaaagaagcgacgtgatttctatgagaagtatcgtaacccccaaagagaaaaagaaatgatgcaattgtatatcagagtgagtgagatcactactttcctttactattttctttaccttgtatatattttattatatgtagattgttttgtttttcttcaagaatattaatttctttatttgtcatcatttatttcccatggtcgtctacttggattaaatgggtttttaaattc

SEQ ID NO: 403838 - DNA, 968 bp, Homo sapiens
aacttggtcggggcgcggatcccgagagggaaagtcataacaaccgcacgagggagttcgactggcgaactggaaggccacgcctcctcccgcctgccccctcagccctgtggctgggggcagagctcagatttattatctaggatagatttggatgaactaatgaaaaaagatgaaccgcctcttgattttcctgataccctggaaggatttgaatatgcttttaatgaaaagggacagttaagacacataaaaactggggaaccatttgtttttaactaccgggaagatttacacagatggaaccagaaaagatacgaggctctaggagagatcatcacgaagtatgtatatgagctcctggaaaaggattgtaatttgaaaaaagtatctattccagtagatgccactgagagtgaaccaaagagttttatctttatgagtgaggatgctttgacaaatccacagaaactgatggttttaattcatggtagtggtgttgtcagggcagggcagtgggctagaagacttattataaatgaagatctggacagtggcacacagataccgtttattaaaagagctgtggctgaaggatatggagtaatagtactaaatcccaatgaaaactatattgaagtagaaaagccgaagatacacgtacagtcatcatctgatagttcagatgaaccagcagaaaaacgggaaagaaaagataaagtttctaaagaaacaaagaagcgacgtgatttctatgagaagtatcgtaacccccaaagagaaaaagaaatgatgcaattgtatatcagagtgagtgagatcactactttcctttactattttctttaccttgtatatattttattatatgtagattgttttgtttttcttcaagaatattaatttctttatttgtcatcatttatttcccatggtcgtctacttggattaaatgggtttttaaattc

SEQ ID NO: 403839 - DNA, 437 bp, Homo sapiens
tgaaaattgaaatggattataagatttaaattatgctaccttctttcatttcaaaacaggaaggatatggagtaatagtactaaatcccaatgaaaactatattgaagtagaaaagccgaagatacacgtacagtcatcatctgatagttcagatgaaccagcagaaaaacgggaaagaaaagataaagtttctaaagaaacaaagaagcgacgtgatttctatgagaagtatcgtaacccccaaagagaaaaagaaatgatgcaattgtatatcagagtgagtgagatcactactttcctttactattttctttaccttgtatatattttattatatgtagattgttttgtttttcttcaagaatattaatttctttatttgtcatcatttatttcccatggtcgtctacttggattaaatgggtttttaaattca

SEQ ID NO: 403840 - DNA, 378 bp, Homo sapiens
gagctgggttcctggaggccagggacttgaggattcagttcagaattgaaccaaggttggaaaaagaatctggaacatacagaagtcagttaggaaagaaatcccgtcagttttcacccccttttctttagaagctggcctcggtacttccatggggcaggaattgtatttttgtgtcctccaccatctcttctgtctagaaatctccgtctcatcctctgggagcggccacaggaacacagccacccccgggagaggcttgcagtctctctgccctccataccccccggctgctgcctcgccgtgttcctggcctgcagcaggcctccagtgaggctgtgaaccggccagacctggggctcccagagtctggtcagg

SEQ ID NO: 403841 - DNA, 579 bp, Homo sapiens
aaaagtgggtatttggacacatgatattcgcacatgagtgtctcagaaaaataagcagaacttatatgaatagaccttttatagtattttaaaaataagaaaccatatttttctgcttgctgaatataataaaaactattattttaaatgaacatccttcctctcaaaatccacactatatggattcatactacatactagatatagatagaaaaaaggctcacaaaaatcactgtaaatttaacttaactgttttctaaggtaaaccaatcttattaataaacaaaattgcatttgtatagctgcttctttcctacttccttattgactgtgctttatactataatgggcttatttaaaacattttcctagaagttcaaaatttactgagtcaatctttctatatgtcaatgaggaaatggagttagataaacaatttaatctgtgctataaaatcatagtgctttggaaactggatatctttgcataaagcaagcattccatgtcttaagtttgtgatttgctcggcctctagcctttctggtagatctgactataagacataaactgtatagtcag

SEQ ID NO: 403842 - DNA, 314 bp, Homo sapiens
tgctgggtatgccaagaatgcaaggccctaaccattttttacctgggtcatttctcagagttgtgtttgcagtgatcaaccctgaaggttgaggtaatatctccctccaggacaaaaagcaatctggcttactttctgctgtgaaacagtaggaccctcaagctcagtgttcctctcctataacactacccaccctgtgtccaggcagccatctgtgcccatttgtattacccctcatggggcttgagggcaggaaacagaaatgatgctcatactgactgctgtgctgcaaataataaagttcattgtttcta

SEQ ID NO: 403843 - DNA, 365 bp, Homo sapiens
cagatttgaaaagcttgaccaatagggactgcttagcttggtcagcagaatggccccaaggtggccctgcgtgtgttgtgatacgtgcgggtggaggccatccatatggctctggcagtgcttggtgagggcagcactgcccttggaccctggcaagtggcaccccaggccctgcattctgatggccgcatgctggtctctgctggccatgccaacccccacaggggcaaggggcctatggagccagcacacacccacctcccagtccgcaggcccctcccaggcctgcttccccaggggacctcttggtgcctgcgtgagtgtccctgggcctgaaatgtggccgagtagtggccacctgccaa

SEQ ID NO: 403844 - DNA, 468 bp, Homo sapiens
agaggaggacatatgtgaggatatagtgattgactgatgtgagaaatgtggagggaatatcatcgtgtcccatcccatcgttttacagatgaggaaactgaggcccagaaaggtgacagagctaagaccagagtccctgctttctaactcgagacagttcttcttcttgtcctttgactaactcacctgaacagtcaccagatagcaccagcattccagcctgcctaccctgcttcacccacgcctactgcctctgaagaaagggaagaatctgtgtccatcagaacatgccggggataccaggacaccagcctgctgcccaacctggctgacccgtctgctcacggaccctgtcttaatgacagaagccactccaagagttcactgtgtcctgcagtagccagttaaattcatgtaaatcctgtttgggcagtcagtggaatttttaatactcttctcctttaaaaa

SEQ ID NO: 403845 - DNA, 437 bp, Homo sapiens
gtacatccaaaggtttattgtgaaatatctctctatacactataagtgtctctagggtaggtaaaatgagttattcatcctttatactcaggttgatttgttctctttcactagcatgtctacatatttaactgttccagtaaattttaaattaccaagtcgtacttttttaaagagagttttcagttgtccccataaaaccatctgtaggaggttacctcaaaattaacccttagactcccagggtatttgagatggtcagcccccacttagaatcccatggtgtttgagatggtcggccccctctttgccctgtcctggcgttttatggtggagagctctaactcggctaactctgagagagccgaaggaaagtgccttgtcctttgtttcagagagcagaaggccagaaataaaccccgtgttttcttccttca

SEQ ID NO: 403846 - DNA, 445 bp, Homo sapiens
gttgatcctacaacaacacactttcctaaggatgatgacaactcgcatcacccctagaacggctggtatgaaccgagtttccacacagtctggctggcattgcagtcaggagatgtttggctacttcacatgttttgaacactagtaaatcttaagcttcctgagtcgagaagggagagaaatgcatgcacgtgatccactggcctgtgtgggattccttgtggcatctgaaggccgtgattcaaaggtcccctgacaaccttcccataaatgaaccaactgatcctcacaactggagagagaattaacaccttccatgggacaaagaaaaagcacattctggcctgctggcaagtcacctgtcgtttccagctcatcttcatcgctctgtattcctactctttagtaaatatgaactattaaaagcttctatgagatgcgctat

SEQ ID NO: 403847 - DNA, 285 bp, Homo sapiens
caggaagagttagcacaatgagttaatgaaattttgtcactgtataaatggctccagtttttttttcttatttctctaagataagggtatagggaggttctagattgtaaggatgtcagttaggggaaaaggagatgaaaacagtggatatcagagattctgaaactagatatttttcccaggattgtccttctaggtaatttgaattcagaacttgacacaaagcaggatagttgtgccaagtggctttacgggtgtgcacttgcaatagcaacaaatttattt

SEQ ID NO: 403848 - DNA, 352 bp, Homo sapiens
agttgaggctgaacccaggcacagtcgcaacccggcccggtttgtgcaagctcagggcagtgctgacgtgccagccccctgccacctccgccccctccagactttcggcagtgacgagcacaagagggaggttgaggtgggtctaagagtggctcagcactggcctgaaggcactcctcagctcgaacagcctcagcaatgtgggcacagctaaccacagtgcgtctctctcagctgctgagagctgaacagacgttgggatgacctgccaacagaaaggagttacccactgcagttctcctctgagctgtactgttgctcaataaagcacctcttcaccttgctcaccttc

SEQ ID NO: 403849 - DNA, 496 bp, Homo sapiens
atttctgaagtttgtttaggaaacaagtatgtgactaccttcctaagagctgactggttttttgaggcctggattgtgtgtgtatgtgcttatgtgtgtgttataaaatggaatcaactataccaggttaaacaaatggacaagtcatggaaaagacacagctctgtttggacattaataagggcgggtgtggaagctggaaagctgagatgccggaaggctcagtgcttagtaggcccggaaaagcaatttttgaactggcatctcattccccttttctaagacaggaaggacggtcagagatgattccaacatgaggactttgctagttgcagtgtctgactcctcccattctcatagcagttttgcacagtagttttggtttgtgtgtatgttttaggcaatgtgacaaagcagttttcctcctgcctccttgagaaatttaatcctgacaggttctttaagaaatcagcttgatgtgggctgattttaaaag

SEQ ID NO: 403850 - DNA, 350 bp, Homo sapiens
tgggtccaatgctgggtcattcttgctgcttggcagactgagtgcctgccttgactcccatcctcacaaggctagtgcagcctgcccttttctctttgtgcaccttgcctccctcctccccacccctccactagccgagcagacacctgacttggggcaaatgttaaatacagtctgcatgtagggctggcactgcctggactgtcactatatcctggactgtcactgtctgtcactgaaagctgttattttcctgagcattttagtattttaataaaatgtcatttgaattaaaccatttttagatggaaaattgagatattttcttgacttgctttaaaaaaaagaaa

SEQ ID NO: 403851 - DNA, 480 bp, Homo sapiens
actttgggtaaagcttctcttctaaattccagcccattgcagaccagcacaatcctctttcctggatccccattccgcagggacactctccctatgaaaagaagattccagggaaaaatccttcctcctgcacaagggccaccatgagtgagtttgccctgctaagccgtgggcttgacttcttgagaagcacatgcagaactcagttgaggccatgagccggggaaaatggtgaatctcggaagagaagtcctatgcctgccttagcactgagctgtgcacttctgagagtgagaggagacaccatcaataattgtcttgggacaactggaataaacagtgactgcccagagaactacgatatttgaaatcttatttcttgatgaatattcatcctgacttctttcctgaaatgctgtttgcaaagagagtgacttatatgtaagtagagcgttttattaaagcaagacttaatacaga

SEQ ID NO: 403852 - DNA, 513 bp, Homo sapiens
aggtgcgagtgggggtgagtctccctcaggcttggctgggtctgacaatccgagtatgccgtgatattgatagcgacaggaggcagccaaatgcctaggtagataggggcaggtccctggtgaaacctcacctccaagctgaagagtttaaagcctgaaagtcaagttgcaagttaaatccttgggctggattgagaatttatatttggcgtgctttcctctgattggtcctcgcacttcacctattttacatatacctactctttcctaattggttttctatactgttgggcccacctttgagtgatgtctttgctttaatcttttttgcatactcacaaaccaatcagcacacactccccattctgagtccataaaaccctatggacataaaagacaccagcccagccacatggggaatgttcctgcctttgggtagggggaacaaccccgtgtcctctctctgctgaaagccgttttcatcactcaataaaattattctctgccctcctc

SEQ ID NO: 403853 - DNA, 420 bp, Homo sapiens
ctacctatagcatctagatagttaatgaaaagtatgtttagatttgaagatgattatgaatcagataatttaaattttccataaaattactaacaggctgatgcattttaaacttgtctttagaaattagtagcttactgccaagcacagtggctcatgcctataatcccagcactttgggaggccgaggcaggtggatcacttgaggtcaggagttcaagactagcctggccaatatggtgaaaactcatctctattaaaaatacaaaaattagccaggcgtggtggcacacgcctataatcccagctactcaggaggctgaagcaggaaaatcacttaagcctgggaggtggagattgcagagatcgtgccattgccctccagcctgggagacagagcaagactctgtctcaaaaaca

SEQ ID NO: 403854 - DNA, 430 bp, Homo sapiens
gggagtggtacaatatttttcaagtgatgaagcaagactatcaacccagaatcctctactcagtaaaaatatattataggctagagggagaaatcaaaacattctcaaatgaagaaaaactaagcaaaactttttccaacatacatacctcaaaagaatggctaaaagaaattttctaaatagaaagataatggtaaaagaggaaaccacagaaaagcgggaacaaacaaaaaaaggtagttaagcaaaaatatgggaaaatacaataggcttcctttgtcttgagttgtctaaattatgtttgacacctgaagcaaggatatagctgtctgacatgattctaaatgtgtgtacaggaaacactgtaagatgattatattacaaatggggtaaagagccataaaggaggtaagacttctacacttcactc

SEQ ID NO: 403855 - DNA, 728 bp, Homo sapiens
agcctgactaacgtggtgaaaccctgtctgtactaaaaatacaaaaattagccgggcatggtagcgtgcacctgtaatcccagctacttggaaggctgaggcaggagaatcacctgaacctgggaggcagaggttgtggtgagctgagatcgtgccattgcattccagcctgggtgacagagcaagactatctaaaaaaaaaaaataataataataataataataataataaaatagggaaaaataacttttattataaactactcacttaagaattccctagtcaaaaaccagtacctgttttggttgggctccggctctgatatgctgctggtgtgtgctggtttggcatccatctggtcattctggcatctgctgtattcatagttgaacaactttaaaatcaccctgctcagatcctcactaaattcccctctctcagacttaggaatatgaactcttgatctccaaggagggcctccttaaagtcagattgttataggttgtttctgctttatgaataaataatcatccccccctggataaggaatctgtaccaggttagtatagatatgccactgatggaaaacaaaagttggcaagtaaagttatcaagtctcagattcaataaagctcttattttgattgagttctagatggtattaagtacttatacaaatttaaaatatcaggtctgaaagacttccaggaagaaaagaaatggaaaa

SEQ ID NO: 403856 - DNA, 783 bp, Homo sapiens
agcctgactaacgtggtgaaaccctgtctgtactaaaaatacaaaaattagccgggcatggtagcgtgcacctgtaatcccagctacttggaaggctgaggcaggagaatcacctgaacctgggaggcagaggttgtggtgagctgagatcgtgccattgcattccagcctgggtgacagagcaagactatctaaaaaaaaaaaataataataataataataataataataaaatagggaaaaataacttttattataaactactcacttaagaattccctagtcaaaaaccagtacctgttttggttgggctccggctctgatatgctgctggtgtgtgctggtttggcatccatctggtcattctggcatctgctgtattcatagttgaacaactttaaaatcaccctgctcagatcctcactaaattcccctctctcagacttaggaatatgaactcttgatctccaaggagggcctccttaaagtcagattgttataggttgtttctgctttatgaataaataatcatccccccctggataaggaatctgtaccaggttagtatagatatgccactgatggaaaacaaagtgtgtttacctcagaagctacttttaaacaagacaggatggttattccatagacagttggcaagtaaagttatcaagtctcagattcaataaagctcttattttgattgagttctagatggtattaagtacttatacaaatttaaaatatcaggtctgaaagacttccaggaagaaaagaaatggaaaa

SEQ ID NO: 403857 - DNA, 227 bp, Homo sapiens
taaaaagtaaaatgttgaaaattcaaatacaacgcaggagatggctatatgtatttctgttcatacggctttattaatttggttaaaaatttcattattggccaggagcgtgtctcatgtctgtaatcccggcactttgggaggcagaggtgggagcatcgcttgagtccaggagttggagaccagtttaggcaacagagcgagaccccagtctctacaaaaagttt

SEQ ID NO: 403858 - DNA, 357 bp, Homo sapiens
taaacaagagttaagaaagatttaagaacgattaataaaacaagcaagataattatttaccccattattccagttcacagtcatgagtggctggagcagctcagggcacaaagtgggaacctgccctggccaggatgccatttcattgcaggctgcactcacacccacactcactcagactatgacaatttagacacaccagttcacctaaggtgcacatctttgagatgtgggaggaaaccagagtacctggagaaaacccatgcagacatggggagaaagtacaaactccacacacagtggcccggactgggaatccccccgcctttatttttcctcatcaacattataaaaaaa

SEQ ID NO: 403859 - DNA, 618 bp, Homo sapiens
gggatgttcattctaggccctttattacatagcaccctttgaattaaaagttagttgtttactgggtatatttttattgttactttctgattggcttttagtgtgtatttatgtgtgagtttcagagtagggatgtattgattcttaatagggacacttttaaaacattctagaaaaaacaaggggaaaaaagtacaccatagatgcagataggttgagatcacttacattggtaaatgtctctaagtctaaacgctaatactacaaaaaatcctttgcgtagcttccctctctctctgtctccctctttctctttcaatctctctctcagtggaagtccccagtgcaagttgcatgaataatggaaagcaatgatactaatgctactttgtacaaagtaaagcctcataacagtaactattgttcagtgatttaactagctccatggcagtaggtcattcaaatagcaattcttcccccaccagaatgactccattgctcaccattctgaaatatatagagtagttgttttatatagctattggtcctaacttagagacttgtattagaaaacatggagaatcttaaataatagaggaagaagagaagagaagggag

SEQ ID NO: 403860 - DNA, 558 bp, Homo sapiens
aaacctattgcactgccagttaaatacgagtataacacaattatatatagtatatgatacttaataacaaatgactatgtcactagtttatgtatttactatgctatttttctttattttaaagggtacgctttctacttaaaaaataaacttaaccgtaaaacaactttaggcaggtccttcagggaggtattccaaaagaaggcattgttacaggatatgacacctctatgtgtgttattgcctctcagcaactttcagtgggaggcccatgtggtggctcatacctgtaatccctgccctttcggaggccaaggtgggaggatcccttgaggcaggagttcaagaccagcctgggcaaggtagcaagaccctgtctctacgaatcaattttttaaaaaactagtcaggcatggtgacacatgcctgtagtcctagctacttggaagattgaggcaggagtatcacttgatcccaggagttccaggttgcagtgagctttagtcacgccactgcactccagtgtgtgtgacagagtgagaccctgtcaaaaaaaaa

SEQ ID NO: 403861 - DNA, 473 bp, Homo sapiens
attttatgaaaactttagtataacacactacttagtttggacttgaaatcaacttattatgatgcttaaaaaaatccatgttctaaatcataattgcatgacagtttagatcttattactatttagttgtagcctaacaaatactgtattcctctgttttctcaaaaaaaaaagttcctagtttatgaaatagtattcagataaagccttatgctgcccaccagcccactaaatgtattaaatacctgtctctatgtagcttatgtaaaaactcaatgttgactgtcccatgtctgctgcatttaaaagctcattgtgattctatcatcttgctatgccaatgccttatgttatggtgtcgtgtatataggccatggtacaaaagtgactgtcaactgcttactcaacatctagtcagaaaaggtctgaggcagtgcaataacgcttttagtcaaactggctcactgttggaa

SEQ ID NO: 403862 - DNA, 374 bp, Homo sapiens
gctattgggctttttctgggtagatactccttattagggatagagatcttcaaacatttttgcttattatactgatttaaaggattttgaaacatcatataccctcttgcatatttttgaagttgactttatatctaaaatttttcattgtaagtttaaattgttacaaagaatagacattctgggatatacaatatagtgacatttgaaaataaagctgttggctgggcccagtagctcacgcctgtaatcccagcactttgggaggccgaggcaggtggattgcttgagtttaggagtttgagatcagtctgggcaacatggtgaaaccctgtctctatttctaaaattttttttaaataaatttttttaaa

SEQ ID NO: 403863 - DNA, 473 bp, Homo sapiens
gcattcccagcctgtcctcctctcctctccgggctctcctctggggctccttctgctctccatcatatgttcatccagtcagtcagtccccagatccttaagtggctctgctaccagccaggtaccacactgaacacagagttcagcttcccaaaccagaggccccagctggaaacctcagaggtccccagctccttcaacctggtgagtcctacttgggccctcccatctgctctccaacccacctccacttacccagctcctccccataccatcccctacttccactccctctctctacctgcctcaggcttctcctcactccacgcaacccctgcctgcccagctgagcactcaagcccaccctgctggctgctgtggacccatctttagtctagctgccctgggccccgaggcttccccagccccactcctcactgctcaccccaccccacgccccatcatccagcaaa

SEQ ID NO: 403864 - DNA, 373 bp, Homo sapiens
acttcttgtgcccctttagaaccacacccacccctgccttccaactattaatgctggcaggacttagccagaccgcaagggcgcctactccgaacaaggaagagggtcaggcgctgggagggcgactgcaagcggacaggcagcacctgcgaccacggtacttggggacaccacaaaagtccgcagagcaggcatcccggcacttccgcgagcccgcaggccctgcccctttcgccgtcgccgaccaattgccgcccgaagaccgaacgcttcagcggagggccggaagtgagccgcagcttttcctttctgccaccgccttgtccaagatgcggacctccaccgccagctgcaggagtacctggcgcatggg

SEQ ID NO: 403865 - DNA, 1382 bp, Homo sapiens
cgaagggaccgtctctgccaagcgcctgttggtaggaacctgcttggtcgcgtctgagggggcttgtaggtggctctggctgaaacaggcgcctgcgagagtctgtaggagggaaaccgccatggacgatcagggttgccctcggtgtaagaccaccaaatatcggaacccctccttgaagctgatggtgaatgtgtgcggacacactctctgtgaaagttgtgtagatttactgtttgtgagaggagctggaaactgccctgagtgtggtactccactcagaaagagcaacttcagggtacaactctttgaagatcccactgttgacaaggaggttgagatcaggaaaaaagtgctaaagatatacaataaaagggaagaagattttcctagtctaagagaatacaatgatttcttggaagaagtggaagaaattgttttcaacttgaccaacaatgtggatttggacaacaccaaaaagaaaatggagatataccaaaaggaaaacaaagatgttattcagaaaaataaattaaagctgactcgagaacaggaagaactggaagaagctttagaagtggaacgacaggaaaatgaacaaagaagattatttatacaaaaagaagaacaactgcagcagattctaaaaaggaagaataagcaggcttttttagatgagctggagagttctgatctccctgttgctctgcttttggctcagcataaagatagatctacccaattagaaatgcaacttgagaaacccaaacctgtaaaaccagtgacgttttccacaggcatcaaaatgggtcaacatatttcactggcacctattcacaagcttgaagaagctctgtatgaataccagccactgcagatagagacatatggaccacatgttcctgagcttgagatgctaggaagacttgggtatttaaaccatgtcagagctgcctcaccacaggaccttgctggaggctatacttcttctcttgcttgtcacagagcactacaggatgcattcagtgggcttttctggcagcccagttaaccatttataagatttggaccttggagctgaaccagggagctagcaaaagtaaagcagacttataaaattatagctatgtgcagctgcacaacacagtccttccactagcagctgtgttaaagtatttataaggagaaaatttcagaactaagttgagtaatataggggatatatatttgtgaaaaataatttttacttatatttttcagaggatttgacacgataagcctcatctgatggaagagaggaataaataattcacctatatgtgtttgaggttgtgacagacttataaaatctttttaaaaaataaagctataatttatattaa

SEQ ID NO: 403866 - DNA, 717 bp, Homo sapiens
cgaagggaccgtctctgccaagcgcctgttggtaggaacctgcttggtcgcgtctgagggggcttgtaggtggctctggctgaaacaggcgcctgcgagagtctgtaggagggaaaccgccatggacgatcagggttgccctcggtgtaagaccaccaaatatcggaacccctccttgaagctgatggtgaatgtgtgcggacacactctctgtgaaagttgtgtagatttactgtttgtgagaggagctggaaactgccctgagtgtggtactccactcagaaagagcaacttcagggtacaactctttgaagatcccactgttgacaaggaggttgagatcaggaaaaaagtgctaaagatatacaataaaagggaagaagattttcctagtctaagagaatacaatgatttcttggaagaagtggaagaaattgttttcaacttgaccaacaatgtggatttggacaacaccaaaaagaaaatggagatataccaaaaggaaaacaaagatgttattcagaaaaataaattaaagctgactcgagaacaggaagaactggaagaagctttagaagtggaacgacaggaaaatgaacaaagaagattatttatacaaaaagaagaacaactgcagcagattctaaaaaggaagaataagcaggcttttttagatgagctggaaagagagagagagatctcttcttcctcctggta

SEQ ID NO: 403867 - DNA, 859 bp, Homo sapiens
cgaagggaccgtctctgccaagcgcctgttggtaggaacctgcttggtcgcgtctgagggggcttgtaggtggctctggctgaaacaggcgcctgcgagagtctgtaggagggaaaccgccatggacgatcagggttgccctcggtgtaagaccaccaaatatcggaacccctccttgaagctgatggtgaatgtgtgcggacacactctgtggatgattcaagagagagacaaacagaagccacgatgtcttctatgaacatcattcagacaccatcgtttctgctgcattctgtttgttcagagtcctaaatacagctcacattcagaggaaggggaattgggcttccccttttgatgaaagaagtataaagaatttgtggccatatgtaaaaccacaccaaccacatatgtatatttatcactggaataccttgaatccaagagggctcccagtgatttttgtctcctactttttatgtccttgcttagtttctccctgattgtatcagggttgcttgtataaccaatcgaatatggtagaagtttctcatttccaaggctaggtctttaacaaagactttgtggctttccatgtggttactctctatgttcttgggcaacttgctgtcatgaaagacagtttatgtgtcgtcagcagccttatgaagttccgtgtggttaagaactgagaccttctactaaccgccaagtcagtgagccatcttagtcttcagtcccagtcctgtcttcagatgactgcagccccagctgatatcttgacaaataagctgctcctggattcctgacactgagaaattttgtgagataataaattgtttattgttttaagctgtca

SEQ ID NO: 403868 - DNA, 1155 bp, Homo sapiens
cgaagggaccgtctctgccaagcgcctgttggtaggaacctgcttggtcgcgtctgagggggcttgtaggtggctctggctgaaacaggcgcctgcgagagtctgtaggagggaaaccgccatggacgatcagggttgccctcggtgtaagaccaccaaatatcggaacccctccttgaagctgatggtgaatgtgtgcggacacactctttttcaacttgaccaacaatgtggatttggacaacaccaaaaagaaaatggagatataccaaaaggaaaacaaagatgttattcagaaaaataaattaaagctgactcgagaacaggaagaactggaagaagctttagaagtggaacgacaggaaaatgaacaaagaagattatttatacaaaaagaagaacaactgcagcagattctaaaaaggaagaataagcaggcttttttagatgagctggagagttctgatctccctgttgctctgcttttggctcagcataaagatagatctacccaattagaaatgcaacttgagaaacccaaacctgtaaaaccagtgacgttttccacaggcatcaaaatgggtcaacatatttcactggcacctattcacaagcttgaagaagctctgtatgaataccagccactgcagatagagacatatggaccacatgttcctgagcttgagatgctaggaagacttgggtatttaaaccatgtcagagctgcctcaccacaggaccttgctggaggctatacttcttctcttgcttgtcacagagcactacaggatgcattcagtgggcttttctggcagcccagttaaccatttataagatttggaccttggagctgaaccagggagctagcaaaagtaaagcagacttataaaattatagctatgtgcagctgcacaacacagtccttccactagcagctgtgttaaagtatttataaggagaaaatttcagaactaagttgagtaatataggggatatatatttgtgaaaaataatttttacttatatttttcagaggatttgacacgataagcctcatctgatggaagagaggaataaataattcacctatatgtgtttgaggttgtgacagacttataaaatctttttaaaaaataaagctataatttatattaa

SEQ ID NO: 403869 - DNA, 1033 bp, Homo sapiens
aaggagactaacagctgctgaccctcagaccacatagacaactgtctgcctagaatgtcagtttgtttctttcaagataacccgcatctggacttcccctagttgatgaatgaaggttaggtctacctggccaggtagacctaacaccaaaaggaaaacaaagatgttattcagaaaaataaattaaagctgactcgagaacaggaagaactggaagaagctttagaagtggaacgacaggaaaatgaacaaagaagattatttatacaaaaagaagaacaactgcagcagattctaaaaaggaagaataagcaggcttttttagatgagctggagagttctgatctccctgttgctctgcttttggctcagcataaagatagatctacccaattagaaatgcaacttgagaaacccaaacctgtaaaaccagtgacgttttccacaggcatcaaaatgggtcaacatatttcactggcacctattcacaagcttgaagaagctctgtatgaataccagccactgcagatagagacatatggaccacatgttcctgagcttgagatgctaggaagacttgggtatttaaaccatgtcagagctgcctcaccacaggaccttgctggaggctatacttcttctcttgcttgtcacagagcactacaggatgcattcagtgggcttttctggcagcccagttaaccatttataagatttggaccttggagctgaaccagggagctagcaaaagtaaagcagacttataaaattatagctatgtgcagctgcacaacacagtccttccactagcagctgtgttaaagtatttataaggagaaaatttcagaactaagttgagtaatataggggatatatatttgtgaaaaataatttttacttatatttttcagaggatttgacacgataagcctcatctgatggaagagaggaataaataattcacctatatgtgtttgaggttgtgacagacttataaaatctttttaaaaaataaagctataatttatattaa

SEQ ID NO: 403870 - DNA, 1504 bp, Homo sapiens
cgaagggaccgtctctgccaagcgcctgttggtaggaacctgcttggtcgcgtctgagggggcttgtaggtggctctggctgaaacaggcgcctgcgagagtctgtaggagggaaaccgccatggacgatcagggttgccctcggtgtaagaccaccaaatatcggaacccctccttgaagctgatggtgaatgtgtgcggacacactctctgtgaaagttgtgtagatttactgtttgtgagaggagctggaaactgccctgagtgtggtactccactcagaaagagcaacttcagggtacaactctttgaagatcccactgttgacaaggaggttgagatcaggaaaaaagtgctaaagatatacaataaaagggaagaagattttcctagtctaagagaatacaatgatttcttggaagaagtggaagaaattgttttcaacttgaccaacaatgtggatttggacaacaccaaaaagaaaatggagatataccaaaaggaaaacaaagatgttattcagaaaaataaattaaagctgactcgagaacaggaagaactggaagaagctttagaagtggaacgacaggaaaatgaacaaagaagattatttatacaaaaagaagaacaactgcagcagattctaaaaaggaagaataagcaggcttttttagatgagctggagagttctgatctccctgttgctctgcttttggctcagcataaagatagatctacccaattagaaatgcaacttgagaaacccaaacctgtaaaaccagtgacgttttccacaggcatcaaaatgggtcaacatatttcactggcacctattcacaagcttgaagaagctctgtatgaataccagccactgcagatagagacatatggaccacatgttcctgagcttgagatgctaggaagacttggatggagtctcgctctgtcgcccaggctggagtgcagtggcgtgatcttggctcgctgcgacctccacctcccgggttcaagcgattctcctgcctcagcctcctgagtagctgggattacaggtatttaaaccatgtcagagctgcctcaccacaggaccttgctggaggctatacttcttctcttgcttgtcacagagcactacaggatgcattcagtgggcttttctggcagcccagttaaccatttataagatttggaccttggagctgaaccagggagctagcaaaagtaaagcagacttataaaattatagctatgtgcagctgcacaacacagtccttccactagcagctgtgttaaagtatttataaggagaaaatttcagaactaagttgagtaatataggggatatatatttgtgaaaaataatttttacttatatttttcagaggatttgacacgataagcctcatctgatggaagagaggaataaataattcacctatatgtgtttgaggttgtgacagacttataaaatctttttaaaaaataaagctataatttatattaa

SEQ ID NO: 403871 - DNA, 1700 bp, Homo sapiens
aatgtttttgtttttgttcaataaatattctcttcttccttccgctttcccctttcgcccttggcagagaagcaaataattgagttaaaaccttgatttgtggcaatgtgaataaattatagctaattccaggaacttagctgcatcctaccttgacccattttttctactggactcttatattgctctatatgttttagctacacaggtttattaaacatggatacagatgaaaaacagacttgttatgttagaagttataagttgctcatgcattaagattttgacacacaggaagtttgaatgaatgagtgaaaaaggttccaagttattaaaatgttctggtacctgatttattcatttgccataccagtaattctaaggtgggtgaagctcctttacttcctgaagaaacaagttagtttcttaaactaagcattaaaagaaagctggaattatttgtttccagaagtgttagtagtcatgctaagttgcccttctttggctagattgtccaatttttttttaggcctgttttgtctatttttgtcaagatataaatgtttaattgctttaaaaaaactgtgtggttgcagaaaaaaattgtactgttatattgttgagatcaatgagacttttctgtatttactttttcagacattattttgaactcaggctcagtctcagagatttcttcaacatgtaattttctaatgtttcctttcctgcaaggaatgagacaatatattcttggaatattaaagtacttttgaagtaactcatacgttttctcccctcttccatttgtttagctattgagggtttgctttaaaacaaatttatgtagaaatatcagtactataatagtattgtgatactgtgtatttcttaagcatatgccaggaaggagagcattagttaggtgtccaaaaaacagccaacaaaacaaatcagctctgaaaatcgtgaagcagtgaatattttagaattatttttgaaacctctttcagaactgtttttagaccccgtggtaatttgctatgtaatttaatactagtttaggcactccatgtacagttggtatgtttccttttgaaagataataatctatttataataaaagtctgaatatttcaatctcggaattcctctttaaaacttgaatcagttttactattgctttttaaaatgttacctatttatatttgctttgtatatcaatgctacacttcttgttttgttttaggtgtatttaaaccatgtcagagctgcctcaccacaggaccttgctggaggctatacttcttctcttgcttgtcacagagcactacaggatgcattcagtgggcttttctggcagcccagttaaccatttataagatttggaccttggagctgaaccagggagctagcaaaagtaaagcagacttataaaattatagctatgtgcagctgcacaacacagtccttccactagcagctgtgttaaagtatttataaggagaaaatttcagaactaagttgagtaatataggggatatatatttgtgaaaaataatttttacttatatttttcagaggatttgacacgataagcctcatctgatggaagagaggaataaataattcacctatatgtgtttgaggttgtgacagacttataaaatctttttaaaaaataaagctataatttatattaa

SEQ ID NO: 403872 - DNA, 1641 bp, Homo sapiens
aatgtttttgtttttgttcaataaatattctcttcttccttccgctttcccctttcgcccttggcagagaagcaaataattgagttaaaaccttgatttgtggcaatgtgaataaattatagctaattccaggaacttagctgcatcctaccttgacccattttttctactggactcttatattgctctatatgttttagctacacaggtttattaaacatggatacagatgaaaaacagacttgttatgttagaagttataagttgctcatgcattaagattttgacacacaggaagtttgaatgaatgagtgaaaaaggttccaagttattaaaatgttctggtacctgatttattcatttgccataccagtaattctaaggtgggtgaagctcctttacttcctgaagaaacaagttagtttcttaaactaagcattaaaagaaagctggaattatttgtttccagaagtgttagtagtcatgctaagttgcccttctttggctagattgtccaatttttttttaggcctgttttgtctatttttgtcaagatataaatgtttaattgctttaaaaaaactgtgtggttgcagaaaaaaattgtactgttatattgttgagatcaatgagacttttctgtatttactttttcagacattattttgaactcaggctcagtctcagagatttcttcaacatgtaattttctaatgtttcctttcctgcaaggaatgagacaatatattcttggaatattaaagtacttttgaagtaactcatacgttttctcccctcttccatttgtttagctattgagggtttgctttaaaacaaatttatgtagaaatatcagtactataatagtattgtgatactgtgtatttcttaagcatatgccaggaaggagagcattagttaggtgtccaaaaaacagccaacaaaacaaatcagtgtttttagaccccgtggtaatttgctatgtaatttaatactagtttaggcactccatgtacagttggtatgtttccttttgaaagataataatctatttataataaaagtctgaatatttcaatctcggaattcctctttaaaacttgaatcagttttactattgctttttaaaatgttacctatttatatttgctttgtatatcaatgctacacttcttgttttgttttaggtgtatttaaaccatgtcagagctgcctcaccacaggaccttgctggaggctatacttcttctcttgcttgtcacagagcactacaggatgcattcagtgggcttttctggcagcccagttaaccatttataagatttggaccttggagctgaaccagggagctagcaaaagtaaagcagacttataaaattatagctatgtgcagctgcacaacacagtccttccactagcagctgtgttaaagtatttataaggagaaaatttcagaactaagttgagtaatataggggatatatatttgtgaaaaataatttttacttatatttttcagaggatttgacacgataagcctcatctgatggaagagaggaataaataattcacctatatgtgtttgaggttgtgacagacttataaaatctttttaaaaaataaagctataatttatattaa

SEQ ID NO: 403873 - DNA, 1221 bp, Homo sapiens
cgaagggaccgtctctgccaagcgcctgttggtaggaacctgcttggtcgcgtctgagggggcttgtaggtggctctggctgaaacaggcgcctgcgagagtctgtaggagggaaaccgccatggacgatcagggttgccctcggtgtaagaccaccaaatatcggaacccctccttgaagctgatggtgaatgtgtgcggacacactctctgtgaaagttgtgtagatttactgtttgtgagaggagctggaaactgccctgagtgtggtactccactcagaaagagcaacttcagggtacaactctttgaagatcccactgttgacaaggaggttgagatcaggaaaaaagtgctaaagatatacaataaaagggaagaagattttcctagtctaagagaatacaatgatttcttggaagaagtggaagaaattgttttcaacttgaccaacaatgtggatttggacaacaccaaaaagaaaatggagatataccaaaaggaaaacaaagatgttattcagaaaaataaattaaagctgactcgagaacaggaagaactggaagaagctttagaagtggaacgacaggaaaatgaacaaagaagattatttatacaaaaagaagaacaactgcagcagattctaaaaaggaagaataagcaggcttttttagatgagctggagagttctgatctccctgttgctctgcttttggctcagcataaagatagatctacccaattagaaatgcaacttgagaaacccaaacctgtaaaaccagtgacgttttccacaggcatcaaaatgggtcaacatatttcactggcacctattcacaagcttgaagaagctctgtatgaataccagccactgcagatagagacatatggaccacatgttcctgagcttgagatgctaggaagacttgggtatttaaaccatgtcagagctgcctcaccacaggaccttgctggaggctatacttcttctcttgcttgtcacagagcactacaggatgcattcagtgggcttttctggcagcccagttaaccatttataagatttggaccttggagctgaaccagggagctagcaaaaaggatttgacacgataagcctcatctgatggaagagaggaataaataattcacctatatgtgtttgaggttgtgacagacttataaaatctttttaaaaaataaagctataatttatattaa

SEQ ID NO: 403874 - DNA, 1615 bp, Homo sapiens
cgaagggaccgtctctgccaagcgcctgttggtaggaacctgcttggtcgcgtctgagggggcttgtaggtggctctggctgaaacaggcgcctgcgagagtctgtaggagggaaaccgccatggacgatcagggttgccctcggtgtaagaccaccaaatatcggaacccctccttgaagctgatggtgaatgtgtgcggacacactctctgtgaaagttgtgtagatttactgtttgtgagaggagctggaaactgccctgagtgtggtactccactcagaaagagcaacttcagggtacaactctttgaagatcccactgttgacaaggaggttgagatcaggaaaaaagtgctaaagatatacaataaaagggaagaagattttcctagtctaagagaatacaatgatttcttggaagaagtggaagaaattgttttcaacttgaccaacaatgtggatttggacaacaccaaaaagaaaatggagatataccaaaaggaaaacaaagatgttattcagaaaaataaattaaagctgactcgagaacaggaagaactggaagaagctttagaagtggaacgacaggaaaatgaacaaagaagattatttatacaaaaagaagaacaactgcagcagattctaaaaaggaagaataagcaggcttttttagatgagctgggtcaacatatttcactggcacctattcacaagcttgaagaagctctgtatgaataccagccactgcagatagagacatatggaccacatgttcctgagcttgagatgctaggaagacttgggtatttaaaccatgtcagagctgcctcaccacaggaccttgctggaggctatacttcttctcttgcttgtcacagagcactacaggatgcattcagtgggcttttctggcagcccagttaaccatttataagatttggaccttggagctgaaccagggagctagcaaaagtaaagcagacttataaaattatagctatgtgcagctgcacaacacagtccttccactagcagctgtgttaaagtatttataaggagaaaatttcagaactaagttgagtaatataggggatatatatttgtgaaaaataatttttacttatatttttcagaggatttgacacgataagcctcatctgatggaagagaggaataaataattcacctatatgtgtttgaggttgtgacagacttataaaatctttttaaaaaataaagctataatttatattaacgcgttgctcgtttgaaaagaaaaaaaaaatggcgctcgtggccctaagcggggagctctgagcgccgctccctttaggggcgggtaatgcatgatcctcgcggaatgagctgctggggtgggcgcttgagctggggggaccggtgtctctcaccaaaggggggtgttccggtgggcccgcgtacggccctacccggacaggcccgggccctaagggcgccgagagggcgcggccccggaacgcgcgtggccgcggcgaggactagggccgcccgcggcagcggcggactggtggggtgcagctggcggcgacgcggccgctctgacatcggccgggaccggtggggctctccgccttg

SEQ ID NO: 403875 - DNA, 541 bp, Homo sapiens
  misc_feature (25)..(27): n is a, c, g, or t
  misc_feature (29)..(29): n is a, c, g, or t
ggcgcgggaggcgagaacgagagannngngcacgtcgcatgaccggcgcgggcagttttgcatggttttgtgcgtctttaaaaaaaaacgtatttaaaccatgtcagagctgcctcaccacaggaccttgctggaggctatacttcttctcttgcttgtcacagagcactacaggatgcattcagtgggcttttctggcagcccagttaaccatttataagatttggaccttggagctgaaccagggagctagcaaaagtaaagcagacttataaaattatagctatgtgcagctgcacaacacagtccttccactagcagctgtgttaaagtatttataaggagaaaatttcagaactaagttgagtaatataggggatatatatttgtgaaaaataatttttacttatatttttcagaggatttgacacgataagcctcatctgatggaagagaggaataaataattcacctatatgtgtttgaggttgtgacagacttataaaatctttttaaaaaataaagctataatttatattaa

SEQ ID NO: 403876 - DNA, 1539 bp, Homo sapiens
aatgtttttgtttttgttcaataaatattctcttcttccttccgctttcccctttcgcccttggcagagaagcaaataattgagttaaaaccttgatttgtggcaatgtgaataaattatagctaattccaggaacttagctgcatcctaccttgacccattttttctactggactcttatattgctctatatgttttagctacacaggtttattaaacatggatacagatgaaaaacagacttgttatgttagaagttataagttgctcatgcattaagattttgacacacaggaagtttgaatgaatgagtgaaaaaggttccaagttattaaaatgttctggtacctgatttattcatttgccataccagtaattctaaggtgggtgaagctcctttacttcctgaagaaacaagttagtttcttaaactaagcattaaaagaaagctggaattatttgtttccagaagtgttagtagtcatgctaagttgcccttctttggctagattgtccaatttttttttaggcctgttttgtctatttttgtcaagatataaatgtttaattgctttaaaaaaactgtgtggttgcagaaaaaaattgtactgttatattgttgagatcaatgagacttttctgtatttactttttcagacattattttgaactcaggctcagtctcagagatttcttcaacatgtaattttctaatgtttcctttcctgcaaggaatgagacaatatattcttggaatattaaagtacttttgaagtaactcatacgttttctcccctcttccatttgtttagctattgagggtttgctttaaaacaaatttatgtagaaatatcagtactataatagtattgtgatactgtgtatttcttaagcatatgccaggaaggagagcattagttaggtgtccaaaaaacagccaacaaaacaaatcagctctgaaaatcgtgaagcagtgaatattttagaattatttttgaaacctctttcagaactgtttttagaccccgtggtaatttgctatgtaatttaatactagtttaggcactccatgtacagttggtatgtttccttttgaaagataataatctatttataataaaagtctgaatatttcaatctcggaattcctctttaaaacttgaatcagttttactattgctttttaaaatgttacctatttatatttgctttgtatatcaatgctacacttcttgttttgttttaggtgtatttaaaccatgtcagagctgcctcaccacaggaccttgctggaggctatacttcttctcttgcttgtcacagagcactacaggatgcattcagtgggcttttctggcagcccagttaaccatttataagatttggaccttggagctgaaccagggagctagcaaaaaggatttgacacgataagcctcatctgatggaagagaggaataaataattcacctatatgtgtttgaggttgtgacagacttataaaatctttttaaaaaataaagctataatttatattaa

SEQ ID NO: 403877 - DNA, 1256 bp, Homo sapiens
cgaagggaccgtctctgccaagcgcctgttggtaggaacctgcttggtcgcgtctgagggggcttgtaggtggctctggctgaaacaggcgcctgcgagagtctgtaggagggaaaccgccatggacgatcagggttgccctcggtgtaagaccaccaaatatcggaacccctccttgaagctgatggtgaatgtgtgcggacacactctctgtgaaagttgtgtagatttactgtttgtgagaggagctggaaactgccctgagtgtggtactccactcagaaagagcaacttcagggtacaactctttgaagatcccactgttgacaaggaggttgagatcaggaaaaaagtgctaaagatatacaataaaagggaagaagattttcctagtctaagagaatacaatgatttcttggaagaagtggaagaaattgttttcaacttgaccaacaatgtggatttggacaacaccaaaaagaaaatggagatataccaaaaggaaaacaaagatgttattcagaaaaataaattaaagctgactcgagaacaggaagaactggaagaagctttagaagtggaacgacaggaaaatgaacaaagaagattatttatacaaaaagaagaacaactgcagcagattctaaaaaggaagaataagcaggcttttttagatgagctgggtcaacatatttcactggcacctattcacaagcttgaagaagctctgtatgaataccagccactgcagatagagacatatggaccacatgttcctgagcttgagatgctaggaagacttgggtatttaaaccatgtcagagctgcctcaccacaggaccttgctggaggctatacttcttctcttgcttgtcacagagcactacaggatgcattcagtgggcttttctggcagcccagttaaccatttataagatttggaccttggagctgaaccagggagctagcaaaagtaaagcagacttataaaattatagctatgtgcagctgcacaacacagtccttccactagcagctgtgttaaagtatttataaggagaaaatttcagaactaagttgagtaatataggggatatatatttgtgaaaaataatttttacttatatttttcagaggatttgacacgataagcctcatctgatggaagagaggaataaataattcacctatatgtgtttgaggttgtgacagacttataaaatctttttaaaaaataaagctataatttatattaa

SEQ ID NO: 403878 - DNA, 1245 bp, Homo sapiens
  misc_feature (36)..(36): n is a, c, g, or t
gcggatgcggtaagtccatttccataagcacagcgnctttgactgcagcgactctcttattattccccgctacctgtgaaagttgtgtagatttactgtttgtgagaggagctggaaactgccctgagtgtggtactccactcagaaagagcaacttcagggtacaactctttgaagatcccactgttgacaaggaggttgagatcaggaaaaaagtgctaaagatatacaataaaagggaagaagattttcctagtctaagagaatacaatgatttcttggaagaagtggaagaaattgttttcaacttgaccaacaatgtggatttggacaacaccaaaaagaaaatggagatataccaaaaggaaaacaaagatgttattcagaaaaataaattaaagctgactcgagaacaggaagaactggaagaagctttagaagtggaacgacaggaaaatgaacaaagaagattatttatacaaaaagaagaacaactgcagcagattctaaaaaggaagaataagcaggcttttttagatgagctggagagttctgatctccctgttgctctgcttttggctcagcataaagatagatctacccaattagaaatgcaacttgagaaacccaaacctgtaaaaccagtgacgttttccacaggcatcaaaatgggtcaacatatttcactggcacctattcacaagcttgaagaagctctgtatgaataccagccactgcagatagagacatatggaccacatgttcctgagcttgagatgctaggaagacttgggtatttaaaccatgtcagagctgcctcaccacaggaccttgctggaggctatacttcttctcttgcttgtcacagagcactacaggatgcattcagtgggcttttctggcagcccagttaaccatttataagatttggaccttggagctgaaccagggagctagcaaaagtaaagcagacttataaaattatagctatgtgcagctgcacaacacagtccttccactagcagctgtgttaaagtatttataaggagaaaatttcagaactaagttgagtaatataggggatatatatttgtgaaaaataatttttacttatatttttcagaggatttgacacgataagcctcatctgatggaagagaggaataaataattcacctatatgtgtttgaggttgtgacagacttataaaatctttttaaaaaataaagctataatttatattaa

SEQ ID NO: 403879 - DNA, 1052 bp, Homo sapiens
cgaagggaccgtctctgccaagcgcctgttggtaggaacctgcttggtcgcgtctgagggggcttgtaggtggctctggctgaaacaggcgcctgcgagagtctgtaggagggaaaccgccatggacgatcagggttgccctcggtgtaagaccaccaaatatcggaacccctccttgaagctgatggtgaatgtgtgcggacacactctctgtgaaagttgtgtagatttactgtttgtgagaggagctggaaactgccctgagtgtggtactccactcagaaagagcaacttcagggtacaactctttgaagatcccactgttgacaaggaggttgagatcaggaaaaaagtgctaaagatatacaataaaagggaagaagattttcctagtctaagagaatacaatgatttcttggaagaagtggaagaaattgttttcaacttgaccaacaatgtggatttggacaacaccaaaaagaaaatggagatataccaaaaggaaaacaaagatgttattcagaaaaataaattaaagctgactcgagaacaggaagaactggaagaagctttagaagtggaacgacaggaaaatgaacaaagaagattatttatacaaaaagaagaacaactgcagcagattctaaaaaggaagaataagcaggcttttttagatgagctggagagttctgatctccctgttgctctgcttttggctcagcataaagatagatctacccaattagaaatgcaacttgagaaacccaaacctgtaaaaccagtgacgttttccacaggcatcaaaatgggtcaacatatttcactggcacctattcacaagcttgaagaagctctgtatgaataccagccactgcagatagagacatatggaccacatgttcctgagcttgagatgctaggaagacttggaggatttgacacgataagcctcatctgatggaagagaggaataaataattcacctatatgtgtttgaggttgtgacagacttataaaatctttttaaaaaataaagctataatttatattaa

SEQ ID NO: 403880 - DNA, 1266 bp, Homo sapiens
cgaagggaccgtctctgccaagcgcctgttggtaggaacctgcttggtcgcgtctgagggggcttgtaggtggctctggctgaaacaggcgcctgcgagagtctgtaggagggaaaccgccatggacgatcagggttgccctcggtgtaagaccaccaaatatcggaacccctccttgaagctgatggtgaatgtgtgcggacacactctctgtgaaagttgtgtagatttactgtttgtgagaggagctggaaactgccctgagtgtggtactccactcagaaagagcaacttcagggtacaactctttgaagatcccactgttgacaaggaggttgagatcaggaaaaaagtgctaaagatatacaataaaagggaagaagattttcctagtctaagagaatacaatgatttcttggaagaagtggaagaaattgttttcaacttgaccaacaatgtggatttggacaacaccaaaaagaaaatggagatataccaaaaggaaaacaaagatgttattcagaaaaataaattaaagctgactcgagaacaggaagaactggaagaagctttagaagtggaacgacaggaaaatgaacaaagaagattatttatacaaaaagaagaacaactgcagcagattctaaaaaggaagaataagcaggcttttttagatgagctggagagttctgatctccctgttgctctgcttttggctcagcataaagatagatctacccaattagaaatgcaacttgagaaacccaaacctgtaaaaccagtgacgttttccacaggcatcaaaatgggtcaacatatttcactggcacctattcacaagcttgaagaagctctgtatgaataccagccactgcagatagagacatatggaccacatgttcctgagcttgagatgctaggaagacttgggtatgtgtcctaaagaactttacattgaggagctgatatgtgggacttattgctgttcttaactgacatgttaacatcttagattttcagtttatagaactttactgttttgtgaaaaatgaacagtactcaataccaaattgttttatttagtacattaatttttctgtggacttgttaggtctcttgagattgagcctggaatacattcgttcttttagaagtctgtccttggcagccatattgaaatggcgtttattttcagtcatgagtgtttttttcttttttaaagaaattggggcttaatttagttagtagtaagccaataaaaatatg

SEQ ID NO: 403881 - DNA, 205 bp, Homo sapiens
ctgagtggctcacctgagtgtccttcatggtttctgtgtaattcacctgtctctccctatcttctttgctcctagaggccccatcaccatagaaacaagggggtaagagtgggcttttgggctccactgtagcttgaactccgagggccccgcactcctcttgcttctctctgggatgcagaggcctgctctcctaggggccaga

SEQ ID NO: 403882 - DNA, 449 bp, Homo sapiens
tgagtagtgatcgagacactgcactccagcctgggtgacagagcaaaatcctgtctcaaaaaaaaaaaaaaaaaaagtcagaaaataaatgttacaacatggatgaacctttaaaacattgcataaatgaaagaagccagtcacaaaagacaatatatgattccattacacgaaatatccagaataggcaaatctatagagacacaaagtagattagtggttacctaaggctgggcgtggtgatagggagattgaagatgacagttgaagaacatagggtttctttttgaggtgataataatgttctaaaattgactgtagtgatacacgtaaaactctgtgaatatactaaaacccaccaaactgttcatttcaaatgaatggtgtgatatatgaattatatctcagtaaaattgttaccaaaagagttggtttttgtttttttaaaa

SEQ ID NO: 403883 - DNA, 567 bp, Homo sapiens
gtccaaaggccctgaggtgtgcatgtctcgtgtgttcaaggaatatccagggagcggagtccggggaaggaaagtaggagctgaggtgagaaagtgcgaggagagaaaaactttgctattttattggagcagagcacagcggcgtgtttatgtctaaaaagagtagaaattattctggatggtgactccacaaggggaacatatgcagcttgcctggtttcaagataagggccataatcagtggcacacaggagccggcacataccaacttgcaacagtcaaatgtttaggaatcttgagagccagttgataaacacagctattattaaaaattaaattctagatttataattaaataagttatatttaacagtattatatttaacagtatatatttaacagtagcagtatttagtacttagaaagtggcaaaagcaacaaattggggcttgatttattagttgttgtctagacttaagaaaatgatgacgaaaatgttaataatagagctttaacttagaattatgtcatacttggaaccattacattgcaaatagaaaaaaaaaa

SEQ ID NO: 403884 - DNA, 249 bp, Homo sapiens
gggttggctaaatgaattcagagacactcttgactcaggaaagagcaggtaaaagaatccatgagagctccagggaggtgtggtcagggcagcagagagcagattgctgggcttcaccgagcccacaggacaggctgtatggactccgctggacttgtttcaggtaaatatttgtccaaaaatgtgtacgtctggcagaatttgctctgaggctgctttcattcaaacttgataatgaggctggcttca

SEQ ID NO: 403885 - DNA, 577 bp, Homo sapiens
ttctcaggtccattcttaaccttctaagatgtaaaccttgaagactcaccaagcaaagaggtaccctaaaattgaagtcaggataaggaggacgactcagcttagagtcattgattgatctgcattgtgaaaattaggaaaccagatgctcccatgttctcaaggacagcctttcttaaggaagtcagtacgtgggcaacagtgatgagaggaagagaggagagactcaaccaactagagcagggataaggtttcccttgttcagcttttcagtgtctgctggaatgtgatgattacctcattgtcaggtaggaagtgaaacgtatgatattcttcctggcctttgccttgagagtcttctggagcctgaagagggtggggcagacaaccatggactgctagagaataaactttctttgaagcttcctaaatggattagaaagaaggggttctgtcaaagggaaagggtctatacagatgtgaccagcagtttgattagtttagatgtatgatttagtagccaatataagaaacttgtaatttttagtaattagaatttattataaataataaaaca

SEQ ID NO: 403886 - DNA, 466 bp, Homo sapiens
tttacccaaaaggtaatagaaagcctttgccttcatgttgacttggctttccttgcctagcacttggttgcttgcttgaaaatcatgtatgtatatatataaaatgtagaagcccaattcaaattaataatgtaaaaatttattctgttacacagattacctcattgtcaggtaggaagtgaaacgtatgatattcttcctggcctttgccttgagagtcttctggagcctgaagagggtggggcagacaaccatggactgctagagaataaactttctttgaagcttcctaaatggattagaaagaaggggttctgtcaaagggaaagggtctatacagatgtgaccagcagtttgattagtttagatgtatgatttagtagccaatataagaaacttgtaatttttagtaattagaatttattataaataataaaacagggtattaattattaatattatggta

SEQ ID NO: 403887 - DNA, 384 bp, Homo sapiens
gtacttggtagaaatatactgagaaaaatccaaggaagaggaaaaatgtatttttacatggtttgtgtttggttgagtaaaatttaaataaccaagaaatttaattttcacttttctcaattattacggtcatataaatgatgagagctaatgaacttcagtgatcagaggaaactattaacagtgataatataataatactgatttattctcacttgagttttttccttaaggtctgacaccatgccaatttccacagacctgtaactttaagttaccttaagctgggcctggtggctcacgcctgtaatacaagcactttgggaggccgaggtgggaggattgcttgagaccagcaacaacatagtcagaccacgtttctac

SEQ ID NO: 403888 - DNA, 368 bp, Homo sapiens
gttccatggactttgatgttcttgatattcattcttggtattggcattatgagttgtgacactaggaggagtctccaagtgactttgaaatgagaagacaggaacaaagaggtgtcatacatccctcacagatggtcagaaatatctaaagagtttttgccaaagagatagggtcctgaatgggcagcagggttaagagaaaaatgtgtagttattaatgttaatgagacatcctttgctacaagatgatggtgaggtctcaaggagatctaggttatatttacaagggatcactccaattactacatgtccgtcttttctaaaattagactttattgtgctctattaaaatagctttatctttagaa

SEQ ID NO: 403889 - DNA, 907 bp, Homo sapiens
tccaccctgtgctttctcgatgtgtccttactcggtgtttctgtggagcagggcatcctgggcttcctttctgatccctggctcctgtgatcttccgtgctgggctccctcttcccttcccttttccactgtgttgccctcacacagctggcatgccatggatgtcgctcacccaagcccttcctaatgttgctcaccaaaacccctcccaccttgcccctgggaccttctccccttccaggctgcatgcaggccgagggcctggcgtctcagcaggaggcagtggggcctttgctggcacctgggctctgcatcctgaccttctgagggcttggtcctttaggtccatcttgaatctcctccaggcttcggactctctgctctgtagctggcccatggagacgggtacactcaggcctggtcttagactccgctgcttgggctgtgctggtgcctttggtgccctcttagtccatcccacctgggggccctgtcctgctgtccattgtgccagagtgctgtccccttgtctttccgtaactggctgctcgttacctttcccatctcagcctcagtaccagccacttggtatcagggaggctctccctgaccaacctaaagttcacagccgtggttgccagtttaaatttctgcatagcaactttttggtttattttggctacttatcttccccatcatgccccctgtccctcccatataaactcagtgagagtaggggccacatctcatcatcctgcccacagctctgctgtctgtatcagccagggtatgctgtgcagaggctcacggtaaatagctgcagaccacgaatcccatctgcttgctgtgctttaatattggcttacatctttggatccagtgagttcttttctctgtctccctctct

SEQ ID NO: 403890 - DNA, 436 bp, Homo sapiens
gattaattcctcatagaacatctaaatggattggagagttggcaagggaaatgaagctcatcccagcaccttccttagtcactcacgcttagcactctgtcaagatctctgcctcatctgctagcataacatgtggattgcttgttggagcttatttccccgccccccatggtaaattctcatttcctgtgtacatgcacctggacttttttgtttttttaccaagagttgggaaaaatcccttctatgctatctatattctgcaaacaaattattattattattattattgagacagagtattattattattattattattattattattactgaggcaggagaatcgcttgaacccaggaggcggaggttgcagtgaggcgagatcacgccactacactccagcctggcgacagagcaagactctctcaaaaaa

SEQ ID NO: 403891 - DNA, 321 bp, Homo sapiens
catcaaattgtcattcccaacgttggaacaggggcctggtgggaggtaactgaatcataggaacagacttgctgttctcatggtagagttctctagagatctagttgtttagcacctctagagatctagagtgtgtagtacctttccattcactttctcactctctctctctctctctctcccgccgaccacgtgaagatttgcttgcttctcctttgccttcggccatgattgttaagtttcctgaggcctccccaggagcagaagcttgaacagcccataggaccatgaatctattaaacctcttttctttataaatta

SEQ ID NO: 403892 - DNA, 387 bp, Homo sapiens
tcaggggcatgtttccttggtgcctcccatcccaacctgcacctgtggcgactttgagactttccagcattgcacggagagcaggagtaggctttatggcttgttttacacacagtgtttttaatatcccagtcctgataaaatcagcgttttaggccaagaggaatgggggacaaacagactcgagcttccaacattcctaaccatgcattcagttgttttgcatatggttgctttatgtccattgtgtacttttaataagcagttaagatttttgctacattccaagggtgattaagagaggaaggaagggggatttttatcccaaagaatcagttatttcttttggtgtatctcattggcattctttataaactctacctaagt

SEQ ID NO: 403893 - DNA, 620 bp, Homo sapiens
tgtttttgggatgtactcaacatcatggattatgagggactgttgcaggaacaaaaacgtgcttaaagaaaactcatgaaagaagcaatagcttcccataagaatctgaagggctcttgtatgacagagggatgagatttgttctggagggtgtctgagataacagttaggacaaaacaaagaaaagtgagtgtaagaagataaataatggctagaaagaagaaaaaactctgaaaatgaaatggctgccataagagagataaaatttccttttactataggaattccagaatagctaaataattacttgtccatggtactttggagagaattcaagcattcaggtaaggatagaagtacttaataataataatatactaacactaataatgactaccatttaatgatcatcagtatgtgtcaagtcctgtgctgatggtttatataaattccacaaaatacttctgtgctctacaaatacaatttcagtcctcacagcaatttttaaacatgatcctcattataatggtaaaaactgctaatatttagtattccttctcaccttcttccttttagtaattgaattccctaattttagctatattcatgactgcccagct

SEQ ID NO: 403894 - DNA, 157 bp, Homo sapiens
ttgataagaccacagatcatttcttctactcttgtaaggttcttgattcgaactgaacttttctggaattctggcatcatctcgatgatcttggtcttccgccccgtcttcctcttcaaggtgaatatgtactgagccagcaccacccccgccacca

SEQ ID NO: 403895 - DNA, 682 bp, Homo sapiens
ctaatctcttgtcattattcaaatacaagagagtacttcttcatatataattcttagggaaattgtcaatttcccattttccctgaaaatctatttttatagaaaaatgtgggcccaactcactctttaaaaaattagatttggctttattggacattacataaacaaggataaaaaacgtccaaccaagcacttgactgaatttttcaccatttcgtcatttttgttattgtatagatggtctaaaaatcacattatgaccaaccaacaacttggctttggtgataattaagtatctgagaaaaatatggtagcccttatgacagactcaagcactaaaaatgggctacaatagaagagtgacttggggttctttatggggttcaagctcttcagcccatgtcttctttgggctgctcaactttctctggggtcaaatgaaagtcaagtttgggcaacagtgatcgttacagctctctttggctcccctaagactcagaagagcaatatatctacaagcggcttcttctctactctacaaattaagtggaaaggaaagaaatgctgtctgaattctcttttcctccactcaatgggcccttgcattctccttattccaccgacagccatgcaactacaggcagatcgtgtaaactctccaggtattatttcacttatctgt

SEQ ID NO: 403896 - DNA, 470 bp, Homo sapiens
gacgccacagccccaccacggccacttctcccaaggtacaggtgcgcccgcattcactgaggtcggcctggcccacccctaccccaagaagcgaatcgcccttcattcaaggcaatgaccagcaagactatcacaaagagaaccacggtgaaaaatcccaaagggctttctgggccctgggaagatgtctgtcatctgggactagtgggaagaactcaaaaagtgaccctatttgccaagctcatctaataacacatacagctgttattttcttttcagactctaaaatgcaagggttcccagagccctgctgagttacctggtgtcgctcccatcctgatgcccgggcggtggccgccttctctgtccagccctccctgaaaatgaccccaggctaaggatcagctcagagccccgagctgtttttgtagctttcatgttgacagaacatcctggccactctgctgaga

SEQ ID NO: 403897 - DNA, 253 bp, Homo sapiens
tttttttgtatttttagtatagacggtgtttcaccatgttagccaggatggtctcgatctcctgacctcgtgatctgcctgcctcggcctcccaaagtgctgggattacaggtgtgagccaccgcgcccagccttaggcaaagaattcttaaacttgacaacaaaagcaagatccataaaagggaaaattggtaaacagggtgtcatcaaattttttaaatttcagactttgaaagcccatgtgaaaagaatg

SEQ ID NO: 403898 - DNA, 737 bp, Homo sapiens
attaagggaaactgagtgaaggatgtgtagagctcctccacatgatctttataaatttgtgttgaagccatatctatttcaaaggaaaagtcgccaacatgtcatttcatggccattccacctttagagacttcccctttcagcaatttagggctacagaaagaaacagccatggcatctgcacacaacaaagaggttatttcaaacccaacttaaggccaggcttcaaccctataaagcaaccagtgccacagggaatgccctaaccctgaaaacactcatttgaggctctctggagaaaacaactcagaaatagggtagggtagagagggactaccctgaagtaccctccaaaaaaggagggaaggtaggaagaaaaaaaagatcctgagtacaggaagggaaacaaaaattgaaacagagatccacagtttgatccaattggaaaactaaaatttatctatgttttagcgtaatgttttaagcaaaaattctgataaaaggtctagtattgactcctgcacctctctctaggataggttctgaattcctggtgatcctactaaaattaaacaaagtaccccccataattttaggggagctcttgaacataaagagattacaaacaggtatgcctcaccttaagtattgaaatttccccatgctcaaaacacccatttccttaaaatataccatagtgggcatgggtgctctcatgcaatgagtaataaattaaa

SEQ ID NO: 403899 - DNA, 853 bp, Homo sapiens
ggcagtagttggaatgagtcagaaatagatggattgagcatataaaacttcctcccaagggtaggcttgcactgtgaggaggggtttcccttagtagccatgtctgattggtgtctgttttggtcaaaagaggctatgtaaggggaaaccaaatatttggggtacaggttactttctttgcttcaagaaagctctcagtatgtcctgaggaagtctcgcctatcctagggtagactgggaactctgaaggttatagggaagtagaaatgcctgtctctgcctgattcttttctgtttatcaacctcctctgggatcagtgagttcaatcttgtgaaataactgatctatcccatgcttatttatcatctgagagtagtaataaacacacttacccactagtagatacttaatttaatacttccagacattgtggctgttactgactgtatgaagataaaattaattaagggattctattctaaagtaatctgttgtataatgcagaacattacctgtgtgcaggagatactccatgtattgcatgaaaatgtgagaatgctaaaactaatttctagagagccaattgagaaagaaaaattggaaaataacattaagaaattattttaatatatttttgaagtctgggtaacatagcgagatcctatctctaccaaaaaatattttttaaattagccaagtgtggtggcacacctgtagccctggctactctggaggctgaagcaagaggatgacatgagcccgggaggtggaggctgcagtgagccatgcttgcgccattatactccagcctgggtgacagagcaagaccttgtttccaaaaaaaaaaaaaaa

SEQ ID NO: 403900 - DNA, 462 bp, Homo sapiens
ctgggatttatacggtgaaagaagacccaagacagaacactgaaaggggaggtatgaaggttaatggccaacaggagtggtgaatagatggccttcttttctagaatgagatttctttggtataaaataatcataactgattaaatgaaagtatttgatattattctggcatatatacagaagagactagaaaactagaaaatatcctacatgtgatatactttatgaagtttaaacagcacagagttctggcaaatgttactaatgatgaataaaatattttgttttctggtgcatgcctctaatcccagctactcaggaggctgaggcgggagaatcacttgaacccaggaggcgaaggttgcagtgagccaagatcacgccattgcactccagcctgggcaacaagagcgaaactccatctcaaaaactaaataaataaataaatttgttttcactgag

SEQ ID NO: 403901 - DNA, 480 bp, Homo sapiens
catgtcccatgaagtgccaaggccttggctacaggagggttagagtcaaatacgtacctttactggtcagctactgttcagacagaagcatctgccttctcagaatgttgctttctgttgctctgttcactgaaaagtaggggaattatctgtggatttgttctctctgaagatttctacaattaaaaaaaaacaagttgactgggcatggtgactcatgcctgtaatcccagcactttgggaggcctgaggtgggcagatcacgaggtcaagagtttgagaccagcctgaccaacatggtgaaaccccatctctactaaaaatacataaattagccgggtgtggtggcatgcgcctgtagtcccagctactcaggaggctgaggcaggagaatcactagaacctgggaggcgaaggttgcagtgagccgagatcgcgccactgcactcctgcctggagacagagcgagactccatctca

SEQ ID NO: 403902 - DNA, 1081 bp, Homo sapiens
ccgctggggttcctggaggaaaagcctgcaagaaaatgtgaacacctccatctgtggctctcagaggctcccacgctcaagcgagcccacacttgaccttgagcaatgtctacattttctggctgaatcccgcctgattctgaagtgtggggctggcacctgtcccagggaagccgcctcttcctacagtcacctgttttgctctaggtttcaggcgagttgtttctgctgcagccttattctgggatcaggagtgggcggttaactgatgtccgcccagccttttctgggtgaaagggtgggagggctgtttctcagctctccagccagggtccagagcctattttggaatggacatggtcattaaggtgtctgtgcatgaaggcccctgaagcccccggtactgctagtgcggcgggcatccgtggagggtcctggagaggtgggaccctccgatgcagtgctctgatcaggcaaatatttttgatgattattatttaaaaaggaattaattcagttagctaaatggcaagtgtttttttctttagtctacttacttgatagcctcagtgaactgaaattttaggaaactggcttgctttccttgcagttgctgtaatctgttgcatagtcttggtttttgtagtccttctggcagtctcactacatcttcccaggacaccctctccttagccagtgacctacccagcagggcaccagcagccttccagaaaggcctggcacttgaggctttctggtgagccgggggcacactggtcacagtttgtgcttccctctgctcagtggatggaggcacccacagttttagaagcactccacttccactggggtcagggcggtgctgatgtcagctgagtgcgtgtgcacgtgtttgtattttcttcatcactttaaaaccgtgcctgagctgtaaagtatctccatgtgagagaaccgaagagctgtgtgatgttgacagactttgtttctcattcttgtgcctcgacctctgcattacttctccaggatgaagaaagccaagacttgccctgtgttcctggcccccctcatgaagttccca

SEQ ID NO: 403903 - DNA, 2532 bp, Homo sapiens
  misc_feature (2)..(2): n is a, c, g, or t
  misc_feature (4)..(4): n is a, c, g, or t
  misc_feature (6)..(8): n is a, c, g, or t
  misc_feature (1688)..(1688): n is a, c, g, or t
gncncnnngcgggaaactcgagttggctcgagcttgccctgaagacgcgccacgccccctcccctatctgagccggacagggagccggggtggaaactgcgcccgcatcccagcgccaagcagacgtgaactctgcgcccgttccccgggaccttcagcgttaaggagaactccgaggagagcagggggagtggaggggaacggcggcgacaaagcggatttgaaactaggagtcaaggaggacgtggggagctggcgccacaggagctaccgaggcggcggccgggggagcctcgcggcctgcgggagagcccggcggtcatgggcgagccggcggtggggcgcccgggagctggctgagcgccggggcccttatttcccgggggtgtgggcgagactccgccgacgcccggtgccgtgggcctgggggctgcccccgggggcccggccatggctggccggggtttcagctggggcccgggccacctgaacgaggacaacgcgcgctttctgctgctggccgcgctcatcgtgctctacctgctgggcggcgccgccgtcttctccgcgctggagctggcgcacgagcgccaggccaagcagcgctgggaggagcgcctggccaacttcagccgcggccacaacctgagccgcgacgagctgcgcggcttcctccgccactacgaggaggccactcgggccggcatccgcgtggacaacgtccgcccgcgctgggacttcaccggcgccttctacttcgtgggcaccgtcgtttccaccatagggtttgggatgacaactccggcgacagtaggaggaaaaatctttctgatcttttacggccttgttgggtgttccagcaccatcttgttcttcaacctcttcctggagcgcctgatcaccatcatcgcctacatcatgaagtcgtgccaccagcggcagctccggagacgaggggccctgccccaggagagcctgaaggatgcggggcagtgtgaggtggacagcctggccggctggaagccctccgtgtactacgtcatgctgatcctatgcacagcctccatcctcatctcttgctgcgcctcagccatgtacacccccattgaaggctggagctactttgactcactctacttctgttttgtggctttcagcaccattggctttggggacctggtcagcagccagaacgcccactatgagagccaaggcctctatcgctttgccaacttcgtcttcatcctcatgggtgtctgctgcatctactccttgttcaatgtcatctctatcctcatcaaacagtcccttgaactggatcctgaggaaaatggacagcgggtgctgcccgcaatgccagagaggactcttgcgatcacgcaggaacgtggtgatgccaggcagcgtccggaaccgctgcaacatctccatagagacagacggggtggcagagagtgacacggacgggcgccggctctcaggggagatgatctccatgaaggacttgctggcagccaacaaggcctcgttggccatcctgcagaagcaactgtctgagatggccaacggctgcccccaccagaccagcacactggcccgggacaatgaattctcagggggggtgggagcctttgcaatcatgaacaacaggttggcagagaccagtggggacaggtagaagccaggantggatgctgggcagaggccagagtagaatggaggatgattgccgcccaggggacgagctcagccctgcgccttggctctgttccttctgggagctgttcccgggagcctccgcaagcatctttagaaatctgatctcggctccaaccaacagccaccttccagggatggggggcctgaagcctcgatgcttgtctcctgatccttattctttaagtctaaattcagtcttttcaaaacaaatcacaaaagcagcattagacattgccttgtttcattaatcttgtttcagagctttagctgcctgaggagataggttttccttaagccttgatttcctgaagctctctctgttccttatttgggaacaaaaattgcgaagactcatctttccctagaactctgaatggatgaatttttaaaagtggggagaatgtttggggatgtgtctgggctttctttttgccaggcttccttcaaagcatacctgccaatggtgtctgcatagggaaaatgtctgttgtactctttatacctgtttctgttttttgttgtccctttctttttatttttaaggccttaatgcctggctgtggcgtctgtgagacctcaatgtaataagaaaattaaattcagcttcaggcctttaaactgcagcaagatggtggtgtaggggtgtgggacagggagagactcacttttgtaactaaagaacatagcttaacattttccctttgaatggtcacacagaccatttcatttttaccagggcttggggacccaatgcaaagatgatgactatttaataaaatggaaaatttaataaatcctcattttattaactaa

SEQ ID NO: 403904 - DNA, 544 bp, Homo sapiens
tagactcgctaccaaaaacgtaaagaaagccctcttcggtgtgattgtttttcattatgggaagctcattcagataacgtggaagttgaacctgatgaaaagggaacttgaatgtcatgaaacacaggaagaatatgtccaaggttataagtatacactatattatagaggaatataaacaagaaaactagtaccttgagcagggaactacatggttcttagtaacagcatgctgttacttaccacagtaacttttctggttatatggaaaaattcagacatatcaagaaaagccaagagcacaaaattaagttatactggagaaaaacgctgcttttctacgccttcaagataaatattctaatgtcaggccaaaacagcaatgttagaaccaaaaaaagccaaagaggagaatgatcatctcaggccttctccaggggagaaaaaaatgaaggaaatgacatattgacctgcaaatcatgtacagcaagaaactgtaaaagatgaacttctgcaatatgaatttgagaaataaaaaaaaaaa

SEQ ID NO: 403905 - DNA, 616 bp, Homo sapiens
ggccacctccagcctggccgctcacccgagcaggggggccgctgcccaagaaccctttcctggagagctgctccgagaccgcacagcgccgccgcgtcttctccttttccactcctctctcctaatttttttgatttaccagcgttcgacatcgttatctcttcctctagattaattgcttcgctcttttgagcaagaatactctgtgtggcatctttggtactatggggaacgagaatccagcattatctttaataaaatccagaaacatttttggttgtttcctttgaggggtacgtcgcagcacgctcacttttttccccttctcgttggccttggtccttcagtttcacaaaatgtggatagtgacttaaaaataccttaaaaaaaaaaaaaagaaaaaaccattagagtaaggggaaagcacttcctaaagagttgaagaactaattggtcggtaaaaattggatattgaattcataagatgttaaaatggactggatttttggtagttttggttgcttttaaaaaaattagtgctagctttcaagtgaattacaaccttaaatttgagatttcctttggtgaaccatggaagtttacccagtggtaagga

SEQ ID NO: 403906 - DNA, 378 bp, Homo sapiens
tagaggttgcagtgagccgagatcacaccactgcactccagcctgggcgacagagcaagacttggcctcagagaaaaaaagaaaattgatattaatacttaaatgtttggtaggattcactagcagaaccatctgggcctggagttttgattgttggaaggtttttaatcatgaattcaattattttaataggtataggcttattagattatcagtttcttcttgagtgagttttagaggtttatgcctaaggcgttaatccattccactcggattgtcaaacttatggacataagtctattggttagtatttctctattagccttttattgtctgtagggcctgtagtgatgtgtctttttcattcctgatattggt

SEQ ID NO: 403907 - DNA, 545 bp, Homo sapiens
tccaattagaagacttgtttaatcaatatactcagccttttgtgataatggtaatggtttgtgggtagattagtaaccttgaaaacagaaaggaatagtggcttatactagtgactgtccagaaagacctagctgatcattaaatttttggaattgttgagaaggccagttttctttcattctaaacagttaacatagttaaggaacataggtaaggatacatttaaggaaatagaatgtttcaaatagcttaaaaaattctcttggccaactttttgatgaagttggtaaagtagcagtgtaagtccaagagcccaggcatatttactgtcatgattttcatagcaatgaataggtaaagaaaatacgagcactagaagctagaaaacatgccattttcatggcaaatattaatgttcttcagctaaatgttgtttggatgatgctggaacaagaaggctaactcatgacacctctgttgtgacagagcaacatgcctagggattgagtggagggaactctgaacagaatttgagttgtgcctt

SEQ ID NO: 403908 - DNA, 1293 bp, Homo sapiens
atggagggggagccctcccagcctcccaacagcagttggcccctaagtcagaatgggactaacactgaggccaccccggctacaaacctcaccttctcctcctactatcagcacacctcccctgtggcggccatgttcattgtggcctatgcgctcatcttcctgctctgcatggtgggcaacaccctggtctgtttcatcgtgctcaagaaccggcacatgcatactgtcaccaacatgttcatcctcaacctggctgtcagtgacctgctggtgggcatcttctgcatgcccaccacccttgtggacaacctcatcactgggtggcccttcgacaatgccacatgcaagatgagcggcttggtgcagggcatgtctgtgtcggcttccgttttcacactggtggccattgctgtggaaaggttccgctgcatcgtgcaccctttccgcgagaagctgaccctgcggaaggcgctcgtcaccatcgccgtcatctgggccctggcgctgctcatcatgtgtccctcggccgtcacgctgaccgtcacccgtgaggagcaccacttcatggtggacgcccgcaaccgctcctaccctctctactcctgctgggaggcctggcccgagaagggcatgcgcagggtctacaccactgtgctcttctcgcacatctacctggcgccgctggcgctcatcgtggtcatgtacgcccgcatcgcgcgcaagctctgccaggccccgggcccggcccccgggggcgaggaggctgcggacccgcgagcatcgcggcgcagagcgcgcgtggtgcacatgctggtcatggtggcgctgttcttcacgctgtcctggctgccgctctgggcgctgctgctgctcatcgactacgggcagctcagcgcgccgcagctgcacctggtcaccgtctacgccttccccttcgcgcactggctggccttcttcaacagcagcgccaaccccatcatctacggctacttcaacgagaacttccgccgcggcttccaggccgccttccgcgcccgcctctgcccgcgcccgtcggggagccacaaggaggcctactccgagcggcccggcgggcttctgcacaggcgggtcttcgtggtggtgcggcccagcgactccgggctgccctctgagtcgggccctagcagtggggcccccaggcccggccgcctcccgctgcggaatgggcgggtggctcaccacggcttgcccagggaagggcctggctgctcccacctgcccctcaccattccagcctgggatatctga

SEQ ID NO: 403909 - DNA, 407 bp, Homo sapiens
ctgttcccaacacagagacatggtcagtctcttcatttatttagttctccaataacgttcagggtgttagttttctctgtagaggttctctgtagagtacatcttggatttgtttctaggtacaggaaactttttaaaaatatattttatatagaccagggtctcaccacgttgctcaggctggtcttgaactcctggccttggcatcccaaagtgctgggattacagatgtgagctactgcacccagccaggaaatgtattttctattgctctcccacaactcccaccacatcttctccatctgcatgaaatcatattctctgtatggtatctgtaaagtcatatcttattctgagaaatgtccatttctgcatcaatactcatcgcatgtattctaaatatactt

SEQ ID NO: 403910 - DNA, 359 bp, Homo sapiens
tgtttggaattcccaacttattaattaaatgggcagattctatgtgtacaattccacagcaccgagaacactaaaagttggctcagtagtaatagtataatcatattctttttggtgttttttattataaaaataagttatgtttacctctgaccaagtcagtaagactcatatcacctaagtatttgttataaagcattaaagagcagggtgcagtggctcacgcctgtaatcacaggactttgggaggctggggcgggtggatcgcttgaggtcaggagttcaagcaatccacccaccttggcctcctaaagtgctaggatccaactttaccccttgccttctgaaggttctatgtt

SEQ ID NO: 403911 - DNA, 352 bp, Homo sapiens
cacacctcacaaagtgcaagactcaaaactgtgggatcgtaactttattctaaacttatttaaatctactttcctaaaatgtaagttatcttgactgcctccatgaaccctaaccatcacttgttatcatgctattacttcctgacccaaggtcccattctgctctcttttatctctgtcctgttggtttcagaggaatgatttaagcctaatttaattcttctattaatacttcagctctaacacttctgactgctccaactaattatcccatctcccagatttcccttactactagtttcttccttcatcctatacatatgctcaaatgttctcccatcctattaaaatg

SEQ ID NO: 403912 - DNA, 361 bp, Homo sapiens
atctcacagttctggggaccagaagtccaaaatccaggtgtctgcagggccatgcccctctgcaacctgtaggggaggatttttcctgccttttcctggctgctggtggcagccagccacccttggtggtcctggacctacagccacaggggccttcttatctctgtgtttctccttttttttgagacagtcccgctctgtcatccaggctggagtacagtggggcaatctcggctcactgcaacctccgcctcccgggttcaggcaattattctgcctcagccatccaagtagctgcaactgcaggcacctgtaatcgcagctacttggaaggccgaggtgggagaatcgcttgaacccg

SEQ ID NO: 403913 - DNA, 426 bp, Homo sapiens
ggcttcatggagctttgccctaactgtgtatggcttagtattcagtcaaacacttgaggagaaccttgcgcagatttctgtaaagttttctctgtatagctccctcctctctggcacgctggccaataaattccagctaccttagcctccctgtgttagtcagggctcaccagagaaaccaaaccaataggatatacagagatatataaaagtatatttattatgggaattgggtcacacaattttggaggccaagaagtcccgtgatatgctgcctgaaagctggagaaccaggaaagccagcagcatagttcagtctgaatccaaaggcctgagaatggcgtgaacccgggaggtggagcttgcagtgagctgagactgcaccactgcactccagcctgggtgacagagcgagactccatcacc

SEQ ID NO: 403914 - DNA, 344 bp, Homo sapiens
tcctccaaacaaataaataaataaaaagaaagaaaaaaagaaacgacccagactatcagccctcccagagggggcctgggatgggctcatcggccttcctcacacagaaccctgcccgtccacccggactggggaggggctcgccccacctgagatgtccatgaagtcattcaggcttggctgcagtggcgtcaggtccggctggatcatgtcagcattggcgacgtaggctggaggcagcagtggcgacatcagcagcagcaggcagggagtcgcaggtcgcctggttctaggaataatgggggaagtatgtaggagttgaagattagtccaccgtagtcggt

SEQ ID NO: 403915 - DNA, 245 bp, Homo sapiens
caaatcctccaatggaacctggcctaggaagttcccagggagtgctacttggggagagaataaagagatggaatgaaaatactgaactgtaacatataagatggggatggggtgatgactgtaacctagtctttccataggacgatggtagaaatactcatttgagaaagtcaggcattcatcttaaaaacattgagaaagccactgaaaattcagaactagaatgtagaacatctaaaccagac

SEQ ID NO: 403916 - DNA, 648 bp, Homo sapiens
tgatgcctatatttagaggaagagctgtctaagcagagggaatccaaatacaatagccctggagtgggaaattccccagcatgtttcagaaatagaaagcaggccaacattgttggaatagagagtaggtggggagaggcaaaggtgggaggagttaaagtcaagtcaaaggtaacaaaatgtgaagctgatatgtgaagcttgaaatatctcctgcagattgagagggacactaataaagtgtcttttctaatgacctgccagattacagaagtggaagatgaggtcatggaaagcttctcagacataagggagctaaaatcatttatgttttaaagaagcattctcggccgggcgcggcggctcacgcctgtaatcccagcactttgggaggccgaggctgctgggaggccgaggcgggcagatcacgagttgaggagatcgagaccatcctggctaatgcggtgaaaccccgtctctattaaaaatacaaaaaaattagccgggcgtggtggcgggcgcctgtagtcccagctactccggaggctgaggtaggagaatggcgtgaacccgggaggcggagcttgccgtgattcgagatcgcgccagtgcactccagcctgggcgacagagcaagactccatctca

SEQ ID NO: 403917 - DNA, 201 bp, Homo sapiens
tggattggatcgggcccacctacattagggagggcaatctgtgtactcaaaattcaccaatttcaatgttgatctcaccaaaaacagccttacagaaatgcctagaataatgtttgaacaaatatctgggcactccatggcccagtcaaattggcacctaaaattaaccatcacacacaatgactaaaaaaaaaagttaaa

SEQ ID NO: 403918 - DNA, 239 bp, Homo sapiens
catcctgtcatatggtatttaattcacattgcgtagaagaaatgttcttggttttcttaggtgatctctaggttgtttcttctttcaaatgggtccaactttaaaataatgtagttatcagtattagtccagctgcagtgcattcttatctgccagtattctgcacgcttgcatatatgtacgtgtcatccacatgccagatgtaactgtcctcacagttgttcatgtgctgggcatgt

SEQ ID NO: 403919 - DNA, 835 bp, Homo sapiens
gatgaattataaacaacctattgatcaaaggagaaattacaaagaaaaatttttgagatatatatttttcaaactgtaagtgaaaaaaatatgaatttttaaaacagtgaaatatatatattcaaaaatttttaatagtttaatagcacaggagtgttactacagttaagaatttattgtatattttaaaacagctagaagatttaaaatgttcccaatacaaataaatgacaaatggttaaggagatggacatactcaataccctgatttgatcattacacattgtatgtatatatcaaaatatcacatctacacataaatatgtacagttattacataccaataaaaatgtaaaaatcttggcagagtacagtggctcactcctgtaattacagcacttcaagaggctgacgtgggaggatcacttgaggcaggagttcaagacccgcctggccaacatggtgaaacctcgtctccattaaaaatacaaaaattagctgggtgtggtggtgtgtgcctgtagtcccagctatgtgggaggctgagacatgagaatcacttgaacccaagaggcagaatccaaaatgttgtgattacaggcatgagccaccgtgcccggccgcccctactcttttgacctcatttaactttaattgcctcctgaaagccttatatttaaatgcagtcacattgtgaattagggcttcaacatgtaaattttggatgaaacacaatccagtccgtagcactttctcttcactagtgggcattcattccatttacaaatcttaaaaaaaaatgtgggggattttattgctgatgaaagtggctctc

SEQ ID NO: 403920 - DNA, 300 bp, Homo sapiens
accttgtcattacctttcagggagtagccccattacctctacctctgtacctctctcacctcccatctctgtgcccccatcactcccaagctctgtcctccccattaccttctacatctggccctcttcacattttatttcatctcatgtcagccccatcactttccacctcagtccctccacgttccatctcaggacttctgtcacttgcatcccagggacctcctcacctcccattttagtctattcatcacttcccatctctgcaccttgtcattacctttcagagggtagccccat

SEQ ID NO: 403921 - DNA, 635 bp, Homo sapiens
cttgcctcaaatctacttattgatattcacgtgtgcttccttgaaactcacataatctcaggacagctttctcattatctacaatctctattcaaattatctttttcttccaatccttcatggcatatgtctcacaacccatgaaccgtctttctcttcttatttgataccattattttaaatgatcacttctattattttcaaccctaaagctggtattaacttttatttatgctctcctgtggcatatgaattaatgacaaatagcaccgtaaatgaaactatatgctataagacatcaaaatagaatttgaacagataactaaataagctcattccacagtattttctttgataaaccaaagcttgatctcagtattctactgaatttctttaatgatcatatcttctcccctcctggacccttagagtcaaaatatgtctgaatgttcacccaaaaatctgacctgtcaacataaataacgtttcaaatcttcatggatgtttaatttctttttaagtgggggagataattatatgggagcttgctctaaaatttctgaattctagcagattgccttggctaacagcaccagcagtcatcttctaggctactgaaacagcataagaaaaaa

SEQ ID NO: 403922 - DNA, 450 bp, Homo sapiens
ttttttttcatttccagaaattgaatgtatttgggtgtattctatttagggtttgctctgtttcttgaatatttaggtttatgtcttccatctaatttgggaaggttgaagtcattattttttaatagttttttagtcccacattctatctcctcgtcttctatatctcctgtgattatgaatgttagctcttttattattgttctaaagtttcctgaaatgctgttaaatttttttttatcggttttcttcttcttgttcagacagtaaattctgttggcatgttttcagattcactgattccatcttctgctctgtgctctcttcttttgtgaccatcctctgcatctattatttccattattgtattttaattttatttggttcatgtttactttttataacttataagtcattattgaatttatttttaattttaacttttatgtc

SEQ ID NO: 403923 - DNA, 457 bp, Homo sapiens
ttttttttcatttccagaaattgaatgtatttgggtgtattctatttagggtttgctctgtttcttgaatatttaggtttatgtcttccatctaatttgggaaggttgaagtcattattttttaatagttttttagtcccacattctatctcctcgtcttctatatctcctgtgattatgaatgttagctcttttattattgttctaaagtttcctgaaatgctgttaaatttttttttatcggttttcttcttcttgttcagacagtaaattctgttggcatgttttcagattcactgattccatcttctgctctgtgctctcttcttttgtgaccatcctctgcatctattatttccattattgtattttaatttttgcttcaactattagaaatggcttaaaaacttaagagaagtttgattatacattatatttatgcttaatttttacccat

SEQ ID NO: 403924 - DNA, 398 bp, Homo sapiens
cattcctaagaggctcttggagtgactgagagatctgtgacacctgaatgattcacacctgcagtttctaggaaccccttctccatacactccatggttgtcaaataatcatatatttattgaacctgtactgtgcacaaagcactgtgctaggtatgtgacaccagggatagattctttgctccaagaagctcatgatgaagataaaacaactgtatgaagagaaaaaagaatcatccagggtagtttatgctagatgccagatgaatctaaagataaagagtagaggctttcagaaggggagagatgactgtgatgggagagttgggagccttcggggaagatgtatggttcaaagtgggttttcaagaagatgtgggtctcaagtaaagaaagga

SEQ ID NO: 403925 - DNA, 127 bp, Homo sapiens
cattctcctcctcctcctcttcatctctcttttcccttttctcctcctcttcctcctcttctattttaaaggaaatttcagatatcctaaatttttgccagcaaatacatctcaatgcctgtctcta

SEQ ID NO: 403926 - DNA, 546 bp, Homo sapiens
tgcattgcttatatatgactttgtatggagctctctaaacttaaccccctttctttcactcattcaaacaactgcttttataattttggataacatgaattcttaaaaacatacttatgctatatcaaataagactgtcctatagggtcaccagtgtgtgtatccccgaagccaacagtactcctacctacatagttgcggctctagcaacagaagtcaggtgtcaggactgcaaaatgcacatgacagaaataaagacatgagtgactatgactgccaaaggaatctggattgtttccttcaccacagtgttcttccatagtgagaccctgaaaataataggctgggggagggtagaagataacaaacagatttgcaagtccttcacctataatgagaatggataattcaattatatgccagaagaaaaagcacaaccccgttcagtattaattgtgctggaacttccaccataagtctgggtccagtcaatggggtaatttccaatatcccaaaagaactaagattgataaccaaaaggaaaat

SEQ ID NO: 403927 - DNA, 424 bp, Homo sapiens
ctgggcacagtggctcatgcctgtaatcccagcactttgggaggccgaggcgggtggatcacctgaggtcaggcgttcaagaccagcctggccaacatggtgaaaccttgtctcgactaaaaatacaaaaatttgtattccagctactcaaggggccaaggtgggagaatcacttgaacctgggaggtggaggttacagtgagccaaaatcatgccattgcactccagtctgggtgagagagcaagacttcgtttcaaaaaaaagagaaaagaaaagaaaagaatgcctcagctgaaccttatcaataaaagatgtagattatttgtttgagtactttaaggaagaatttgccatttcctgggagtacactgtttccaagtgatttattgattacctatgaacagttcattaaagggctctgga

SEQ ID NO: 403928 - DNA, 481 bp, Homo sapiens
aaggggtgaaggccaggaaagaacaatcaaagctggaggcggagaaccaggaaagataattatgtcaaggatataactgaagaagtagggaatggccaacacaagtaaaataacgaccaaaacctgcccattggttctagcaattaggaacttgaaccttacccctagatatacctgggaattgtcagggacagaaggcagatcacatggcattgagaaaatgcagagatatcaaaaagctatgaactaaaagagatactaagcaaaagactgaccaaggaagatttttagaaagcagattgagttcttcgttcatccattcaatacactgagtgccttcaatgtgccagtagttctaggtgcaagaatcaataaacaaaacatagattcttctttcattgagcttattttcttgtgagagtaggcaattagcaaatattttatgacaaatgatgatgagtgttgtgagaaaaaaatagta

SEQ ID NO: 403929 - DNA, 398 bp, Homo sapiens
aactaatcaacttcatgtcagagcacataaaaatgtaaaagataaattccaagaaaaagaaaacatttcaaaattaatataagaagaaatggaaaatcaaaagaatatttaagaaactaaatatgtaattaaaaaccttcccataaataaaaatcctggccatgattttgttgaatttttccgaaaaacagaagagaaagaaaacactttaaactctttttatgaggctggcatatctttgataacaaaccctaatgaaaatgtcacaaggaaaccacagacccagatctctcatgagcacaggtgcaaaacaaacaaaatactcacttatcaaatcagactagatatgatgaccaagttaggtttatctcaggaatgcaagactggcttacacattc

SEQ ID NO: 403930 - DNA, 296 bp, Homo sapiens
cacgatattaagtttcttcctttgcgaaggatgcagagcaaagcagtcaacagccctccctccacacctggctttggcctgggactcttcctcccagtccccagccaagttccctttcaggattaagaaaatacaccaaatgagggagccaatgacagcctgtaaggcaggacaaatcctcagctctcatcgtgacttctcaaagcaaacttgctccgcggaggggagagggaaaatcatttactttaaggtgctatagaaaactggtcatcgggactgtggggagtctccctgaa

SEQ ID NO: 403931 - DNA, 577 bp, Homo sapiens
cggcacgaggccaggcaggaagcagccacttggtggggttggggtatgagtccttcctcgcgggggctcggtgggtcctgagtattctttggccggatttgctgatccgtctgctccagcataggttcacaaagtacagtccgcaggccagcagcatcatctgggaacttaggaaaaaaccagccctactgagtcagaaactggggatgtggcccaggcaatcttttaccaagacctccaggtgattataatgcaaggaaggattccctatcttggacctgaggctgctttcttgaagaaaacttgactttatttcatttagtgggaagagcagcagcccagctattaagttctaatatgcaataggctgcaggctgtgaagtgttcgtggcagtagactctgaagctaaggagctgagggcttaacaagtttctagaagctgccatcaacatgccaagtcagtaaaactgatagttgatcagatttcaaggtctggggagtatatccactgtgtactgggtcttgagctctagagagctaggccttgctaaaataaaagaattaccttacctacca

SEQ ID NO: 403932 - DNA, 1207 bp, Homo sapiens
aggcttttaaagagcatggaattgtagatttaaagaatggcagttatagcaaaaacctccttttcctccccaattgcctaatcaacatttagggccccctccactcacccgacctcaacaccttatattttatagagtaaatgtttatgttagtaaggtcagaagaaaaattgggtcattgttgagaaaagagggtaccacccttcttttgggggactggtcctcttcaagcttattataaaggtggtgtgatggggatgaaatctctacaagggactcacagtagaaattctggctttctggaaatctttcaaatgccatccctgtcacatggcatctattcccttctcatcgttaccaactccttttgaagctctggggctctagccacaccaggctgccctgtggctggcttctgccataagggcaggaacagaattgaagtgtgcgactgccatatcatttgctttaaaggaaaatgtcctggacttattctcttttctgttcctgagtccagcaggagtgtggctagagcaggccccagatttgacctcgaaggcaaggatgacgccttgtgggatgagcaagtaataggatgaaaggaacctgggttcctctgtcgcaccagcctggattgctcatttcagaattgggcaggagggacccctttccttagtctattcttgtgtccagcaactgtaacttaattccatcagctctaaatgttgccacaacttcatagaagttaaagtattttcatatatagtaatccatataaccactgcagttattttaggggtagacaggagtcttatttcagaagcccctcctaggtggagcctggtgactattaggccaggactctaccctggcggcttctcctctctccaccacccattcaggagcgttgagctgctgtgcaatggactgagctgttccaggtagtagtgagttctctgtgcctggaggtatcaaatataggctggggatgtcacaggaagaatctaagcactgcaaagaaagtgatagtgacttcgattcatcaagcttcccaattctgaattagggccctcaacggttccctattagaatttagtaaatttgaggtcgcctaaaagtaaaatgccgggccgaaaaattggggagaccataaactctggggggcccccccgtctttaacaaaacatggagggctccgtctgttgtg

SEQ ID NO: 403933 - DNA, 1375 bp, Homo sapiens
aggcttttaaagagcatggaattgtagatttaaagaatggcagttatagcaaaaacctccttttcctccccaattgcctaatcaacatttagggccccctccactcacccgacctcaacaccttatattttatagagtaaatgtttatgttagtaaggtcagaagaaaaattgggtcattgttgagaaaagagggtaccacccttcttttgggggactggtcctcttcaagcttattataaaggtggtgtgatggggatgaaatctctacaagggactcacagtagaaattctggctttctggaaatctttcaaatgccatccctgtcacatggcatctattcccttctcatcgttaccaactccttttgaagctctggggctctagccacaccaggctgccctgtggctggcttctgccataagggcaggaacagaattgaagtgtgcgactgccatatcatttgctttaaaggaaaatgtcctggacttattctcttttctgttcctgagtccagcaggagtgtggctagagcaggccccagatttgacctcgaaggcaaggatgacgccttgtgggatgagcaagtaataggatgaaaggaacctgggttcctctgtcgcaccagcctggattgctcatttcagaattgggcaggagggacccctttccttagtctattcttgtgtccagcaactgtaacttaattccatcagctctaaatgttgccacaacttcatagaagttaaagtattttcatatatagtaatccatataaccactgcagttattttaggggtagacaggagtcttatttcagaagcccctcctaggtggagcctggtgactattaggccaggactctaccctggcggcttctcctctctccaccacccattcaggagcgttgagctgctgtgcaatggactgagctgttccaggtagtagtgagttctctgtgcctggaggtatcaaatataggctggggatgtcacaggaagaatctaagcactgcaaagaaagtgtgattagttgatccttcgtatcatttcaaagctttccccaaattctttgaattttagggcctcttctaaactgtttttctccctgaactttagaagtaatatttagaagtaaataatatatctgaaggagttcactgctatgaagaagatgtaaaataaaaataaagcccctaggcccccaagcaaaacaaaacagactcattgtggtaaaaagagaccccaggaaacattaaaaaccagattctacagctttggcaaggcaagaggtcagtcacacccaacgctctcccacctcgataactgcctcaagactttctttcctaaaattaaactaaaaccagttactgaaa

SEQ ID NO: 403934 - DNA, 539 bp, Homo sapiens
gagcttaggacagcgccgggctcaagagatgtggctaccttccctcctgctttcggtactcagcgcaggcagggttcagtgcagcaagtaacagctgtggcttactggattgtctgcaaccattggcgactgagagatccctgcagccctcccagaccctcgatctgactggagccaggcccacgtggggaaagggttaaacgttggcagtgacttcacccctgcattggagcaggcggaggcagagaacctgctggaagctgttctgaaccagagaaggatgaaaatagctgccaaagatgttgccatagcaactgctttccttcctgacctccttggaagtgaactccctcattttccagagtagtcaaggaatttctgtgcctctacccatggctttggttaccaactcatccctgggggccttggtttctttctgtgaaatggaatattcattccagcactcaccaccttctaggctggagtaaggctccaactttgcaaatgctgttagtaaactgtagagctccgtgcacttc

SEQ ID NO: 403935 - DNA, 1019 bp, Homo sapiens
aaaccattcacaacaaatggaccttcagttttaagtaacactgtactggcttttagggtaatgctcatataacccagtgttcagcattcctccctcctgcccaatttaacatcaccgtcatccatttgccctattataaactataaccacccaatacattgttattattttttgaacaaacctttatgatatccaataggaataagatatgcatatgtgtatatttgtgtgtgtgtgtgtgtgtgtgtgtgtgtgtgtatgatctgaatttctaacctgtaacatttttcttctctctgatgaacttcttttaacattattggcaagacaagtacaccaatcacatgttctctcaatttcattcctttttttccccattagattaatttcaattcatttatcatcattttaactgattttttttttggctgctcacatctgttgaacacttgtgaagatgtcttcattttagttgtaccttgcagctgcataaattctatatggctaaatttctacccctttttttttgagacagaggttcgctcttgttgcccaggctgaagtgcagtggcacgatctcggctcactgcaacctccacatcctgggttcaagcgattcttctgcctcagcctcccaagtagctgggattacaggcgtgcaccaccatgcccagctaattttgtatgtttagtagagatagggtttcaccacattggccaggctggtctcaaactcctggcctcaggtgatccacacaccttggcctcccaaagtgctgggattataggtgtgagccaccacgcccagttaatttctactttttaatagatattattttatctctgtatctatattctggttttcttttagttatttgttcatcattgcctttacttcattgaacatatttaagatagttgttttaacgtttttattcagtgagtggtgtctgaggtttctcagagatggcttatctcaattatattttttccaattgatgaaccatattttcatgttt

SEQ ID NO: 403936 - DNA, 496 bp, Homo sapiens
aagaagggaagatggagcctccgttttgaacatacctggctcccaggtagcccttttctgttggcacagctgctggcattcacccgtgcaagcttccagcttgcttgtctatgtttgcagctcgatttttcaggctgctctttgttagaaaagaataacttcttgggctactttttgttagaaaggaagccttgccaaggactcttctaccctcactatctgcctaatttctttctatctcctgtatcaaaaaggtgaaagttcttgatttgataaggaaagaaaaaaaatccatatgctgaggttgctatgttctctggtaaggacgaatctgctgggtgtgatggtgctcgcctgcagtcccagacactcaggaggctgaggcgggaggatcccttctgcccaggagttcaggtccaacagacaacattgagaccccatgtctggaaagaagtaaataaatgaaataacaaaagaaactctgggacctagacta

SEQ ID NO: 403937 - DNA, 1097 bp, Homo sapiens
gatttcaattagcacttacaggtatgagtctcatttgttttttagtttacctctttttaaagagagaaaacctacctttcttgtaatatctcacttctaacttggagctagtactctgaaagaattaattagcagttcgtttaaaatgtttttatttttcatggatggaggactatcatttgtcactttattcccccctcccacttcctatttataccatttataacctaatgttcagtaatattggaaaaatattctaggaaatgcattgtgggtaaaatggtggcttttcctcttctctcgtctgtttctgcccatcccccatttaaatcactcaaataaatcaatagtttattaacagtattcctttcctctctgagtgggtattaacaagattagcattaatgggaattaaattggtttagagaggaacacatatgcacgaaatatataaaacatttataattagcctgtcagcaacattttattagaagtttaaacccaagaggaaaaatgtcttctatttcatggaagttttctttatctgccaaaatttaaacgacagacactctaaaataatattctttttcttctttaatgttgtcaatcaaaagaaactaaagtgttttaaaatatgcagtacaattgtacatttacatagctgctgcattaggtgatgtaatatttcttgagaagcttaacacaggattaaaatgaaggaaaaaatattttaagtgttagatattttgtcattgctccaaatctttggatttatctgttaatatcccatttatagaagttaagtaaaccccaaatccaggtcaccttttttcagttgatttccttcatgtctatgctctcaatttcccagtgccacagactgtttttattctacttgaatcactagctgcaacaagatactcattttaaactcttgtcatcatttctcttagctcattttgtttgtacaactgattcttttgtaagtgtttgcttggcattatgcaaaagtggcttgcacaaagaaacaattgcattctgcaaccttcatttttttaatgtgaaagaaataaaagaacagaattgaatgcaaagga

SEQ ID NO: 403938 - DNA, 451 bp, Homo sapiens
ccagcaaggtgaccctcacaacagactctggaatcagcacaccgaagccagaaaaaagaggcacacctccccaagatgggctctgtggaggctaatggtagaaaccaggctccagagaccaaagggaagctggtatttggttatctccagaatcaactgccatcatgtattcagcagacagcagcgccctgtgtcgtctacctgcactgtatcacatcactctctaggtcatttggctcacaaaattgatttaggagagattattcaattccattttacattttcatgttttggaactctgccagcagcaacttctgttcttccagaggtcaggaagctatggacaaggcatctcttgctgttgtaaacggaactccatattccctttatgaatttcctgtcaatcttcaaattacttcaaatacgattgcccttcacttaaacaatgttt

SEQ ID NO: 403939 - DNA, 523 bp, Homo sapiens
ggaatacatcctgctcagtacctgctcctatagctccttgaagttctgtccatcgaaaaataaggatccatttaccagtatatagaggataactcgcagacgccatacatccaccagctcatatttgtggccctagaagaattccagggcagcctaaggggactgccacaaaaggtatccagcttgttgcgaaaggcgaatttattcctgaacccaatctgtgatgttcatgttaacatggacaatacatttctggtgacaatacacaatatctgtggacaatgcacttctggtaacagcttgcatagcagacacttttggtggaatttgcttcaggcctctttcctgctgctgtgagcaggtattcacaaacttctcgctagcgtgctttgtgatgaggcagagattcctcactatcgatcacagcaaatacttcactatgttggggtgatctgagccttcatgattcctactttgtggatggtgtctggaggctggaggagatctgctgagtctcatcaat

SEQ ID NO: 403940 - DNA, 710 bp, Homo sapiens
atgattactaatgatttattgttctttttttttattgttctaaaagtgctctgatgtggtgccttgatgtctaatgaaaagaaattggtcttaaaaagctactcattgtttatcctgactctgagataacacatttttcttctgataaaatatttttcttatttattgttcaaaacacacaatatagacaataactctaattctggtgcagttttatttagtagtgttttatccccggtgcctggctgtctacagtcatacctcagcacatagctttactctgagataagccctctctcctttgctctttctcccatgctttctggagtttgtctgcaggatgcaggttttgaactgaagagcgcagtggagttcttactgtgcctttccggttccagcacaatcaaagttttgtgtttggaattgtccttgacattctttcgtcccacaatggggtggacacagtgtgctggaaaccatgacatcattatcattgacacagacttaaataaatcacctgcatcttggcctctttctgcttattcaaggattcttcatcttaaggaagaaagtgctctttatttttacaaatcttcatcccaggggtgactggaagacgcaaacttttacaagtgtcttagagaatgtttaaggttagacataaggcagaaagacagccagattgcctttaattcggaggcaatattcct

SEQ ID NO: 403941 - DNA, 653 bp, Homo sapiens
atctcagtacatctatagcaagtgaagaggccgagttagtcccttagaaacctcccagtggccggccaccgtgcccagcccaatttttgtatttttagtagagacgggttcaccatgttggccaggctagtcttgaactcctgacctcaggtgatctgcctacctcagcctcccagtgtgagccaccgcacccagcctggattgttgaattcaatgcttgggtcacctccaaattcattttcacagtctttcatgttttggtcatactacattgtattttgctgccatatgactgatctttttttgttaaatgtgagatactttttaaaaaatatttaacaatgcattgaggcctagtagcatgttatcttgctgcagaagagatgggagtctacttctgggggatggtcaggggtcctccgtacaggctgcaattgaggtcgtctctgcaggctcagtccctacaaaggccagggtatttcctgtccacctctattctgatgcatgactcttctgggtctcaaccagagccagtggacttcagtatggatcgctttcattggcagaccctcaatccacttgttttccatctaaccccacgcatgtgtgcaaaagctgctgtgcttctttgcatctcagtagttccttctgga

SEQ ID NO: 403942 - DNA, 500 bp, Homo sapiens
cacagcggtcacgtgacatggccccggggagccgaggtgagcgttccagcttccggagccggagggggcccggcgtacccagcccccagcccgacgtgaccatgctgtcccgcctcctaaaagaacaccaggccaagcagaatgaacgcaaggagctgcaggtgtggcccaggcctacatgaaccagagaaagctggaccatgaggtgaagaccctacaggtccaggctgcccaatttgccaagcagacaggccagtggatcggaatggtggagaacttcaaccaggcactcaaggaaattggggatgtggagaactgggctcggagcatcgagctggacatgcgcaccattgccactgcactggaatatgtctacaaagggcagctgcagtctgccccttcctagcccctgttccctcccccaaccctatccctcctacctcacccgcagggggaaggagggaggctgacaagccttgaataaaacacaagcctccgtt

SEQ ID NO: 403943 - DNA, 573 bp, Homo sapiens
cacagcggtcacgtgacatggccccggggagccgaggtgagcgttccagcttccggagccggagggggcccggcgtacccagcccccagcccgacgtgaccatgctgtcccgcctcctaaaagaacaccaggccaagcagaatgaacgcaaggagctgcaggaaaagaggaggcgagaggctatcactgcagcgacctgcctgacagaagctttggtggatcacctcaatgtgggtgtggcccaggcctacatgaaccagagaaagctggaccatgaggtgaagaccctacaggtccaggctgcccaatttgccaagcagacaggccagtggatcggaatggtggagaacttcaaccaggcactcaaggaaattggggatgtggagaactgggctcggagcatcgagctggacatgcgcaccattgccactgcactggaatatgtctacaaagggcagctgcagtctgccccttcctagcccctgttccctcccccaaccctatccctcctacctcacccgcagggggaaggagggaggctgacaagccttgaataaaacacaagcctccgtt

SEQ ID NO: 403944 - DNA, 393 bp, Homo sapiens
ctaagacaaactcagaccatctcttttcggtctgaaaaaataatccgtttaattgaaaaacctggaggatactattccactcccccagatgaggaggctgaggagaccagacccctacatcacctcgtagccacttctgatactcttcacgaggcagcaggcaaagacaattcccaaaacctcgacaaaagcaattccaagggctgctgcagctaccaccagcacatttttcctcagccagcccccaatcttctccacacagccctccttatggatcgccttctcgttgaaattaatcccacagcccacagtaacattaatgcagcaggagtcggggactcggttcttcgacatggaagggattttctcccaatctgtgtagttagcagcccc

SEQ ID NO: 403945 - DNA, 335 bp, Homo sapiens
ctaagacaaactcagaccatctcttttcggtctgaaaaaataatccgtttaattgaaaaacctggaggatactattccactcccccagatgaggaggctgaggagaccagacccctacatcacctcgtagccacttctgatactcttcacgaggcagcaggcaaagacaattcccaaaaccagcccccaatcttctccacacagccctccttatggatcgccttctcgttgaaattaatcccacagcccacagtaacattaatgcagcaggagtcggggactcggttcttcgacatggaagggattttctcccaatctgtgtagttagcagcccc

SEQ ID NO: 403946 - DNA, 419 bp, Homo sapiens
  misc_feature (260)..(260): n is a, c, g, or t
ctaagacaaactcagaccatctcttttcggtctgaaaaaataatccgtttaattgaaaaacctggaggatactattccactcccccagatgaggaggctgaggagaccagacccctacatcacctcgtagccacttctgatactcttcacgaggcagcaggcaaagacaattcccaaaacctcgacaaaagcaattccaagggctgctgcagctaccaccagcacatttttcctcagcaaaaaagaaaaaaaaaaaaaanaaagacgaaaataacaagacaaaaacgcccgggggctcatattggaggggggggcggaaacaaagggggtaaaaaaggggcacaagggtccacagagggggccgaagccactttttggttacacaaaggggggaaaaacggggggcccccctaaaagga

SEQ ID NO: 403947 - DNA, 139 bp, Homo sapiens
gggcagactgcagctgccctttgtagacatattccagtgcagtggcaatggtgcgcatgtccagccctatccctcctacctcacccgcagggggaaggagggaggctgacaagccttgaataaaacacaagcctccgtt

SEQ ID NO: 403948 - DNA, 754 bp, Homo sapiens
  misc_feature (595)..(595): n is a, c, g, or t
cacagcggtcacgtgacatggccccggggagccgaggtgagcgttccagcttccggagccggagggggcccggcgtacccagcccccagcccgacgtgaccatgctgtcccgcctcctaaaagaacaccaggccaagcagaatgaacgcaaggagctgcaggaaaagaggaggcgagaggctatcactgcagcgacctgcctgacagaagctttggtggatcacctcaatgtgggtgtggcccaggcctacatgaaccagagaaagctggaccatgaggtgaagaccctacaggtccaggctgcccaatttgccaagcagacaggccagtggatcggaatggtggagaacttcaaccaggcactcaaggaaattggggatgtggagaactgggctcggagcatcgagctggacatgcgcaccattgccactgcactggaatatgtctacaaagggcagctgcagtctgccccttcctagcccctgttccctcccccaaccctatccctcctacctcacccgcagggggaaggagggaggctgacaagccttgaataaaacacaagcctccgttaaaaaagaaaaaaaaaaaaaanaaagacgaaaataacaagacaaaaacgcccgggggctcatattggaggggggggcggaaacaaagggggtaaaaaaggggcacaagggtccacagagggggccgaagccactttttggttacacaaaggggggaaaaacggggggcccccctaaaagga

SEQ ID NO: 403949 - DNA, 764 bp, Homo sapiens
gtgtatatcttccactttattggcagttgacattcccttactcacaagtaacagttaaatatttagggacatgtactaagttttacaaacagtacaaatatttaagagtgttgattgggaggcctctcgtcctggcggcgggaaggagcgactctggagggaggagggtgtggggaaccccccagagatgggcttcttggaggcctgaaaccaccggaacggaggtggggcacttgtttcctgagtccgggctggaaatctcggagttaccgattctgcggccgagtagtggagaaagagtgcctgggagtcaggagtcctgggcgctgccgctgacttcctggcgtccctgaaaaagaggaggcgagaggctatcactgcagcgacctgcctgacagaagctttggtggatcacctcaatgtgggtgtggcccaggcctacatgaaccagagaaagctggaccatgaggtgaagaccctacaggtccaggctgcccaatttgccaagcagacaggccagtggatcggaatggtggagaacttcaaccaggcactcaaggaaattggggatgtggagaactgggctcggagcatcgagctggacatgcgcaccattgccactgcactggaatatgtctacaaagggcagctgcagtctgccccttcctagcccctgttccctcccccaaccctatccctcctacctcacccgcagggggaaggagggaggctgacaagccttgaataaaacacaagcctccgtt

SEQ ID NO: 403950 - DNA, 1047 bp, Homo sapiens
gtgtatatcttccactttattggcagttgacattcccttactcacaagtaacagttaaatatttagggacatgtactaagttttacaaacagtacaaatatttaagagtgttgattgggaggcctctcgtcctggcggcgggaaggagcgactctggagggaggagggtgtggggaaccccccagagatgggcttcttggaggcctgaaaccaccggaacggaggtggggcacttgtttcctgagtccgggctggaaatctcggagttaccgattctgcggccgagtagtggagaaagagtgcctgggagtcaggagtcctgggcgctgccgctgacttcctggcgtccctgaaaaagaggaggcgagaggctatcactgcagcgacctgcctgacagaagctttggtggatcacctcaatgtgggtgtggcccaggcctacatgaaccagagaaagctggaccatgaggtgaagaccctacaggtccaggctgcccaatttgccaagcagacaggccagtggatcggaatggtggagaacttcaaccaggcactcaaggaaattggggatgtggagaactgggctcggagcatcgagctggacatgcgcaccattgccactgcactggaatatgtctacaaagggcagctgcagtctgccccttcctagcccctgttccctcccccaaccctatccctcctacctcacccgcagggggaaggagggaggctgacaagccttgaataaaacacaagcctccgttaaaacaacaatgaaccacaacaaacgaagcaccgacaacaattgggcggggcgcccggccccgaaaggtattaaacccatctgtagggccggcccaggggacaccacatgcgcaacgggccaggaaccggtcggcgtgcgggttcccaaaaaagcgggaccgcggcgcaccccagggtgggccggttcacaggcaggtcgtacccgcgcggggcacagacggcagggagcgaggagcgagggaggcacgaggaggaccgacccacacccaggcacggcccacg

SEQ ID NO: 403951 - DNA, 514 bp, Homo sapiens
cacagcggtcacgtgacatggccccggggagccgaggtgagcgttccagcttccggagccggagggggcccggcgtacccagcccccagcccgacgtgaccatgctgtcccgcctcctaaaagaacaccaggccaagcagaatgaacgcaaggagctgcaggaaaagaggaggcgagaggctatcactgcagcgacctgcctgacagaagctttggtggatcacctcaatgtgggtgtggcccaggcctacatgaaccagagaaagctggaccatgaggtgaagaccctacaggtccaggctgcccaatttgccaagcagacaggccagtggatcggaatgcatcgagctggacatgcgcaccattgccactgcactggaatatgtctacaaagggcagctgcagtctgccccttcctagcccctgttccctcccccaaccctatccctcctacctcacccgcagggggaaggagggaggctgacaagccttgaataaaacacaagcctccgtt

SEQ ID NO: 403952 - DNA, 691 bp, Homo sapiens
gtgtatatcttccactttattggcagttgacattcccttactcacaagtaacagttaaatatttagggacatgtactaagttttacaaacagtacaaatatttaagagtgttgattgggaggcctctcgtcctggcggcgggaaggagcgactctggagggaggagggtgtggggaaccccccagagatgggcttcttggaggcctgaaaccaccggaacggaggtggggcacttgtttcctgagtccgggctggaaatctcggagttaccgattctgcggccgagtagtggagaaagagtgcctgggagtcaggagtcctgggcgctgccgctgacttcctggcgtccctgatgtggcccaggcctacatgaaccagagaaagctggaccatgaggtgaagaccctacaggtccaggctgcccaatttgccaagcagacaggccagtggatcggaatggtggagaacttcaaccaggcactcaaggaaattggggatgtggagaactgggctcggagcatcgagctggacatgcgcaccattgccactgcactggaatatgtctacaaagggcagctgcagtctgccccttcctagcccctgttccctcccccaaccctatccctcctacctcacccgcagggggaaggagggaggctgacaagccttgaataaaacacaagcctccgtt

SEQ ID NO: 403953 - DNA, 1458 bp, Homo sapiens
gtgtatatcttccactttattggcagttgacattcccttactcacaagtaacagttaaatatttagggacatgtactaagttttacaaacagtacaaatatttaagagtgttgattgggaggcctctcgtcctggcggcgggaaggagcgactctggagggaggagggtgtggggaaccccccagagatgggcttcttggaggcctgaaaccaccggaacggaggtggggcacttgtttcctgagtccgggctggaaatctcggagttaccgattctgcggccgagtagtggagaaagagtgcctgggagtcaggagtcctgggcgctgccgctgacttcctggcgtccctgaaaaagaggaggcgagaggctatcactgcagcgacctgcctgacagaagctttggtggatcacctcaatgtgggtgtggcccaggcctacatgaaccagagaaagctggaccatgaggtgaagaccctacaggtccaggctgcccaatttgccaagcagacaggccagtggatcggaatggtggagaacttcaaccaggcactcaaggtgggccatactccctacctcaccaccccaatcctgggcccccattggctgcctccagtcaggttacctcaggtttaggttaaggaggaagtagggtggtcccagaaaccccatctatagccccagtgtcagaaaaggtagagaaagaaagaaaagcagttggtgggtccaagtaaagccttttccaggagatgaataaaacgtattccccagactggaagccatactctacccattctgattcctgggctcccacctcctctcccccttcccaggaaattggggatgtggagaactgggctcggagcatcgagctggacatgcgcaccattgccactgcactggaatatgtctacaaagggcagctgcagtctgccccttcctagcccctgttccctcccccaaccctatccctcctacctcacccgcagggggaaggagggaggctgacaagccttgaataaaacacaagcctccgttttctctgtggtgtgtttcagagagctactagctccagtgtcgggggtgggagtggaaggttcaaaggtggtttccctgagggacaggtaccttttggggagagggtggaactagcttcctcttactatcccaactctcttctcctccatggcccttgtgcaggtgtctgttaggcaagcagagggtgggagttcccatccctcctgagagaaggtcctagtagccctgccccaagcttcctaattcaggacttgtttcctacagaagagaaacaaggcaaggtacaggcctggtccccagctctggctttctgcctctccacgtgctcatggcctctcccaggctaactctaagcagtgtcatgagtctgagccaggtgggagattaattcctgggggcacttcagggctgagaagggg

SEQ ID NO: 403954 - DNA, 1194 bp, Homo sapiens
cacagcggtcacgtgacatggccccggggagccgaggtgagcgttccagcttccggagccggagggggcccggcgtacccagcccccagcccgacgtgaccatgctgtcccgcctcctaaaagaacaccaggccaagcagaatgaacgcaaggagctgcaggtgtggcccaggcctacatgaaccagagaaagctggaccatgaggtgaagaccctacaggtccaggctgcccaatttgccaagcagacaggccagtggatcggaatggtggagaacttcaaccaggcactcaaggtgggccatactccctacctcaccaccccaatcctgggcccccattggctgcctccagtcaggttacctcaggtttaggttaaggaggaagtagggtggtcccagaaaccccatctatagccccagtgtcagaaaaggtagagaaagaaagaaaagcagttggtgggtccaagtaaagccttttccaggagatgaataaaacgtattccccagactggaagccatactctacccattctgattcctgggctcccacctcctctcccccttcccaggaaattggggatgtggagaactgggctcggagcatcgagctggacatgcgcaccattgccactgcactggaatatgtctacaaagggcagctgcagtctgccccttcctagcccctgttccctcccccaaccctatccctcctacctcacccgcagggggaaggagggaggctgacaagccttgaataaaacacaagcctccgttttctctgtggtgtgtttcagagagctactagctccagtgtcgggggtgggagtggaaggttcaaaggtggtttccctgagggacaggtaccttttggggagagggtggaactagcttcctcttactatcccaactctcttctcctccatggcccttgtgcaggtgtctgttaggcaagcagagggtgggagttcccatccctcctgagagaaggtcctagtagccctgccccaagcttcctaattcaggacttgtttcctacagaagagaaacaaggcaaggtacaggcctggtccccagctctggctttctgcctctccacgtgctcatggcctctcccaggctaactctaagcagtgtcatgagtctgagccaggtgggagattaattcctgggggcacttcagggctgagaagggg

SEQ ID NO: 403955 - DNA, 329 bp, Homo sapiens
tgagaaacggaggcttgtgttttattcaaggcttgtcagcctccctccttccccctgcgggtgaggtaggaggcatcgagctggacatgcgcaccattgccactgcactggaatatgtctacaaagggcagctgcagtctgccccttcctagcccctgttccctcccccaaccctatccctcctacctcacccgcagggggaaggagggaggctgacaagccttgaataaaacacaagcctccgttaaaaaaaaaatcctctaaaaaaaaaaacgtttttaccaattcacttggcccgccaatttttacaaccgttggggaactgggaa

SEQ ID NO: 403956 - DNA, 222 bp, Homo sapiens
cggtcacgtgacatggccccggggagccgaggtgagcgttccagcttccggagccggagggggcccggcgtacccagcccccagcccgacgtgaccatgctgtcccgcctcctaaaagaacaccaggccaagcagaatgaacgcaaggagctgcagggagccaaatatcctgtcggccgttttctcttcggccgcggcctagcttcagcccggagcctggat

SEQ ID NO: 403957 - DNA, 656 bp, Homo sapiens
cacagcggtcacgtgacatggccccggggagccgaggtgagcgttccagcttccggagccggagggggcccggcgtacccagcccccagcccgacgtgaccatgctgtcccgcctcctaaaagaacaccaggccaagcagaatgaacgcaaggagctgcaggaaaagaggaggcgagaggctatcactgcagcgacctgcctgacagaagctttggtggatcacctcaatgtgggtgtggcccaggcctacatgaaccagagaaagctggaccatgaggtgaagaccctacaggtccaggctgcccaatttgccaagcagacaggccagtggatcggaatggtggagaacttcaaccaggcactcaaggaaattggggatgtggagaactgggctcggagcatcgagctggacatgcgcaccattgccactgcactggaatatgtctacaaagggcagctgcagtctgccccttcctagcccctgttccctcccccaaccctatccctcctacctcacccgcagggggaaggagggaggctgacaagccttgaataaaacacaagcctccgttaaaaaaaaaatcctctaaaaaaaaaaacgtttttaccaattcacttggcccgccaatttttacaaccgttggggaactgggaa

SEQ ID NO: 403958 - DNA, 602 bp, Homo sapiens
  misc_feature (154)..(155): n is a, c, g, or t
  misc_feature (228)..(229): n is a, c, g, or t
  misc_feature (382)..(382): n is a, c, g, or t
  misc_feature (581)..(581): n is a, c, g, or t
ctaagacaaactcagaccatctcttttcggtctgaaaaaataatccgtttaattgaaaaacctggaggatactattccactcccccagatgaggaggctgaggagaccagacccctacatcacctcgtagccacttcctcgtgcccgaattcgnnaggttcttgtgccccagtgtggagcaaaacattgcctgtcccattctgatatacttcagaatttgagaagcannaagttaatgtggaacaaaaagttttcaccatctctcaagccccaaaggactggaagccacctctggaataatgtgttaaatatctgtatattatatatatgtaagagaaaaatctaatttttttggtttgatttccttcccattaagaatctntgtttttttgatacccttgtctccctgagactctttcttggacacgtgttgatgtggatggcactcctgctctccatcttttatgggcagagagatttcaaaacctgagcaggatcatgtctggcagttactaaacagggactttgtccatggtttgtatcatggggtgccactgctgtctaaactctgctctcctaantagctgactcctgaaatgaat

SEQ ID NO: 403959 - DNA, 915 bp, Homo sapiens
cacagcggtcacgtgacatggccccggggagccgaggtgagcgttccagcttccggagccggagggggcccggcgtacccagcccccagcccgacgtgaccatgctgtcccgcctcctaaaagaacaccaggccaagcagaatgaacgcaaggagctgcaggaaaagaggaggcgagaggctatcactgcagcgacctgcctgacagaagctttggtggatcacctcaatgtgggtgtggcccaggcctacatgaaccagagaaagctggaccatgaggtgaagaccctacaggtccaggctgcccaatttgccaagcagacaggccagtggatcggaatggtggagaacttcaaccaggcactcaaggaaattggggatgtggagaactgggctcggagcatcgagctggacatgcgcaccattgccactgcactggaatatgtctacaaagggcagctgcagtctgccccttcctagcccctgttccctcccccaaccctatccctcctacctcacccgcagggggaaggagggaggctgacaagccttgaataaaacacaagcctccgttaaaaaaaaaaaaattggagagtagttctctctctcgctgcgcgtggccccggaggagcacccagtgctgctgaccgaggcccccttgaaccccagggcaacggaggagaagatgactcagattatgttggagaaccttcaaaacccggggccatgtacgtgggccatccaggccgtgtgtccctctacgccttggggcgcaccatggggattggtcatgggaccttttgggaaacggggtcacccacagggtgcccatctagagggttaggccctcaccaagcaatcctgggtctggacttgggttggcggggactgaccagattacctcattgaagatcta

SEQ ID NO: 403960 - DNA, 1267 bp, Homo sapiens
cacagcggtcacgtgacatggccccggggagccgaggtgagcgttccagcttccggagccggagggggcccggcgtacccagcccccagcccgacgtgaccatgctgtcccgcctcctaaaagaacaccaggccaagcagaatgaacgcaaggagctgcaggaaaagaggaggcgagaggctatcactgcagcgacctgcctgacagaagctttggtggatcacctcaatgtgggtgtggcccaggcctacatgaaccagagaaagctggaccatgaggtgaagaccctacaggtccaggctgcccaatttgccaagcagacaggccagtggatcggaatggtggagaacttcaaccaggcactcaaggtgggccatactccctacctcaccaccccaatcctgggcccccattggctgcctccagtcaggttacctcaggtttaggttaaggaggaagtagggtggtcccagaaaccccatctatagccccagtgtcagaaaaggtagagaaagaaagaaaagcagttggtgggtccaagtaaagccttttccaggagatgaataaaacgtattccccagactggaagccatactctacccattctgattcctgggctcccacctcctctcccccttcccaggaaattggggatgtggagaactgggctcggagcatcgagctggacatgcgcaccattgccactgcactggaatatgtctacaaagggcagctgcagtctgccccttcctagcccctgttccctcccccaaccctatccctcctacctcacccgcagggggaaggagggaggctgacaagccttgaataaaacacaagcctccgttttctctgtggtgtgtttcagagagctactagctccagtgtcgggggtgggagtggaaggttcaaaggtggtttccctgagggacaggtaccttttggggagagggtggaactagcttcctcttactatcccaactctcttctcctccatggcccttgtgcaggtgtctgttaggcaagcagagggtgggagttcccatccctcctgagagaaggtcctagtagccctgccccaagcttcctaattcaggacttgtttcctacagaagagaaacaaggcaaggtacaggcctggtccccagctctggctttctgcctctccacgtgctcatggcctctcccaggctaactctaagcagtgtcatgagtctgagccaggtgggagattaattcctgggggcacttcagggctgagaagggg

SEQ ID NO: 403961 - DNA, 528 bp, Homo sapiens
gtgtatatcttccactttattggcagttgacattcccttactcacaagtaacagttaaatatttagggacatgtactaagttttacaaacagtacaaatatttaagagtgttgattgggaggcctctcgtcctggcggcgggaaggagcgactctggagggaggagggtgtggggaaccccccagagatgggcttcttggaggcctgaaaccaccggaacggaggtggggcacttgtttcctgagtccgggctggaaatctcggagttaccgattctgcggccgagtagtggagaaagagtgcctgggagtcaggagtcctgggcgctgccgctgacttcctggcgtccctgaaaaagaggaggcgagaggctatcactgcagcgacctgcctgacagaagctttggtggatcacctcaatgtggggtatggacctcttatcaacatcagtttcctccttccccaccccgcccaagtttaggcactggccagtctggccctcaaatagctgttgaaggggtgggatgt

SEQ ID NO: 403962 - DNA, 270 bp, Homo sapiens
ggagacctgcaagcctgatggggttggggggtagtgttctctgatttctttaggctcgttttatagaaacaaagaacaagttctctcccctccttcccaagacttgtgcatatttacagagcacaactgcagttttaataaaacatctgttcttgcttctgctgatgagtttccataattgttttcagacaaatttaacaggaaaatataaatatatttagaaaaatctaagtcccagctttccccctatagacagccattcttttgcca

SEQ ID NO: 403963 - DNA, 335 bp, Homo sapiens
ctgggcctaggttggctggcagagcccctccaggaatatctgacaggagagttcatgtgctaattaagcatgcatctgatattgcagacacgacaatcaattagcatagctgattagacacctccacgaatgagctgtggtggctcctgaatgccctgaacccactctggcccactctcactcagagcaaccgcccccgactcactcattcatttgaagaaagagcagaggctttggtagagctgtggtctttagcctcagtttcttcacctacaacatggaaatattagcattaaccttgttgggttgttgtgagattaatatatggagagtac

SEQ ID NO: 403964 - DNA, 435 bp, Homo sapiens
tgtcaccctgagaataggttggttgatgctggatgaatattttagcttatgatgtttaagatattctaatattttattaaaagctttcttttctctctgtaactaagagttaacagattaaagcattattggaattgttcaagtcttgtgaaagtatgactaatttctggcattgacagctgttaacggtagaatttgagaaaacttttaacatacaatcttgcattaccagctcaatgtcatatattaaattttatgtcatatattaaattttagagtccatataaaagcataatgcagaaataaagctaaaaaccccaaatttgttaggatattaagttttaatacatagaaaaatgaaatttctgccaacctgtagttctagttcaaggattggtaattagaagttaacttggttttttaatagaacacaac

SEQ ID NO: 403965 - DNA, 618 bp, Homo sapiens
ttttcagaagatggggtcctgctacactgcccaggctgaacacaaaaaatgtatttcatttactatctaaagcaaatgggaatcattattatactaaattccctaaaacatagggtgcatcacaatccaaaggagactgtgaaaatttctgggaaaagtttgctcttttatcagaatcaggctgtgctagggaagagaggtagaggtcgggagaggttgagaaatggcaaccttactggtgagaatagtagcttccaactgataaattttattctaaaaatgcaaaaccactgcttcatgagctcaaatctgttttttctagctaagagaccacaggtccaaagaactaaagggcaagcagggacctcattatttatcaattccatcataattatttactgttgacttgaggctcaagttagaattcttatgtgtagattactatatttaaatggccatatccgttaaagaaggatgtattttgtagtatattgggtaattcttcaattaaagtaagtcgcattagtatcttaattattttaagaatgactaagtgaaataagtatactttaaattttattaaaacactcagtccttaattagggcttagttaagtcg

SEQ ID NO: 403966 - DNA, 402 bp, Homo sapiens
catcacactcccctccccctttttgtcaagttttaccatcctggtttggaaacagattcttgtgatcaaatttcagatcctgctaattaagacttttatcaacttaaagtataataaaaaaaatacaaaaaaaaaatcattcctctcctgtctgcagtactccccacaatccttccctagaatctccctgagcagagtatatcaggtaccaggtcaaagggaagaccaaatgagccattagtaatcacaacttgaagcccaaagccaagagcaacaggaggatgtcccagcagtcagaaaacgtagcaaggcctgaggacaaaggaattgtctctatacagtataataacatgatttgaccaacaaaacaatgacatagtgttttcccccattatggacaaa

SEQ ID NO: 403967 - DNA, 593 bp, Homo sapiens
aggttttggagtggctgtagccagcatcacacacggatggacacattttaccttctagaatacagattgtccttggagaaaagcaaccacacaagaatcaccctcagtgactactgggccccactcaaaaggagggcagcttacactcacagcaagatcctgttgcaacccggagaatcccaggatttctaaagtaaaggacctaagaaagcatctggttgttgacataggattaaccaaagaacatagtctatacttttgggtctttgatttgtactaggcagagtctttgtacctgttcttttaagcaggtaattcacaagtaggcagaacctaaattgtcaagtgggaattttgaaaaaactttactcaagtgcctcggcttcagactaagaattaatttcatcatggagagcagtttagctgcacctttctctggggtttatctcacttaattcaccaaactttacttgttccaaaaaccgtaaagtctttgtttgaaaggcatttcatcaagatgtatgatatgctctttttattcctagtggcagcaatacaaataaattaaacgtttataacttgaaaggtgtgac

SEQ ID NO: 403968 - DNA, 170 bp, Homo sapiens
aattgagtaccagggggacccggagctgcagcccatctggagctatgagatcgccagcttggtccacacgctcttcaggctgtcgtctgccatcaaccacagagtgggcaggagggcaggcctggcctcttcagagagggttctagatgctcctgcttggggtgcagtcc

SEQ ID NO: 403969 - DNA, 479 bp, Homo sapiens
ctgctctcccgagaggcgggcagggctggggctaggggctgtccaggagtgttctggactgtcccgtcgccaccattcccacaggctgctcaggaccgaggctgagacgggcgaccaggacgggactgtatggctgcaggaggctacacagcctcaggaggctgcttctaagaggcccacgtcgcctgcatggggacgcgcctggctctccagcatgtggtcatttgaattgtacatgtttcactaggatgcctacagaaaagtatacagaagatctggaaaaagtttttgaaatgttgaaaacttagctacttttaaaatgaaaaaaatagctttataattatcaaagcaatatatcccagtgtaaattttaaaataatttgctacattatagtaagcatcttatctctatgtgccctataacattatgttgtatagtttaaatatatacaataaaatttattttaaaaaatagcagg

SEQ ID NO: 403970 - DNA, 353 bp, Homo sapiens
ggtgtaaagaatatagactttggagttggctgggcctggatcaggatcttggttctaacacttgccaactgtattactgacttctttaaaagtcttctgataaatgaggataaaaatccctaacccttgcctttataagaactgataaaaataaggttgttactattattttgtactacacagcacctgacccattgccaggccccatatggacactattgaatcattaatagagagtggtctatggcatttccaaaagagcatagggcctaacaaaaataggatatgaaatgtgttcatgtgaaagaggaaaagagaggtaagtctaaacatttagaaatgcctgagacaaa

SEQ ID NO: 403971 - DNA, 493 bp, Homo sapiens
gttgcacacgtctttaaagtccaccagaatccaacgaaatggagcctcgaggaaaagaagagatttagccgcgaaggattctgggaatgctgggcttacaggggcgccgatcttcgctggcgctaggcgcttggtttcctctccgcagctctctgcgcacggtacgcctgtccctcgttggccttccactcagggcaatcaccagccactctcagggtcctcttgagccgtactaaaagtttgggaagactaaaggaaatcagaagtccctcagtctgaacaggacagccgtgagtgggtggcctgggaccctcaaagtataaaaacctatcggccggcgggaactgcttcagtcatttcaggggcagtgtttgatcagcacttctgcgggaggagattcctgaatcctgtgttccttaagggcttccctgctgcaggctggggatgtttcaatggactttccctcgagccctttggaaattacttcttaagc

SEQ ID NO: 403972 - DNA, 454 bp, Homo sapiens
attctctccaggaaaagtgaggaaggcttcataatagccatatggaacttgtcgtgagaatgggggttttcaatgaaagaaaagtcattttaagcaaagaataccttgctgtggtttgaatgtgtcttccaataagttcctgtgttggaagcttaatctccaatgcaacagtggtatgaaatgggctctaataagagttgattggacctttcctaataagagatgattggataaatggattaatgttgttgtcatgtgagcaggttagttattgtgagagtgtgtcattgtaaagagaatctgatcactggagcctctctctgtcttgtgtaccaacttctcttccaccatgctatggtatagcataaaggccctcaccagatgctggagccatgctcttggacttcccatcctccagaattgtgagaaataaatttattttctttacagatta

SEQ ID NO: 403973 - DNA, 226 bp, Homo sapiens
gagcagaggagcagaagagcgcaccgacagacaccagcagacaacagcaggccattgaggcaagacgatgcagaaaattcggtcggggcagtcagaggagagtccagccgctggacagcctgactccaggggaagaccgccttcccactccatcccccttctggctccccatccaccttgctgagagcaacctccaccacacaataaaaccttgcaccgatcttcc

SEQ ID NO: 403974 - DNA, 379 bp, Homo sapiens
cagtccacctgcctcggcctcccaaagtgccgggattatagacttgagccaccacatccagcctcaactttaaaaataaaaagaacacatgaagattgggagactatgcattttcatgtatagcctaaatttagctagtttagtgataagtatgctctgaaattaaactgattactgtatgatatcatggcctgtaaagaacttaaagaatacttaaattatctatttttaaatgaaaacttcaaaagccagaatttattttttaagttgtgtatcatcatcttgtctgctttaattatttttaaagtgtcaacataaaaacttggacatacaaaatgcatgtatttagaaataaaatgatgaatgtaacatttaaaat

SEQ ID NO: 403975 - DNA, 914 bp, Homo sapiens
cttgaaatgtagttaatatgctaagaaagcccatttaaatttttattttcaacttacttaaattcaaagagccacaggggtctagtggctcctgtattgacagcacagggccaccttgttagtggcatcatttataaccctgggcagcattgctataggaatagccatatcctgtaggtctataatgctgtagaaatggaatgtgtggtgcgaatgaaatttaaaatttaagtagccacggtgaaaaaaaaagagaaacaagtaaaattcatttcataatatgctttatctctatttccaaaatattatcatctcaacatgtaagaaatataagaagtattcatgagatattttacattcctttgttcatcataagtgtttgagatcccatgtgtgtctgacacagcacctgactttgaactcaccacatttcgagtgccccatagcccatgtggccatggtttagagatttcagaaagcattcatggaaaattctctttcctgatcctcattcactatcctgggaagtggccagataaggaagcaaggcccagaagggcccagccagtggctctcagactccagagtcatcgagtccctcactcgagggcaggttaactcacagatggctggcccccaccctctgcatttgccatccagcaggtctgggtgggtaccaggatgcggattcgtaacaggagaggctgatgctgccagtctgggtccacattttgagaagcattcctccaagggtcccacccacgctcataccccagtaagtagatggctcagaattgaaatccttgctttccatcttacatctcattctctttatatgcacaaccatgaagccaggttgctaagacagtctgaaaacaactaccaaagaacagaggtgctgctcatggttaccc

SEQ ID NO: 403976 - DNA, 1044 bp, Homo sapiens
cttgaaatgtagttaatatgctaagaaagcccatttaaatttttattttcaacttacttaaattcaaagagccacaggggtctagtggctcctgtattgacagcacagggccaccttgttagtggcatcatttataaccctgggcagcattgctataggaatagccatatcctgtaggtctataatgctgtagaaatggaatgtgtggtgcgaatgaaatttaaaatttaagtagccacggtgaaaaaaaaagagaaacaagtaaaattcatttcataatatgctttatctctatttccaaaatattatcatctcaacatgtaagaaatataagaagtattcatgagatattttacattcctttgttcatcataagtgtttgagatcccatgtgtgtctgacacagcacctgactttgaactcaccacatttcgagtgccccatagcccatgtggccatggtttagagatttcagaaagcattcatggaaaattctctttcctgatcctcattcactatcctgggaagtggccagataaggaagcaaggcccagaagggcccagccagtggctctcagactccagagtcatcgagtccctcactcgagggcaggttaactcacagatggctggcccccaccctctgcatttgccatccagcaggtctgggtgggtaccaggatgcggattcgtaacaggagaggctgatgctgccagtctgggtccacattttgagaagcattcctccaagggtcccacccacgctcataccccatgtctgacaatgcctgccaggatgggcactgatgaatatggttgaacggaactccaaggaccacccaggttgatagtagtgagtttgtgtacagaagactgcaatgaattgaagtcatgagacatacagccaggatcctgaaagccaccaacatatgtcacctgcctgggaggcttgcttcgatggtcatcttgttctgcctgctaagaccaggagtcacagctgttgacatcatggtgaataaaaacattttctgccacaggtagaaa

SEQ ID NO: 403977 - DNA, 1166 bp, Homo sapiens
cttgaaatgtagttaatatgctaagaaagcccatttaaatttttattttcaacttacttaaattcaaagagccacaggggtctagtggctcctgtattgacagcacagggccaccttgttagtggcatcatttataaccctgggcagcattgctataggaatagccatatcctgtaggtctataatgctgtagaaatggaatgtgtggtgcgaatgaaatttaaaatttaagtagccacggtgaaaaaaaaagagaaacaagtaaaattcatttcataatatgctttatctctatttccaaaatattatcatctcaacatgtaagaaatataagaagtattcatgagatattttacattcctttgttcatcataagtgtttgagatcccatgtgtgtctgacacagcacctgactttgaactcaccacatttcgagtgccccatagcccatgtggccatggtttagagatttcagaaagcattcatggaaaattctctttcctgatcctcattcactatcctgggaagtggccagataaggaagcaaggcccagaagggcccagccagtggctctcagactccagagtcatcgagtccctcactcgagggcaggttaactcacagatggctggcccccaccctctgcatttgccatccagcaggtctgggtgggtaccaggatgcggattcgtaacaggagaggctgatgctgccagtctgggtccacattttgagaagcattcctccaagggtcccacccacgctcataccccatgtctgacaatgcctgccaggatgggcactgatgaatatggttgaacggaactccaaggaccacccaggttgatagtagtgagcaacgaggtgcactgagcacttgtcggggctgtgtttggagcccatcaacagtgctaccagctttagttccatcaaccccaggcttttgtaacaactggttgcatgaaaccctcccttgtagtttgtgtacagaagactgcaatgaattgaagtcatgagacatacagccaggatcctgaaagccaccaacatatgtcacctgcctgggaggcttgcttcgatggtcatcttgttctgcctgctaagaccaggagtcacagctgttgacatcatggtgaataaaaacattttctgccacaggtagaaa

SEQ ID NO: 403978 - DNA, 528 bp, Homo sapiens
cagtgatgcttctgagagcttgagctttggaatcagactgcccacattcaaaccccagttcttcctattgctggctgtgtgatttggggaaaattacttgattccctaagttttctcatctgtgaaatggggattcactcagttagtgaatattattcagctcctaccatgtgcagacactgttctagtgggggattcagcataccagcagtaaatggatctctgtacaatgccaaaaacatgaagccaactattcatagtatttttaagtgatatcctggtgctgcttccaggaagatggagtagatatacttttccctattgctcccactaagtacaactaaaaccctggacattatgtataaacatgcataagaagatgctgaaaggtggtaagaaagcagactggccagggactttgcgatccaaggaacaacctggtgatgagtttcctgtaccccagacttgggataaaggagctggcaacccagaaatgccaacgggagcaaataaaaaatccccaacaaa

SEQ ID NO: 403979 - DNA, 462 bp, Homo sapiens
ccttataaggcagcgctaccacccctagacctcgggatgagttcacacccattatacaggtggggagctgaggcgccggacgtcaagtggctggctccagcccgaagactacggagaaaacaaggctgaaatcttacagctaatcaacaccttgtagcttaacaccccgcttcctccaccccctacttcacgcagcaggaaacaggcttgcccaaactccgcgagtaaggcagagccggatccatctaggcttctctagttcctatgcattcattcatccgaaaatacagagcaacacctctgtgccaggcaccaagccaggtgctggagaacacagtgatggcagcaagatagccaggctccctgcttacttgctagaagtggagggagcaagtgagggcagggtgagataaaggtaattattctgtaaataaacaaatagatggtttcagagagtgacaa

SEQ ID NO: 403980 - DNA, 439 bp, Homo sapiens
cgatataatttattcataatgaaaagcagcagtcttctgccctgtcctacctcttcccacccttagattctactccacaggtatttgttttttctcaatttctgtttcttggttgtttcccccatatctactctggtattcttgaagggaaaaggataatatgccgggcgcggtgtctcacgcctgtaatcccagcactttgggaggccgaggcgggtggatcacctggggtcaggagtttgaaaccagcctggccagcatgacaaaaccctgtctctcctaaaaatacaaaaatgagccggacatggtggtgcacgcctgtaatcccagctacttgggaggctgaggcacgagaatcacttgaacctgggatgtggagattgcagtgagctgtcgtgccactgcactttagcctgggcaagagagcgagaatccattt

SEQ ID NO: 403981 - DNA, 600 bp, Homo sapiens
gactttccagtcaggatttaagagcttgggcaagggaatcaggcaagaagaaaattgttaaccaaaaataataatttcctccaaagttcattcattcaccattgtgtcatgtcgcttcttaataagagcattttgttcatttactatgtgctctgggaaaaacaaggaatcaagcatggtttcttccctgaaactgcttaaaatcaggtcaagatgttaccggatggtatagataactgtcaaatttgaaggaaatggactatgagaaataaagtagaaagatatacagaataattaattttgaaattagctagactttgtaaaagagattggtctctaaacttcaaaagactgataagatttgaaaagatgaaaaaaaggcttacatagtgagaataatataatttaaaaggcacagatgggacaactagatagcaaaacatggattgaaaatttttgaaaaagttcaaatagacatgttttattagaaacattacaggttttaaaagccaggcaaatgagttgttctcctttcttagaacaatggtttacattagaatttgtattaaagattccttttgttataaatgattcttaatt

SEQ ID NO: 403982 - DNA, 314 bp, Homo sapiens
gactgtaagtcataaattagttaataaaatctgtcctgtgttatctctaaaacagcctattttatatatatttgtctatttggtttatttgtttctctgcttacccaggctgtattttggtagcataaatcaatatatgagttttagactatgcaaaagtttatttataaatgacctgccttctgtgaataaaataatatgttgtgtatatgtgtgtgtgttgtatataatttattgctattgatcaatgttaaatttaaatttaaatacataatactaatgagtccaatgaaatgtgcatattgctatattcc

SEQ ID NO: 403983 - DNA, 388 bp, Homo sapiens
ggccacagtaaacagctcaactgcagccttcaaactcctggggctcaagtgaatccttcatgcttcagcctccccaagtagctgggactacaggaacgcgcccctactcccagctaatttttaaattgtctgtagagatagtgtctccctaagttgcccaggatggtcttgaactcctcactcaagcaatcctcccacctcagcctcccagagtgctgggattacgggcatgagccatcatgcccagcctcgctcatgttgcttctggctcgaaaaagatttcagtggttgctcattgtctatatcaaccactcttttttttttctcttttttgagatggagtttcgctcttgttgcccaggctggagtgagattccgtcttaatctt

SEQ ID NO: 403984 - DNA, 937 bp, Homo sapiens
agtcaaagcagcaccagctctgatcgaccccctgtatttgatggctcaggtcaggtattactcagagctagagaatgcccagagcatcctgcagcgttgcctggagctggaccccgcctccgtggatgcccatctcctcatgtgtcagatctacttggctcagggcaactttggcatgtgcttccactgcttagagctgggtgtcagccacaacttccaggtccgagatcaccccctctaccacctcatcaaggccagggccctcaacaaggctggagactatccagaggccataaagacgctgaaaatggtcatcaaattgccagctctgaagaaggaagaaggcagaaagttcctcaggccctctgtgcagcctagccagcgggcatccatcttattggaactggtggaggccctccggctgaatggggagctacatgaggccaccaaggtcatgcaggacaccatcaatgagttcggtggcacaccagaagagaaccgcatcaccattgccaacgtggacttggtcctgagcaagggcaatgtggacgtggcgctgaacatgctaaggaacatcttgcccaagcagtcctgctatatggaagccagagagaagatggccaacatctacctgcagaccctcagagacaggcgcctctacatcagatgctaccgtgagctctgtgaacatctgcctggcccccacaccagcctgctactgggcgatgccttaatgagcattctggagcccgagaaggccctggaggtctatgatgaggcctatagacagaacccacatgacgcctccctggccagcagaattgggcacgcttatgtgaaggcccaccagtatactgaggtcaggctgggctagggtgtgaaggggcagggagggccagcccagcagggaaggaggaggacggtacatgactgggga

SEQ ID NO: 403985 - DNA, 1065 bp, Homo sapiens
agtcaaagcagcaccagctctgatcgaccccctgtatttgatggctcaggtcaggtattactcagagctagagaatgcccagagcatcctgcagcgttgcctggagctggaccccgcctccgtggatgcccatctcctcatgtgtcagatctacttggctcagggcaactttggcatgtgcttccactgcttagagctgggtgtcagccacaacttccaggtccgagatcaccccctctaccacctcatcaaggccagggccctcaacaaggctggagactatccagaggccataaagacgctgaaaatggtcatcaaattgccagctctgaagaaggaagaaggcagaaagttcctcaggccctctgtgcagcctagccagcgggcatccatcttattggaactggtggaggccctccggctgaatggggagctacatgaggccaccaaggtcatgcaggacaccatcaatgagttcggtggcacaccagaagagaaccgcatcaccattgccaacgtggacttggtcctgagcaagggcaatgtggacgtggcgctgaacatgctaaggaacatcttgcccaagcagtcctgctatatggaagccagagagaagatggccaacatctacctgcagaccctcagagacaggcgcctctacatcagatgctaccgtgagctctgtgaacatctgcctggcccccacaccagcctgctactgggcgatgccttaatgagcattctggagcccgagaaggccctggaggtctatgatgaggcctatagacagaacccacatgacgcctccctggccagcagaattgggcacgcttatgtgaaggcccaccagtatactgaggcaattgagtattatgaggctgcccagaagattaatggacaggactttctgtgctgcgatctgggcaaactgctcctgaagttaaagaaggtcaataaagcagaaaaagttttgaagcaggcactggaacatgacattgtccaagacatcccatccatgatgaatgatgttaagtgcctgcttttgctggcaaaggtttacaagag

SEQ ID NO: 403986 - DNA, 325 bp, Homo sapiens
ctgttatccttttctcctaggtaaacgtcagaaaagatcaatcaccctcatcaattcattaatttagtcattcatccaactaccctcttgccagtactctgtatcaatacaatgtttttcagtagggtgacgggaaagaaaagaagggaagacacaaagatgaaaaagacaaattactattttcaaagagcctagagtctagaatgagcaccaccattggtagataatagttgtatctatcattgttatgcaatagttatagcttaaaattaacagagtcagtatttctttttcctttttacattagcatgacaaaaatatcaca

SEQ ID NO: 403987 - DNA, 449 bp, Homo sapiens
gtcaaaacctgtcaaaggccaagtgctttatttccctccagtcaaggactgggcattttgcatttgaatcctggatggcgggaagcagcaagcaggtgtcaacaggggtggggaggagacgccggaccccaccagccaatcagagcgcgcagaggcctcccttcccccgccgccgtcccgcgccaaaattccaaacgggctacgcaccgctcccaccgtctccttccgccgagctcagcgagccggaactatgtgaagaaaaagaagtcagcgttttccccaggactctccgctcaggtcctctatactgtcggcctgtgttcctctccacgttggcccggcctccttcgctctacaaatgggaggagagtttcgagcctgctgttctatggtggtggcgtgggcgggacagacggcggagggattctgggcgcgcgcgctgcggccgc

SEQ ID NO: 403988 - DNA, 671 bp, Homo sapiens
gagagacaactggacaggtgatgctttgtgctacaaatgggaaccgagagagggaaggtggtgatcttttgttgggcacctcctgaacactaatgctttagtcagttttctgttttgttggacacactgaattcttggttgattggttagatgtcttaactagtccactgaagtttactccatctatgtgaagatatgtgagatttcacacctacagtataggggataagccagaaatacatttaggaaaattgaggcccacagaaagttacagatgcgactagaattcaggtttcctggttccttaattttgattcctaactctctttgcctctacttgttgctgtttttgtttaaggtagaacaaagtgttaaggacacctttaacatgaggcaaaaagaatgactggagtaacagtattacacaatggcttgtactgtaaccccagttacttgggagactgaggctggaggattgcttgagcccaggagttcaaacccagcctgggcaatgtagagagaccccatctctaattacaaaaaaacaaaaaagtatatcgtggggtgggaaatgggaaataagtgatatgacagcagccatatgaggagcagaggggtaacaaacttggctggcatgatattttgcggtagtctgggacagctaagagtgt

SEQ ID NO: 403989 - DNA, 260 bp, Homo sapiens
tcctcctgcttcagcctcccaaagtgctgggattacagatgtgggccaccgcacccagcccttttctttagtaataatactaataaagtaggtcactaacgtgggaataacttgaaaaatgtgggaataacttgaagaatgtttaacctgagttcagagcatcccagatggaatatataattgttaaactcaggaaaggacaactgaacattaacctcattttctaaatttcttttcccaggaattaaagcatgaataat

SEQ ID NO: 403990 - DNA, 501 bp, Homo sapiens
ggctgcaccagtttacatttccactagcaaagcataagggttctaatttctcagcatctttaccaacccttattattatttgactttttcatcctgacttttgattctagtgagtatgcagtgatatcttgttgcggttttgatttgcatttgccaaatgattaacaatgtggatcatattttcatgtgctaattgaccatttgtatatcttctttggagaaagtctattcaagttctttgcccgtttttgaattgcgttgtttatctttttgttgttgagttgtagaatttttaatatgttctggattattatacccttatcagatatatgactagccatattttctcccattttgtggggtttcttttcactttcttattagtgtcctttgattcaaaaatacttttaatttaatgaagcctaatttctctatttttttcttttgttgcttgtgcttttggtgtcatagcttagaatccattgctgattcaaggtcatg

SEQ ID NO: 403991 - DNA, 820 bp, Homo sapiens
ctggaagaaactcaagtcatgtacccctgctcccctcctcctcttccacttcctcacggtcatcatcccctccatccccacagtctgagggagagagcatccacgccagctggcttgataaggtggaaagagcacagactttggagttagatgtgggtttgagtcctgactctgctactcaccagctttttgatccaggtaaatcttctcatcccctcatctggcagggactaagtagccttaactacaaattggaggttttgtcatccagaccccatcaaatagccaaaaggagatgatgaggcagtatggatgcagctcctcgtaccgggtcagtagagatggcatcaatgtcctcatcacagcgatggcgagtcacaggtgaggaaggtgaggccaacagatgccaagcaacttgcccgagatcccatagcaggcaagcagccaagatgagcttcagattcaggtctcttgactctggcttgaaggctatcttttgtcctccctctatttctactgaacttggtttcagcaggaagcagattgagcagcccagagccagagggcaagtgacaagctgacttggctttccttgaagagcatccataaccccaccttcctccagctctggcagaggacagagctcagcaaagccagtttcccagccattccccccagccttgctaggcatcagccaagcaaaacatcaccaggggatttaagaaacactgtgcattgggcattaagagattggccattgctgccttctagtgtccctgtaaaaaaggtcagtcactccaaggcttgaagttcatggacc

SEQ ID NO: 403992 - DNA, 490 bp, Homo sapiens
aaaaatagttgcaatgtgaatctaagaaaataaagatgtggagtacacagagctttgcttcagattctctggactaaagactgacactcatctagatgccaaagatcccatcagtcaccacattttttagacttctgactgctaagaaatattttggatcttcagaatagagacatctggcagtcaccagctgaacaaaatcttcaaactttgcaccaccatcatgggacagcctgacatatgtgcaccttgagataagattccacaggatgcgagcatatgcagtggaaacattgtgttattccatcctcagaagaaaagagacagtattatacttcgtctcttgctagtacagaacatgagatcttgtggacagagactcagagtttcctcagtgctgataagaaactggcaattaccagacaattaacaaacatttttgaataaatgaatgactgaataaatgactggtgttattaccgttgaccca

SEQ ID NO: 403993 - DNA, 136 bp, Homo sapiens
cacttggcaaagaagagaaagaggaagagggagggaaagaggatagaggcaaagaagagaaaaaaaggaatggaagaggaggggaaacattgtgatcctctcttgcctctgctctgtgccttgctataataagcat

SEQ ID NO: 403994 - DNA, 461 bp, Homo sapiens
gacagagtctccctctgtcacctaggctggagtacagtggcacaatctcggctcaccgcaacctctgcctccctggttcaagcaattctcctgcctcagcctaccaagtagctgggattacaactgtgaaccaccatgcccagctaatttttgtatttttagtggagacggggtttccccatgttgacgaggctggtctgaaactcctgacttcaagtgatccgcctgcctcggcctcccaaagtgctaggattacaggcataagccactgcacccagccaaaattaaaaaaaaaatcttaaacatgatataaatattcttttgtatgtattagttggtgcaaaagtaattgcagtttttgcctttactttcaaattaaacctatattaaatatgtaataaacctatattatatatgtaatacaattaaatttaaagagcaagtggaaatctgtactaaaa

SEQ ID NO: 403995 - DNA, 487 bp, Homo sapiens
ccatctaaaaccaagatttaatccaaggccatacactttccacaacatcaaactgcttgccctaaaatctgtccaaaattatttcaagctagacctttaactatcttcttaacaagttacccagaaaaatatgaatttgcctatcaccatatctacaatctttcccatttgttactccagatcagtggctcagtggatccctaatgtaacctacatttgcagccttcttccgtaagaattctctgccctgaattgttctattgactaaccacattacagaatcaaaaacagtatgatttcaaggagacatttaactcattcaataccaccactggtgggagtctgtactttctggtttttggtttttgtttttgcttttttgcctcattaaagaaatgaagatcataaaaatgaattatgtttttctggaaattcatagaaatgtgtttgctttctgtgtttaaatatacagtataatttatacata

SEQ ID NO: 403996 - DNA, 292 bp, Homo sapiens
tttttttaacaatagtgattgaataaccattgagttactgacagaatttcaaagggataccaatttgtggtcatttttacatgcttattatttctgtaattgcatactaacaaagtgtatctaattaacaggtagttacacttttgtgatgctgttttcataaagaagcaatgtagtatagtagaaggagcaatggaagagatgttggaaggccagagttagaactccatcactgtgatggttaacactgagtgtcaacttgattggattgaaggatgcaaagtatttatcc

SEQ ID NO: 403997 - DNA, 715 bp, Homo sapiens
ttgataaatgttctggggcaggagagcaatcctcaccccttcaccctattgaaaacccatgctttaaagaggctgtttcttacacttcttaacccttttccatagttcataggtttttaactttcctctatttcacttgactcttcaattctttattatcattatgattttacgaccatctttctacttcctgaacctgaaattctttcacatttagctgtaggaatagtatgacaaaacagactttcagggttcaatcttgtcttcaactggtgacaaatccagcataccttacaaatctgaacaagtcagaaggatataggaaaatgtattttgaaatacctgggcactggtttaataaaggaccttctactttatccactgccttgtcttcctaccccccagacacccgtaaagcttgataccattttggatgtctgtaaactggcatgtaacttttgctgatgctatttgtgtttcctttcagtgcaatagataacacagatagaagtgctttgtgaactatgaatcacgatatcatacagagtgacacatgccttctaggtccacgttgtataatagcaatgatgggctgacgctaccctattcttgggatccaaaaggatccaggtctctgataaaacaactttctaccaaaggcagaccaggctcacaatttcttcatctcactatttataccaatgcttgtttaaaa

SEQ ID NO: 403998 - DNA, 636 bp, Homo sapiens
tctcatcatgctgtgtaccacatctttcaaatattcacaagcttgaagatgtctgcttttgggtgtgtgcagataccctaccctctgccagaaacatgtgcctttacaactcacactagggactcagtatttgaaaagttgcttaatgaacattttataattcatatcctcatagtttattttttactgctagattttagggaattgtaatgaactggtcattaaaacctcttttcagcattttaatctattctatactaagtatttttctgttaataatgatactagagccaaaatcatattttccttcttaaaatagtatcatttttaagcttttaacagtaatacatacctgagatggtactgatggcatctaatcattatataatatgagttttgaagggacaattttggtagctaaataatcttgttcataatgtttttagcactaatttggaatcatggagcttttattatggagctggcataaatttatctgtaaatcgtgtaaatgtttagatggtccatacatatataaaaatagctttgttatgctttaaatattgctccttcggctcatagagtatattcagagatatctaccagtgggtttttgtgctgctgtagcatcttcca

SEQ ID NO: 403999 - DNA, 681 bp, Homo sapiens
aaggaactgggaaaaatatcagtaaaattattaaatatctagaatttagaaaattgtgagagaacatagtgttggatgtaagagaaagtttaaatgatctaatgctacaacaatttgagagaaatatatttgcacatatatatcagcataattatatcgaatttgtgagacttttcattgttattaattggacagtttcttcaagttgactgtaaaacacttccaggaaaagtagttctctaaaagtaaaaataactctaagctaggagaagatctgagataacaattcctactcttccactcaactttcacaagttgtgcagtatctattgatgtgttttgaatttttcaaaatttttgtaatgatactctatatacaaatttgtgaaagactaattggtaccatattaaatatactttgtaaaatattacataattttaggtagacattgtgttttcaaaaaatataacattttaaatttcttttattctaattttctctccctagcttatctagccaatttaaatgcaattcttaccaaatgataatgacctaatattgcatctttagcattttctttatcacaaatttataaccaagaaaacaatcaactacgttgtaaaaatatgacggatatctacataaggaaataatcctaaagtaatctgctaaacacttga

SEQ ID NO: 404000 - DNA, 1942 bp, Homo sapiens
cggtccagcccggcagcgggtgagagtgggtgctggccaggacggttccttcagagcaaacagcagggagatgccggcccgctccttcccagctcctccccgtgcccgctaacacagcacggccgcctgcagtctcctctctgggtgattgcgcgggcctaagatgtgtcctggggcactgtgggtggccctgcccctgctgtccctgctggctggctccctacaggggaagccactgcagagctggggacgagggtctgctgggggaaacgcccacagcccactgggggtgcctggaggtgggctgcctgagcacaccttcaacctgaagatgtttctggagaacgtgaaggtggatttcctgcgcagccttaacctgagtggggtcccttcgcaggacaaaaccagggtggagccgccgcagtacatgattgacctgtacaacaggtacacgtccgataagtcgactacgccagcgtccaacattgtgcggagcttcagcatggaagatgccatctccataactgccacagaggacttccccttccagaagcacatcttgctcttcaacatctccattcctaggcatgagcagatcaccagagctgagctccgactctatgtctcctgtcaaaatcacgtggacccctctcatgacctgaaaggaagcgtggtcatttatgatgttctggatggaacagatgcctgggatagtgctacagagaccaagaccttcctggtgtcccaggacattcaggatgagggctgggagaccttggaagtgtccagcgccgtgaagcgctgggtccggtccgactccaccaagagcaaaaataagctggaagtgactgtggagagccacaggaagggctgcgacacgctggacatcagtgtccccccaggttccagaaacctgcccttctttgttgtcttctccaatgaccacagcagtgggaccaaggagaccaggctggagctgagggagatgatcagccatgaacaagagagcgtgctcaagaagctgtccaaggacggctccacagaggcaggtgagagcagtcacgaggaggacacggatggccacgtggctgcggggtcgactttagccaggcggaaaaggagcgccggggctggcagccactgtcaaaagacctccctgcgggtaaacttcgaggacatcggctgggacagctggatcattgcacccaaggagtatgaagcctacgagtgtaagggcggctgcttcttccccttggctgacgatgtgacgccgacgaaacacgctatcgtgcagaccctggtgcatctcaagttccccacaaaggtgggcaaggcctgctgtgtgcccaccaaactgagccccatctccgtcctctacaaggatgacatgggggtgcccaccctcaagtaccattacgagggcatgagcgtggcagagtgtgggtgcaggtagtatctgcctgcggggctggggaggcaggccaaaggggctccacatgagaggtcctgcatgcccctgggcacaacaaggactgattcaatctgcatgccagcctggaggaggaaagggagcctgctctccctccccacaccccacccaaagcatacaccgctgagctcaactgccagggaaggctaaggaaatggggatttgagcacaacaggaaagcctgggagggttgttgggatgcaaggaggtgatgaaaaggagacagggggaaaaataatccatagtcagcagaaaacaacagcagtgagccagaggagcacaggcgggcaggtcactgcagagactgatggaagttagagaggtggaggaggccagctcgctccaaaacccttggggagtagagggaaggagcaggccgcgtgtcacacccatcattgtatgttatttcccacaacccagttggaggggcatggcttccaatttagagacccg

SEQ ID NO: 404001 - DNA, 383 bp, Homo sapiens
atgtactgctccctgtatattgcaacaatgtgaaatagaagtatggcagactttgagggaacaagattctaaattcccagaatatcactaatttattttcatataccagtgcagaatttttttctgaagacaggtgtaaatcattttaacatgatctttataaccaccacctttctattaatcaggcaatcatcaagaaagaatttgattgtgaagggtccagattgaactgttctttaagtaaggacacaggaaatattaagataactgtatggaaaaatctcatccaagaaactggaagctatgggaaaaagaaaattaaagattctttgattttagtaggttggttgagttatacatatttttagcagagcaaaaaaaga

SEQ ID NO: 404002 - DNA, 289 bp, Homo sapiens
cagatgccgcggcgcacatgatacccgttttaggtcttgcaccacaggtccttgtttattcttacaggtaaccttagaaccattttatccagttctagccaaaattattttggagctttaattgtaatggcctgataaacatgcttacttgaaggaaaatgaaatgtctacagcgttggccgtttgtccagaggcaaagatgcctctctttcaggcctctcccacatcctttggttcaagttcaagttcatgggttttaccctatggaatcagcaaaaggagcccagag

SEQ ID NO: 404003 - DNA, 640 bp, Homo sapiens
gattcttagagccctatattctaatagtattgccctgcatttaaaattgatttgatttccctgggttctttggtgattgctgtttaagcaaggaaagaagcagctttacgagtggacgtggggaggagggcggcacaagcacccacatttctgtaacaattgctttcttacaagatgctttatgaatgaggcatttttccctcccagacgtgcacttgttttggcatataatggcaaaataatgcaaagtgaagggagatgtatttcagctttgatttttaccgtctggatacatcgggactattcccagtggataaagtttcatgcatttaatatttctcacttctggcagcccagctcctttcttgggctccatcttagcattatcatgaaataagatctggaatccattgtctgcacctccgcaaaagcagtgagaaattatcccgggataagggtgaatgagagaggtctctaaatatagtgttgatacactcacctatttaacaaagtagacgagatctttgcaataccccttaaagataacgacatagatgttgttctgcaggatttatagttaggacccactcaattctccaggactcccggttttgcccccctcccgctttgccttggtggg

SEQ ID NO: 404004 - DNA, 514 bp, Homo sapiens
gcaatcctggcgtctcccaatgagagggctctcaaaatgaagcttttaataaactccagagtaaggaactcgggattgtgcggcaaaggccgcgcattgcactttgtgagcaatcggtaaatatgcgcaaccatatgataggaaatatatgcattttcattgataagaaaaaaagagatgatggtatttttaaacagaagccacaaacaggcatacctgtgccattgttggggagctaataataaaggcactgatgatcacaggagtaagaacaattgacttggccaagagacaattttaagctgggaactgtattcggctgcagttcagaaagtggacttttgagacttgtcaaacgaatggaagaattttgtgccaacaatgtcccagctttgcaggcttggcagctgaggactcagaagtaacaaattaatgccaggtgaattattattgttactactattatcaaaatgtgttccagttgcagcaatacaatggataagcaacttcaaaa

SEQ ID NO: 404005 - DNA, 466 bp, Homo sapiens
gtgaattcacccttcctcagccttttgttctattcaagccctccatggattaagtgatgcttgctcactttgaggagggcaggtctgtactcagtctactgactcaaatgttaatctcttccagagacaccctcatagacacatgcagaaatgatgttttatcagctatctaggcaacccttaatgcagtcaagttgacacctaaaattaaacatcacaagcagggaagatggtgtgggaggtgaggtgtgtctgtgagcagaagctgggtgggtctctgcatgaacatgtaggtacgggtgcaagcatgtgggagctgttggtggcaaaactcaacagaatcaactcatatttaggaagtgaatcagatgtcccatcctctgagccctgtgacatttcatgatctggagcaataaaaaactctcagagcaagatgtataataaaaagctaaattttcaagtatgg

SEQ ID NO: 404006 - DNA, 323 bp, Homo sapiens
tggttggattaataatgtgaccatttattattgccttgggtatcactggaattttcctacatagctttgttcacatgaaaaattaaagtttactgcatagtgcttgcttaataatttgttcagcaagcaatatgcaataaactttaacttttcatgtgagtatagactgtctccctctcttcgagttcactttgagtagtagacttttgtaatctcaatggtgcctcatccatagtagttgtttataaggcatttgttggaaagcgactgattatacttgggagtatttgtagtcacctgaaaatagtgagaagccacagctg

SEQ ID NO: 404007 - DNA, 530 bp, Homo sapiens
ccactcacgattacctcaagttaaaaaagccaactatagccaagtgcagtggctcacacctgtaatcccagcactttgtaactttcattaaacagatcccattttgttatgtatatacctaagtattttattttctttggagtgactctaaaatatattgtgtttttagttttggttttcaaatgttcattgatagtatacggagatggagttgactgttgtgtgttgatcttgtatcctgcagctctgctgacctgatttatcaattctaacaattgatttattttggtttttggtagattctctaagatattctatgtaaacgattatatcatttgcaaatagcaatggtttttcttcctttacaatatgcaggccttttatttctttttcttgactgataacagtgtcttgaacttccagtgttataagaacgaatctccttgccttgtttctggtcttggggggaagtattcaatctttcactattaaatatgatattcactctacgtgtttgggaggtgcccttt

SEQ ID NO: 404008 - DNA, 428 bp, Homo sapiens
gaggacataaaaatacggcgcggacgcggagcgaatactcttagggttgctcgaattgtcctctcaaaaagagtttgatcgactaacgcggaggcggcatggattggaacaggcacctccgcctgataatgttgataattaaagaggaccactggagcaagtcacaccacctggtacctcctaacctcccccttgccttttctgcatttcagatcctttcttaaaaaacccctgcgttccccccatgaattgaagagtggaattgtttgctgctcttcccctgctagcatggcagctagcagattttcctttattatccattctttctacaagcagagagcagccagatccttttgcaggttacaggctgacacatccagtttcttcgaaaaaaacatttaataaggacttataaacagaagctacgt

SEQ ID NO: 404009 - DNA, 289 bp, Homo sapiens
gatatgctgtctagatatgagaccaaggagttaactcttaagaatggcacttttgaaaaggaatcattaaaatggaaaataatagaaagtgtcagaagttcttgccttgaggaatcttttttgggaaatgattggaaatgcaaaggactctttgagagacaacaggaaactacagaggaatatttcaggcatgtaactgtgccatttgaaaaaatatccgaattcatccagcctacatattttcttctaaatcaaataattcatactggaaagaaactctatgaacaaa

SEQ ID NO: 404010 - DNA, 219 bp, Homo sapiens
ggcatgccccaccatgcccggctaatttttgtatttttagtagagacagggtttcaccatgttggtcaggctggtctcaaactcctgccctcaaatgatcgcccgcctcggcctcccaaaatgctgggattacaggcgtgagccacacttaacttcacatttcataattcctgagtcttatcaggcaaaaacaagtcctgaaaaaacaaagtaaatcta

SEQ ID NO: 404011 - DNA, 466 bp, Homo sapiens
ttagcccagtccaattctacttgtatggccacagatctccttattttgaaataaacaaaaagcaggaaggatccaccttctccaatttcctcaatcgcttctcccagggatgtttaagcttccatcatctaaactatacttggggccgggagttttggccactaccccctacagcctgtgcccttacaaacgtgatggcttcaaggctgggagggtgaatccggcttccactgcctgtgcttgaaaagagtaacttttgtgaacagtgccagagacaaactagaatctgatcctgagaacaactgctttcccttgagtaaagaacacatgtcagggaagagaagcacagactcttaaagaggggccatccaaagaaactgagaaaacaagaaggacatgagttgggcacctgaagatagaaacgggacaaaatgaaggatgaagagtaggggggaggtgaaggagc

SEQ ID NO: 404012 - DNA, 393 bp, Homo sapiens
taatggtatattgcaaataaatgtactatattatgtttttatattacaagttgaacatccctaacctaaaaatcccaaatctgaaatgcttcaaaatctgaaaatttttgagtgctgatatgatgccacaaatgaaaaattccacatctgacctcatgtgacaaatcacagccaaaatgtgatcaaaacattgtttaaggaagaacattatttaaaatgttttataaaattacccttcaggctctgtttataaggtgtatataaaacataaatggattttgtgtttagatttgggtcccattcccaaggtgtatgattatatatatgcaaatattccaaaatcagaaaaaatcagaaatctgaaacgctcctggtcccaagtattctggataa

SEQ ID NO: 404013 - DNA, 449 bp, Homo sapiens
gtactggcctggtaccatggttcccaaactgtggtgtgcatcagaatcacaggttgctgggctgcacccccagagtttctgactcagtaggtctcggatgggactgagaattggcatttggaacagcttcccaggcaatgaataccacgcagagaaccagggctggaggataatcctggtttgctcaggacagctcatgtggagcgtcaccctgtcccaggtgtgccactttacaagcccccctgggtctgactgggagtggggccagaccctgatgggtggggaggcccctgcaggagtgcaggaggcacagttgttgtcagggaagagagagggtgaggtcactgagctgaaacatggcatcaggggcaagagaggcagccttggcaacagtgacccagagcccaggagtaagatgtgtggttggaacccctaggaggccgttagct

SEQ ID NO: 404014 - DNA, 333 bp, Homo sapiens
cttctagggaaaagaagtaggtttgggctgggtaagaataagggatggggtcttccccctctgattttatatattctgtactgttagtaatatagttcctaatgattatgtacttttataactttataacaatagaaaagaaaaattattttacctcatcagattcccaatgctaaccactattaatacttttgtatgtatcgttataggcttcttaattaggatttactctgagagaagatatatgagcattttaaaattctaacgtgcctgttgcaaggcattagattttctttattaacaggaaaaaggtttaaattacagaaaaaaaat

SEQ ID NO: 404015 - DNA, 113 bp, Homo sapiens
cagaagtggggtgcccagtctttgcccctccagtgacagcaggctggccttcttcagggtagactgactacttggtttgctacagacttttatgcctcaacagaattcaataa

SEQ ID NO: 404016 - DNA, 514 bp, Homo sapiens
gtcccaataaatccatcagaccataatattcacactaattctgcttttctgactgaaacatgattgatacaataccctttgataattttttaattgagtggtttgtcttttaaccattttccctaagggttcttgcattggaattttttttctttttttgctatttatgtgctaaaattttcactcacaaactcatttctgatatactttcatataattgttaatcagtctttctagggttgcagtaatgtgcatgatattcttcttattgtcaagtaacttcaaccaaaccctccttgtctgctgattgttaccgtgttttctatttccacttaacacttgcattttaaaatccagtgtgttggccaggcccggtggctcacacctgtaatcccagcaccttgggaggccaaggcaggcggatcacaaagtcagaagatcgagaccatcctggccaacatggtgaaacctcgtctctactaaaaatacaaaaattaagccgggtgtggttgcg

SEQ ID NO: 404017 - DNA, 662 bp, Homo sapiens
agaaagttgtcagacagcatcacatgctacagagaaatctttcttgaaaggaagagtcaatggagcaaacttcattattatcctcttttttaccacagccactcaaccttcagcagccaccactctgttcagtcaccagccatcaatatccaggcaaaaccctcaaccagcaaaaagattaccacttgctgaaggttcacataattgttagcaatttttagtaataaggtattttaaaatttatgtgcattttttagacataatgctgttgtacagtagacttcagtgtaatgtgaacaacttttatatgcactgggaaataaatttgtggtttgctttattgcgacatttgttttgttgaggtggtctggaactgaacctgccatacctccaaggtaggtctgtacagtgccttcattgaaggcactaaataaatggttattgttgctatactcaagtgaaactgtctcaaaacaaaaaatgatagataaaaatgttgtaaaagaatttaataaaacttgatattctcataaatgaggttatctactaccactgaaaaactgtttgaactggtaaggtggctagaaacaacaaacatttgtaaaacagctttcctggatatgacaatagccagttagaaaagtaatggaaaaatatgagct

SEQ ID NO: 404018 - DNA, 408 bp, Homo sapiens
gcatacttttttataaataaatactatgaatattgccacattgttgggcctggttgcatggcagcctagtttcttttgaggaataatatattgtaacttccacaaaatatacgaaaattttattatttcaatgatatttgaactttttcaacttaagaattgtgcttgagttgtgagcttaaaggaggcatttgtgtgagctaagattcaaacagaaaatataagttaaatcttccttaaaataattaacaagaatgaaaaaatacttttcctgacatcgttttgtgcatcacccctataataccttcctaagagaacatagagaattgaaagaggtaaccatatgataacttttttccaaaatgcgtgttttctggaatcatatgtatgatttcaatatccctgcat

SEQ ID NO: 404019 - DNA, 1164 bp, Homo sapiens
ggggaggcctcaggaaacttacaatcacagcggaaggcaaaagggaagaaggcaccttcttcacaaggtggcaggagagacagtgaggaagtgccatactttaaaaccatcagctctcatgagacttcactcatgatcacgagaacagcatggggaaccttctcccatgattcaatcacctcccaccagctccctcctcgacatgtggggattacaatttgagatgagatttgggtgggtacacagagacaaaccatatctatcaattctgaatgtttaataccagtattattagaggaggatctagtccccttcaggacataaggatctatgatcctctgtcagaacatattagaccctttcctttggctataaccaaaagattataaacatacatccaggaataaaaatagtatattaaaattgtgtgtgtgtgtgtgtgtacgaatgtaaattttttgtgccaaatctaaagactctttacctagtcctaatgtgtcttgaagatcttctgcagttttttttctagaaattttatagttttatgttttacatttaagtctgtgattcatttttagttaattttttttgtataagatgtgaagcttaggttaaggttcatgtttttgcctatggttgttcaattgctctaatagcatttattgaaaaggttaatgatttatttgtacttctgccaaaattaattgatcatactcatgtggtcatacttccgctttctctgttttataccacttagctttgtctatcttgctatcaataccacactgtcttgattactgtagctatatattactgtagctatatagtaaactttaataaaaggaagattaactttcttcttcttttttcaaaatcgttttggctgtttaaggtctttttcttttggtatacattttagagtaaaagtacatacttctgtgaaataccttactaagcttctgataggaaatacgataaccctgtagaacagtttagggaggactggtatctttactaaatcttctaacccataaacatgatatttaggtcttcttgtctttcaccaacattttgtaattttcaacatgtagattctatacaattttgttgagattatgtcatctgtgaataaagactgttttatttcttttccaatttgtatgc

SEQ ID NO: 404020 - DNA, 291 bp, Homo sapiens
catgatttcttctccgataggcaacatattccttttgtaacaatctacagagatgaagagcataatattaaggtgaggttttcttatctgcctgtttaatattcaaatgagattggtaaacaccaactagctatttaacctgatcagtccaataatggcatacataattaatgctgggttcccatcagactgctggaagagaaataatggtcagaagcattcccaaataacaggaaatactttgagcttcacacataacactttaaaatgcatgttgcctttcggagaaga

SEQ ID NO: 404021 - DNA, 442 bp, Homo sapiens
caatgcttttattaaggtgtatttcttctgcagtgtgcagctctagtaagttaccctgttgattgtgtagcacttcctagcatgcagccacatttgacatagtatctattactatagcgaatggttggccctaattctatttcagaatctttgggctggtcacggtggctcaagcctgtaatcctagcactttgggaggctgaggtgggtggatcatttgaggccaggaattaatgaccagcctggccaacatggcgaaaacccatctctactaaaaatacaaaaaagtagccaggcgtggtggtgcatgcctgtagttccagctgctcgggaggctgaggcaggaggattgcttgaacccaggaggcagaggttggagtgagccaagattgcaccactgcactacactccagcctgggtgtcagagtgagactctgtctca

SEQ ID NO: 404022 - DNA, 369 bp, Homo sapiens
ttatatcctcctacaagtcattcctcatccctgtttggtaggctttctccttttgatttctgtgtcataagagacgtaacataagaagggccctggccaggcacagtggctcacgcctataatcccagcactttgggaagctgaggcgggcggatcatctgaggtcaggagttcacgaccagcctggccaacatggtgaaactccgtctctatgaaaaatacaaaaaattagctgggcgtggtggcaggcgcctgtaatcccagctactcgggaggctgaggcaggagaatcgcttgaacccgggaggcggagtttgcggtgagccaagatcgcgccattgcactccagcctgggcaacaagagtgaaa

SEQ ID NO: 404023 - DNA, 390 bp, Homo sapiens
atccctctctcctgcccctccctacccctctttgtatctttatatttactgtcctatcatagcttaataatcatttatattgaataccttttgtttaacttactgaatagtttctcctgtttgaatctctactggtacacaattggtgtctggagtggctccagcagatagatctgaaattctgagattttggcatttgggtggttatgcctttgggcctgagcgcagtgctgagctccttgtcagagggaaatggaatgctggtaatccatggcatcacaattaattaagctatcacctgtggttgattataatgtgttgctaatgaatgcagatgcctcagagcccaagtggctgctacatttgacctttatggcaataataactgta

SEQ ID NO: 404024 - DNA, 564 bp, Homo sapiens
ccctgttatagcttaacagtaactgaagagactgctttggaaaggcagcaagagttaaaatgtatattaataatggaacccagaatatacagctgtgaagcaaagaaaacatccagcaagccagttcatgcttcacttccatacattctgtgaaagcattttatacactctgaggagctatatattttaagagtatatattttattatttatttcacaggcctcccatgaaggcccatattttgttaagtcttgattttactgacctggaacagcaaaatagttttatcaccatcatctccccatcttggaaaatgtatatacagtctttgatagtggaattatctctacatattccttgcacctaaaaaagaatgtactggtttctctctagaacaatcatcttgagtatgaatccacaacagcctgtagataataaatttatatattttcttatttgcaatttctcctaatcaattatttctgaagaaaacaagatatttacctagatcactattcccttaaataaattcaatatcctaccattgaactactcagattaaaa

SEQ ID NO: 404025 - DNA, 319 bp, Homo sapiens
atgtgaaataggtaggtgtggtaagtcacaaaggcagcactcatttcctgtccccgtggtttaaaggtttgcatcattcatcacaacaaagtggtaagcattgtagcataaaagaccacaaacagtgaaaatctttctatgttattgcactttcccctaagccttctcacctattagctttttccttttgctatgcaaattatttaatataatagaccaccttatctgcctcgattgtgaaataggtaggtggagcttgcattgagccgagatagcaccactgcaatccagcctgggcgacagagcaagactctgtctc

SEQ ID NO: 404026 - DNA, 513 bp, Homo sapiens
gaagcatgtgcagacgaggtggaatgtgactgcagtaataggttcttcactaagtgtgtgtgtgatgcttggaaaagacacagttcaaacactattagaggatcgatctctgctccccatcaatcaccatcttgaccatatttctccgacactcaggatatggtgttttagggagcttcctcattagcattttcagtgaagcactttgtagaaagtgagattgaacgttctttgacttcacaggttggcaaatgtcctgctttgtaactgggcctttctacaaattgctttgccactctgaatttatagaccctgcttcaactaacgtcagctctagcagcttcttgcacctttgctgcctttggcctcagctggaaatgcacttcaatgagctagtggccactcagtttatttcttaagcgtgcactagaatctaacaccatggactttgtttttcaatggactctgttcacttgtcatccagaagccagtgggtttttaccatagaaagct

SEQ ID NO: 404027 - DNA, 455 bp, Homo sapiens
taattcagtggttaccactgagggccccgactgggcttggcgggagaagattccgcagggggttttattgggtctcatgttgccgtcgctccatgggatcgcccaagcctcgtcacctcttcctgtttgtgcatgtgtggctcacacacgtgcacgtgttcagcccaggaggacctcaaaatcaatttaggctgaagggggaaacgactcctcagtgttctcctctcctgggatgggaggggatcgttgcctccgagggaattagatgcagtagccgaactccaggtgtaattccaccactgggcgaagtccaagttcccagaggaagggcatctattgagaattcccaccagaagaccaggggaaatcttcagatgaactggttgttgaagacctgccttcagggcttgcaggaagtggggtacattggctgaaggaattgtgtgaagctgttg

SEQ ID NO: 404028 - DNA, 646 bp, Homo sapiens
ctagtgccgtgcttaggtcacggctgtgtaccccatacagtgtagatgttcagatgcttgaatccagcaaggaatgagtccgtgttttcagtttttggtaagtggaagtaattttagaattgtaatgaaaccatgttaagccacagtaaacagtgttaagacatgtgaccatatacatccaggtgtacagaaactgccccacccaactgcttcttggtgcacgtccttctcatagcctgtgtattttgaggaaataatctatttctttatactttttagaggcctttctggctaagagaataattgcttgccgcataatttcaccagtaacacgcctcttgacagctagtttccctgaaattcatttagcaatttctcaccacctcatgacaaacatgaaatcttaggttaacactaccttctttgtcctatcttctcaatgagattatcttcccttcaggggcattcctgagagccttgtctgtaatatttccttaattatctataatcatcttaaatgattgtgttttttgattttgcacagagcgaagtacctacacattatttcagaagcaccaacctgtttggctctcctgagttcttccagctgggcgtttggaatgtgggtcaccgggtgtgaatgagc

SEQ ID NO: 404029 - DNA, 1064 bp, Homo sapiens
ggatttttggggcttcctgggttgattttaattttctaaaaatcactgaaaaagtaatttttcagtggcacagttttcacttttttcctgatccataaaaccagcaaagtggatacattcagtgttctataactacatttaagatccatgatgttagcttttcctctataaatcaacttaactctcttttataatggtgacacttacaaagctaaaaccccaggaaaattaaagttgatgaaagaaataacagattccccggctctatatacctgggaaatagctggttaagcttcaccacaaaggatagatctaaattgtttctgaaatgtttaaatttcaaaccccgcatagtcaaggataataaaacagactcatctttttttgccctcttgttaaattctaagcttcacaggcatttgaatacatctaaaaaatttggtttgtgagccttagaatttaaccacttacaaaactcttgagctccctccacttctgaggacgtttcctgacacattcaacagcatcagcgtccaatcaggagggagctcaaagagtaatccagctaattctaaggacacaaaggttttctctaggtaaacagtttaggtaaattacaaagtggtaagtttttcttgaggattgaatgaagaaagctactggatattgtgtaaggcagttgagtttctgccttaaacaagtgagtaaaggctcctatggttaagactgatgtgtgttgagagcacatctaacttgataagatcaattgtattgggagtaattaaaacaaatgttgtcctggagtcaaactgtgtaatttaaattttcacatttactaagatatggaatttggatggacttaaatcaagtctttgcgaacaccgatatacatgaactggggtaaggcgtacaaaacttcgaccatcataacacatggcgcatgaaaaatcgaaatacacaggcgacaaaatataaagtaagagagacggagagaactatcaaatgacagaatattactagcacactactacttgatgcgtcttactcctcacttactctcgcgt

SEQ ID NO: 404030 - DNA, 538 bp, Homo sapiens
atacaatgcaactaaatattttaataagcaaaataatgcaaattgctgaaaataaataaattgctttgctatacagctacagttctttatggtattgaaagaataatctatgaagggtatctataatattctacaatattctatataattgccactgaaataattggttccattctcatttaaccatttaaattatatttttcctggaaagtgactaattggttcaatctggccttttgcaatctaaaataataattataaaaacataaaaataacagtacttaagaaatttatcagagatatgagctaaataacataagtctccaaggcaaaatgcatataaatgtgtgtaactggttgatgaaacagagtgagctcattagtgtatgatcaaaaaaactttctcttcaaccattgccttcaaacctgctctctcagaactctcttcccatccataagcagatcccacagctgtagagtcacttttaagagcagcatgatctcagctaaacattcattttcaggtactaaagggtct

SEQ ID NO: 404031 - DNA, 363 bp, Homo sapiens
gaaaacagaaagaccaccttccttttactctactgggttggaagatgagtgagaataccaaaatttgaaattgaaaattgataggaacatgtgacttcagaaatggagaggagtgatggtaaggtcatatccttctgccaagtaccttaggtcttttctgtaaagtggatcatatagaattttgaaagctgagctggggagctgataatgaatactataggcaacagtctgttgccaattcctcactgaggaaatgttaaggaaatagttttatattcatttatttgtagaagaatacattgggagatgataatgctctaagtcagtgaggttggtatggttaattggagggaagtggatgtc

SEQ ID NO: 404032 - DNA, 601 bp, Homo sapiens
accacacccatccccaatggtgaaatcttatatagccatagtataacatctaaaccagaaaactgacattgctctttgtgtattactattagccagtctacagaccttactcagtttttaccatttttaaaaactgcattcatttgtatgtgtgtagttctagttttatcctatgtacaaatctgtgtaaccagcaccacagttaagatacagaatcattccatcacctcgaaatcacagcctcatgctacctctttgtattctcagccaccctcaccctctcccagctcctcaccccgtcttcgtcctctggcaaccactaatctgctctccatctctatagttgtgtcactttgagatgttatgtaaatggaatcacacagtatgtaatcttttgacactggctttttttcactaagcataacactcttgatgtccatctaggttgctgcatgtatcagtagttcattctttgctattgctggggagtattccatggtatggatgtaccagagtttggtcaaccattctcccactgaagggttgtttccagtattttgttgttacaaataaagctgccataaacatttaaaaaaccggg

SEQ ID NO: 404033 - DNA, 507 bp, Homo sapiens
gaagacgatgctcttgatgtctgcccctcgcaaggtgatctgtgtttgcctccagccatggccaccatttcttccccacagggctgctccgtgggcaccgtgttttctcacaaacacctggagtgtgccagagtgcagccccgtcaccttgtgcctgaatgacaggcacaggtcccctgaatgcatgaggcggccgagaggtagcaccaagcgtgcagcttttccccctggggctttggctgccgacactgtcagatattgtccacctgctgggtccctgattggttcccagtgcaagtcattgtctttctccctgatccagccacaatgtgccagttgcaatcactactgtctgctgctcacaagccagccgggctcccctttgccttcagtccccaagtccacgttcctcaggacttccacgatccagctccacccacagcagcccctctgaagggcgccctgttttctgtaacataccagcgtctccatcatcaccaccatgtg

SEQ ID NO: 404034 - DNA, 175 bp, Homo sapiens
gcttgaactagcttccactaattatagggtcagtgacaataatggctaacactcacagccaccgactgtgtgctagatgtggcgctgtgagtcctcacaacccgaggaagtgggtattatgataatcatcatcttttttttttttttttttgagatggagtctcgctctgtcact

SEQ ID NO: 404035 - DNA, 496 bp, Homo sapiens
ttttcagctttgaaagaattacggctggaggacaacttgctcacccatcttccagagaatttggattccctagtgaatcttaaggttctgacactgatggacaatcccatggaagaacccccaaaagaagtgtgtgctgaaggcaatgaggccatatggaaatacctcaaggaaaacagaaacaggaatataatggcaacaaagattcaggcatggtggcgtggaacaatggtacagagaggatttgggaaattcggtgaactactaaaaccacaaaagaaaggaaagacctctccaaaagataagaaaggaaagaaggatgtaaaaggaaaaccaggaaagggaaaaaagaaataatcctgtaaattgataaattggggtaatggaccttgatagattaagaagacaaaatatctaggaattagatgcctactacattaaaattattcataaaattacacttatgtgtaaaaataaatgattcttacttttactg

SEQ ID NO: 404036 - DNA, 618 bp, Homo sapiens
tctgacaaattgaacattcatgtgtttattttgtactgtctcttcctcactggaatgtgagctccataaagttgagacagttatttctctgctgttgcccaaaagtctagaacaggcactggcacataaaaacaataaatgcattttttaaaaaatttgtctgaatgcctagccaattgagaaagatagaaaataaaatttagagttctaatcacatcccattctctccacgtcttcaagaccatgtatcagaataaagagatttaacaatttccagttcattgtgataccagccgatgctgaatttgggtttatcttgttttcagattcaggcatggtggcgtggaacaatggtacagagaggatttgggaaattcggtgaactactaaaaccacaaaagaaaggaaagacctctccaaaagataagaaaggaaagaaggatgtaaaaggaaaaccaggaaagggaaaaaagaaataatcctgtaaattgataaattggggtaatggaccttgatagattaagaagacaaaatatctaggaattagatgcctactacattaaaattattcataaaattacacttatgtgtaaaaataaatgattcttacttttactg

SEQ ID NO: 404037 - DNA, 441 bp, Homo sapiens
atctttgtagataatttttcataatctaaaaccattgcaatgggaaattttcttttgctaaatctagtgctgtgagtaaattacaaagcatatgtattcaaagatatgtttttaatgtaaccagattttttccattttaagtattcatgaaaaattttggccaggtgcactggctcatacctgtagtcccactactttttgaggccaaggcaggtggatcacttgagcccaggagttcaagaccagcctgggcaacatggcaaaaccccatctctacaaaaaaaatacaaaaattagctggacgtggcagcatgcgcctatagtcccagctacttgggaagctgaggcatgaggatcgcttgagtctgggaggtggaggtttcagtgagcccagatcacaccactgcactgcagcctgggtgacagaatgagaccttgttc

SEQ ID NO: 404038 - DNA, 4126 bp, Homo sapiens
tgggcgtcggtcgtcggtggggtcggagctgggcgcggagcccctcacagtgcagacgcccagcggcagcaggatgagtgcggaggcaagcgcccggcctctgcgggtgggctcccgtgtagaggtgattggaaaaggccaccgaggcactgtggcctatgttggagccacactgtttgccactggcaaatgggtaggcgtgattctggatgaagcaaagggcaaaaatgatggaactgttcaaggcaggaagtacttcacttgtgatgaagggcatggcatctttgtgcgccagtcccagatccaggtatttgaagatggagcagatactacttccccagagacacctgattcttctgcttcaaaagtcctcaaaagagagggaactgatacaactgcaaagactagcaaactgcccacgcgcccagccagtactggggtggctggggccagtagctccctgggcccctctggctcagcgtcagcaggtgagctgagcagcagtgagcccagcaccccggctcagactccgctggcagcacccatcatccccacgccggtcctcacctctcctggagcagtccccccgcttccttccccatccaaggaggaggagggactaagggctcaggtgcgggacctggaggagaaactagagaccctgagactgaaacgggcagaagacaaagcaaagctaaaagagctggagaaacacaaaatccagctggagcaggtgcaggaatggaagagcaaaatgcaggagcagcaggccgacctgcagcggcgcctcaaggaggcgagaaaggaagccaaggaggcgctggaggcaaaggaacgctatatggaggagatggctgatactgctgatgccattgagatggccactttggacaaggagatggctgaagagcgggctgagtccctgcagcaggaggtggaggcactgaaggagcgggtggacgagctcactactgacttagagatcctcaaggctgagattgaagagaagggctcagatggcgctgcatccagttatcagctcaagcagcttgaggagcagaatgcccgcctgaaggatgccctggtgaggatgcgggatctttcttcctcagagaagcaggagcatgtgaagctccagaagctcatggaaaagaagaaccaagagctggaagttgtgaggcaacagcgggagcgtctgcaggaggagctaagccaggcagagagcaccattgatgagctcaaggagcaggtggatgctgctctgggtgctgaggagatggtggagatgctgacagatcggaacctgaatctggaagagaaagtgcgcgagttgagggagactgtgggagacttggaagcgatgaatgagatgaacgatgagctgcaggagaatgcacgtgagacagaactggagctgcgggagcagctggacatggcaggcgcgcgggttcgtgaggcccagaagcgtgtggaggcagcccaggagacggttgcagactaccagcagaccatcaagaagtaccgccagctgaccgcccatctacaggatgtgaatcgggaactgacaaaccagcaggaagcatctgtggagaggcaacagcagccacctccagagacctttgacttcaaaatcaagtttgctgagactaaggcccatgccaaggcaattgagatggaattgaggcagatggaggtggcccaggccaatcgacacatgtccctgctgacagccttcatgcctgacagcttccttcggccaggtggggaccatgactgcgttctggtgctgttgctcatgcctcgtctcatttgcaaggcagagctgatccggaagcaggcccaggagaagtttgaactaagtgagaactgttcagagcggcctgggctgcgaggagctgctggggagcaactcagctttgctgctggactggtgtactcgctgagcctgctgcaggccacgctacaccgctatgagcatgccctctctcagtgcagtgtggatgtgtataagaaagtgggcagcctgtaccctgagatgagtgcccatgagcgctccttggatttcctcattgaactgctgcacaaggatcagctggatgagactgtcaatgtggagcctctcaccaaggccatcaagtactatcagcatctgtacagcatccaccttgccgaacagcctgaggactgtactatgcagctggctgaccacattaagttcacgcagagtgctctggactgcatgagtgtggaggtaggacggctgcgtgccttcttgcagggtgggcaggaggctacagatattgccctcctgctccgggatctggaaacttcatgcagtgacatccgccagttctgcaagaagatccgaaggcgaatgccagggacagatgctcctgggatcccagctgcactggcctttggaccacaggtatctgacacgctcctagactgcaggaaacacttgacgtgggtcgtggctgtgctgcaggaggtggcagctgctgctgcccagctcattgccccactggcagagaatgaggggctacttgtggctgctctggaggaactggctttcaaagcaagcgagcagatctatgggaccccctccagcagcccctatgagtgtctgcgccagtcatgcaacatcctcatcagtaccatgaacaagctggccacagccatgcaggagggggagtatgatgcagagcggccccccagcaagcctccaccggttgaactgcgggctgctgcccttcgtgcagagatcacagatgctgaaggcctgggtttgaagctcgaagatcgagagacagttattaaggagttgaagaagtcactcaagattaagggagaggagctaagtgaggccaatgtgcggctgagcctcctggagaagaagttggacagtgctgccaaggatgcagatgagcgcatcgagaaagtccagactcggctggaggagacccaggcactgctgcgaaagaaggagaaagagtttgaggagacaatggatgcactccaggctgacatcgaccagctggaggcagagaaggcagaactaaagcagcgtctgaacagccagtccaaacgcacgattgagggactccggggccctcctccttcaggcattgctactctggtctctggcattgctggtggagccatccctgggcaggctccagggtctgtgccaggcccagggctggtgaaggactcaccactgctgcttcagcagatctctgccatgaggctgcacatctcccagctccagcatgagaacagcatcctcaagggagcccagatgaaggcatccttggcatccctgccccctctgcatgttgcaaagctatcccatgagggccctggcagtgagttaccagctggagcgctgtatcgtaagaccagccagctgctggagacattgaatcaattgagcacacacacgcacgtagtagacatcactcgcaccagccctgctgccaagagcccgtcggcccaacttatggagcaagtggctcagcttaagtccctgagtgacaccgtcgagaagctcaaggatgaggtcctcaaggagacagtatctcagcgccctggagccacagtacccactgactttgccaccttcccttcatcagccttcctcagggccaaggaggagcagcaggatgacacagtctacatgggcaaagtgaccttctcatgtgcggctggttttggacagcgacaccggctggtgctgacccaggagcagctgcaccagcttcacagtcgcctcatctcctaagcactcctttcccctgctgtccccttcgaccctcagccctctggtgccgctctgcccgatgcacagccacctcagccagcccccaggtagaaacgtgggttaagctcttcctgccccgttcagcttcactcccaccctttcagcgtcctgccccttcaccttgacccgggttcccccactcccattccctggcctctgccataatttgttgttcaactgctccctccttcctgaggggcctcagggcttgtggggggtaggctgagaccccaccaccaaaggttaagtgaggtccccttgattgaggacttcaccccttgattaaagcaacttctgcttcag

SEQ ID NO: 404039 - DNA, 918 bp, Homo sapiens
  misc_feature (1)..(1): n is a, c, g, or t
  misc_feature (48)..(49): n is a, c, g, or t
ntctagaccatcgctttatggttgtgggtagacatcacccgcaccagnnctgctgccaagagcccgtcggcccaacttatggagcaagtggctcagcttaagtccctgagtgacaccgtcgagaagctcaaggatgaggtcctcaaggagacagtatctcagcgccctggagccacagtacccactgactttgccaccttcccttcatcagccttcctcagggccaaggaggagcagcaggatgacacagtctacatgggcaaagtgaccttctcatgtgcggctggttttggacagcgacaccggctggtgctgacccaggagcagctgcaccagcttcacagtcgcctcatctcctaagcactcctttcccctgctgtccccttcgaccctcagccctctggtgccgctctgcccgatgcacagccacctcagccagcccccaggtagaaacgtgggttaagctcttcctgccccgttcagcttcactcccaccctttcagcgtcctgccccttcaccttgacccgggttcccccactcccattccctggcctctgccataatttgttgttcaactgctccctccttcctgaggggcctcagggcttgtggggggtaggctgagaccccaccaccaaaggttaagtgaggtccccttgattgaggacttcaccccttgattaaagcaacttctgcttcagaaaaaaaacgcgcaaaccagcgaacacagcagaagaagtcacgacgaacacaccccggggggcaaaaacgaggggcgcgcggcaacaaagcgggtaagacagcgggacacggggcaaagaggaggcagagcgccagcttgtgcgccaacggggggggaaactcggggaggccccaaatagagggcgaagaaaactgcaaaggcggggacgcgtaga

SEQ ID NO: 404040 - DNA, 1621 bp, Homo sapiens
gcacacgcctgtaatcctagcactttgggaggccgaggcaggtgaattgcctgagctcaggagttcgagaccagcctaggcaacacggtgaaaccccgtctctactaaactacaaaaaattagccgggtgtggtggcatgcacctgtagtcccagctattcgggaggctgaggcaggagaatcgcttgaacccaggaggcagaagttgcagtgagctgagatggcaccactgcactccagcctaggcaacagagtgagactccgtatccaaacaaaaaaaaagtttgaaccatctgcattatgggccttgctccagaagtgtgactggggctttcccagattgaaaagccagttccaaaactctgttaatgaaagaaccaatgcatctgagtggataaatgtttctaaaataaaatagttcttgttaaagtgaaatttgaaaccacatgttaaatcaaaatgatcctttaaattagtatcactggtttttcatacctggaatcacatttcatgatacatttgggtgggtcctccctgcaaattttcaatgtttattcccaaagtcaaactcccattcatgtgaacaatacaggttagacagaggtaaggtcacattttacattacaactttgcaatattaatcaacctagtactttaaaggaatgattgaaaactatttgggaagataaaaaccagtttcaatgaagcaaacctattcctcatgaaacttaagatcagtcattttatcttcaatccacatttaatgaacaccaaccatgttgattaaatgcctactatgaccctgacagccacagtgcatctgacacttactttctccaaaacaactatgatttaaaccttgagtaaatcacttgaaccttgaggttagagttactatatttgctcaagatgacaaatgcaggtgctttcttttttaaagaaaaatgacactagatcattaacaccttgagtataggacaggtaattgcctctgtaattcccagcgtctagtgtagtgcctggtccatagaaagctctcaataagtgtttgattacatttaatctcagagctcccttccaagggatactgccaagaggtaaagctccaaacctctactcttactgagagcagaatttcttagaatttccagaaccatctcctatgcttaagtataaattcttgtcagacacagtggctcacacctgtaatcccgctacttgggaggcagaggtggggggaatcagcagaggtcaggaggtcaagaccagcctgggcaacatagtgagacccatctctaaacaaatgtttaaaaattagctaggcatgctggcacacacctgtagtcccagccatttcagaggctgatgcaggaggatcgtttaagtccaggagttcaaggctgcagtgagctataatcatgccactgcactccagccagggagacagagcaagactcagtctcaaaacaaacaaacaaagagactggaggacgaggctggtttctccaaagctctttaaacctctgtttgggtgtgggtgcccaggcctgtaatcccagccttggaaattagggattgtggttaagccgaggtataacagccggacatttaagcccttttt

SEQ ID NO: 404041 - DNA, 8598 bp, Homo sapiens
tgggcgtcggtcgtcggtggggtcggagctgggcgcggagcccctcacagtgcagacgcccagcggcagcaggatgagtgcggaggcaagcgcccggcctctgcgggtgggctcccgtgtagaggtgattggaaaaggccaccgaggcactgtggcctatgttggagccacactgtttgccactggcaaatgggtaggcgtgattctggatgaagcaaagggcaaaaatgatggaactgttcaaggcaggaagtacttcacttgtgatgaagggcatggcatctttgtgcgccagtcccagatccaggtatttgaagatggagcagatactacttccccagagacacctgattcttctgcttcaaaagtcctcaaaagagagggaactgatacaactgcaaagactagcaaactgcccacgcgcccagccagtactggggtggctggggccagtagctccctgggcccctctggctcagcgtcagcaggtgagctgagcagcagtgagcccagcaccccggctcagactccgctggcagcacccatcatccccacgccggtcctcacctctcctggagcagtccccccgcttccttccccatccaaggaggaggagggactaagggctcaggtgcgggacctggaggagaaactagagaccctgagactgaaacgggcagaagacaaagcaaagctaaaagagctggagaaacacaaaatccagctggagcaggtgcaggaatggaagagcaaaatgcaggagcagcaggccgacctgcagcggcgcctcaaggaggcgagaaaggaagccaaggaggcgctggaggcaaaggaacgctatatggaggagatggctgatactgctgatgccattgagatggccactttggacaaggagatggctgaagagcgggctgagtccctgcagcaggaggtggaggcactgaaggagcgggtggacgagctcactactgacttagagatcctcaaggctgagattgaagagaagggctcagatggcgctgcatccagttatcagctcaagcagcttgaggagcagaatgcccgcctgaaggatgccctggtgaggatgcgggatctttcttcctcagagaagcaggagcatgtgaagctccagaagctcatggaaaagaagaaccaagagctggaagttgtgaggcaacagcgggagcgtctgcaggaggagctaagccaggcagagagcaccattgatgagctcaaggagcaggtggatgctgctctgggtgctgaggagatggtggagatgctgacagatcggaacctgaatctggaagagaaagtgcgcgagttgagggagactgtgggagacttggaagcgatgaatgagatgaacgatgagctgcaggagaatgcacgtgagacagaactggagctgcgggagcagctggacatggcaggcgcgcgggttcgtgaggcccagaagcgtgtggaggcagcccaggagacggttgcagactaccagcagaccatcaagaagtaccgccagctgaccgcccatctacaggatgtgaatcgggaactgacaaaccagcaggaagcatctgtggagaggcaacagcagccacctccagagacctttgacttcaaaatcaagtttgctgagactaaggcccatgccaaggcaattgagatggaattgaggcagatggaggtggcccaggccaatcgacacatgtccctgctgacagccttcatgcctgacagcttccttcggccaggtggggaccatgactgcgttctggtgctgttgctcatgcctcgtctcatttgcaaggcagagctgatccggaagcaggcccaggagaagtttgaactaagtgagaactgttcagagcggcctgggctgcgaggagctgctggggagcaactcagctttgctgctggactggtgtactcgctgagcctgctgcaggccacgctacaccgctatgagcatgccctctctcagtgcagtgtggatgtgtataagaaagtgggcagcctgtaccctgagatgagtgcccatgagcgctccttggatttcctcattgaactgctgcacaaggatcagctggatgagactgtcaatgtggagcctctcaccaaggccatcaagtactatcagcatctgtacagcatccaccttgccgaacagcctgaggactgtactatgcagctggctgaccacattaagttcacgcagagtgctctggactgcatgagtgtggaggtaggacggctgcgtgccttcttgcagggtgggcaggaggctacagatattgccctcctgctccgggatctggaaacttcatgcagtgacatccgccagttctgcaagaagatccgaaggcgaatgccagggacagatgctcctgggatcccagctgcactggcctttggaccacaggtatctgacacgctcctagactgcaggaaacacttgacgtgggtcgtggctgtgctgcaggaggtggcagctgctgctgcccagctcattgccccactggcagagaatgaggggctacttgtggctgctctggaggaactggctttcaaagcaagcgagcagatctatgggaccccctccagcagcccctatgagtgtctgcgccagtcatgcaacatcctcatcagtaccatgaacaagctggccacagccatgcaggagggggagtatgatgcagagcggccccccagcaagcctccaccggttgaactgcgggctgctgcccttcgtgcagagatcacagatgctgaaggcctgggtttgaagctcgaagatcgagagacagttattaaggagttgaagaagtcactcaagattaagggagaggagctaagtgaggccaatgtgcggctgagcctcctggagaagaagttggacagtgctgccaaggatgcagatgagcgcatcgagaaagtccagactcggctggaggagacccaggcactgctgcgaaagaaggagaaagagtttgaggagacaatggatgcactccaggctgacatcgaccagctggaggcagagaaggcagaactaaagcagcgtctgaacagccagtccaaacgcacgattgagggactccggggccctcctccttcaggcattgctactctggtctctggcattgctggtggagccatccctgggcaggctccagggtctgtgccaggcccagggctggtgaaggactcaccactgctgcttcagcagatctctgccatgaggctgcacatctcccagctccagcatgagaacagcatcctcaagggagcccagatgaaggcatccttggcatccctgccccctctgcatgttgcaaagctatcccatgagggccctggcagtgagttaccagctggagcgctgtatcgtaagaccagccagctgctggagacattgaatcaattgagcacacacacgcacgtagtagacatcactcgcaccagccctgctgccaagagcccgtcggcccaacttatggagcaagtggctcagcttaagtccctgagtgacaccgtcgagaagctcaaggatgaggtcctcaaggagacagtatctcagcgccctggagccacagtacccactgactttgccaccttcccttcatcagccttcctcagggccaaggaggagcagcaggatgacacagtctacatgggcaaagtgaccttctcatgtgcggctggttttggacagcgacaccggctggtgctgacccaggagcagctgcaccagcttcacagtcgcctcatctcctaagcactcctttcccctgctgtccccttcgaccctcagccctctggtgccgctctgcccgatgcacagccacctcagccagcccccaggtagaaacgtgggttaagctcttcctgccccgttcagcttcactcccaccctttcagcgtcctgccccttcaccttgacccgggttcccccactcccattccctggcctctgccataatttgttgttcaactgctccctccttcctgaggggcctcagggcttgtggggggtaggctgagaccccaccaccaaaggttaagtgaggtccccttgattgaggacttcaccccttgattaaagcaacttctgcttcagtgcttcctgtgtggtgttgagagtgggacttgggccattaagctcacagcaggagtggaggagaagcgatgctgaggaagctttggctgtatcaaatttgaggtctcctcttcgtagtgaccagaagaatgctgtttctaaaattcatgtgcacaggcatcccaggatttggaattcagctgtgagctcatgagctgatggatgtttccaggagtaccctgaagaccacccaggtgggagtgtaagataaccttccagataaagagttgctgctaccaaaagagtgctgacaccatcacagtatgttcccttctcaaccctggacatggttcagaaacagctaaagcagacaagaatctggggcagccaatattgtaccacctgccaaagcttggcacaaacaatctggaagccaaaaattgcacatactgtggaacagagcaagtggttctggcctccctgggatttggatcctggtttccagagctaagaacacaaagtcatgaaggtgaaggaggagaaggctggggtaggaaagctggaccacactaaccacaggaggagatttccggatcagaaagaatgccctcctatccacattgggcttccagtacccacttaccctcaaagaaaaactgaccagaagggacatctttcaggcctgcaaaaagtccactggggcctgcggccagaccagccacagcaggaactgactggcccagggagtggggcaagcagccaggacagcagcatggatcttatcagcaggactcggtccccagctgctgagcagctccaggacatcctgggggaggaagatgaggctcccaaccccaccctctttacagagatggatactctgcagcatgacggagaccagatggagtggaaggagtcagccaggtggataaagtttgaagaaaaggtagaggaaggcggcgaacgctggagcaagccccacgtgtccacactatccctgcacagcctcttcgagctccgtacctgcctgcagacggggacggtgctgctggatttggacagtggctccttaccacagatcatagatgatgtcattgagaagcagattgaggatggtctcctgcggccagagctccgggagagggtcagttacgtcctcctgaggaggcaccgccaccaaaccaagaagcccatccaccgctccttagctgacattgggaagtcagtctccaccacaaatcgcagtcctgcccggagccctggtgctggcccgagtctacaccactccacggaagacctgcggatgcggcagagtgcaaattacggacgtctgtgtcatgcccagagcagaagcatgaatgacatttctctcaccccaaacacagaccagcggaaaaacaaattcatgaagaagatccccaaggactcagaagcgtccaacgtgctcgtgggcgaggtggacttcctagaccagccattcatcgcgttcgtgcgcctcatccagtcggccatgctgggaggagtgaccgaggtgcctgtccccaccagatttctgtttatactactgggaccttctgggagagcaaaatcctacaatgaaattggccgtgccattgcaaccctcatggtagatgatctcttcagtgacgtggcctacaaagcccgcaatcgggaagatctgatcgcaggaattgatgaatttctggatgaggtcatcgtccttcctcctggagaatgggacccaaatatccggattgagccccccaagaaggtgccctctgctgacaagaggaaatctgtgttctccctagcagagctgggccagatgaatggctctgtgggaggaggcggcggagctcctggaggaggcaatggaggtggtggtggtggtggcagtggcggcggggctggcagtggcggggccggcggaacaagcagcggggatgatggagagatgccagccatgcatgaaatcggggaggaacttatctggacaggaaggttcttcggtggcctgtgtctggatatcaagaggaagttgccctggttcccaagtgacttctatgatggcttccacattcagtccatctctgccatcctattcatctacctcggctgtatcaccaacgcgatcacctttggtgggcttctgggggatgccaccgacaattatcagggagtgatggagagcttcctgggcactgccatggctggctccttgttctgcctcttctcgggacagcctctcatcattctcagcagcacggggcccatcctcatctttgagaagctcctcttcgacttcagcaaaggcaatggcctggactacatggagttccgcctctggattggcctacactcagctgtccagtgccttatcctagtggccacagatgccagctttatcatcaaatatatcacccgcttcaccgaggagggcttctccacccttatcagcttcatcttcatctacgatgccatcaagaagatgatcggtgccttcaagtactaccctatcaatatggacttcaagccaaacttcatcactacctacaagtgcgagtgtgtcgcccctgacacagtgaatacaaccgtgttcaatgcttcagccccattggcaccagacaccaacgcttctctgtacaacctccttaacctcacagcgttggactggtccctgctgagcaagaaggagtgtctgagctacggcgggcgcctgcttgggaattcctgcaagtttatcccagacctggcgctcatgtccttcatccttttctttgggacatactccatgaccctgaccctgaagaagttcaaattcagccgctattttcctaccaaggtccgggccctggtggctgacttttccattgttttctccatcctgatgttctgtggaatcgatgcctgttttggcctagaaactcccaagctgcatgtgcccagtgtcatcaagccaacgcggcctgaccgaggctggttcgtggccccctttgggaagaacccgtggtgggtatacccagcaagcatcctgcccgccctgctggtgaccatcctgatcttcatggaccagcagatcactgccgtcattgtcaaccggaaggagaacaaactgaagaaggctgccggctaccatctggacctgttctgggtgggcatcctcatggctttgtgctcctttatggggctcccctggtacgtggctgccacggtcatctccatcgcccacatcgacagcctcaagatggagacagagaccagtgcccctggggagcagccccagtttctgggagtcagggaacagagagtaaccggcatcatcgtcttcatcctgacgggaatctctgtcttcctggctcccatcctaaagtgtatccccctgccggtgctgtacggagtcttcctctacatgggcgtggcctccctgaatggcatccagatggggaccggagggtcagaattcaaaatccagaagaagctgactccattctgggaacgctgcaagctcttcctgatgccagccaagcaccagccggaccatgccttcctgcggcacgtgccgctgcgccggatccacctcttcaccctggtgcagatcctctgcctggcggtgctctggatcctcaaatccacggtggctgccatcatcttcccggtcatgatcctgggcctcatcatcgttcgaaggcttctggatttcatcttttcccagcacgacctggcctggattgacaacatcctcccagagaaggaaaaaaaggagacagacaagaagaggaagagaaaaaaaggggcccacgaggactgtgatgaggagccccagttccctcctccctcggttataaagattcccatggaaagtgtccaatcagatccccaaaacggtatccactgcattgccagaaaaagatcttccagttggagttactcactctgattcttccttcagtgacacagaacttgaccgaaggtaagcaggcatggattagagacataagctatacgtcacttacaaaaacatctccagcaaactatctaaacttctttaaactccagagaactatcaaaagaataacgccagctggcagaagaacgaggacggaggtaggtcaactcaattgtttcttctctttctgcctcaagctgcctagagcaggagctacttctgctcgcatgaaagccaaaagccaaaacagacaaacctatccctgcctcaagtattttacagattaagctcctagcttggcacaacctgttgtgatataagactgtaggacaggccaggtgcagtggctcacgcctgtaatcctagcattttgggaggccgaggcaggtggatcacttgaggtcaggagtttgagaccagcctggccaatgtgatgaaaccccatctctactaaaaacacaaaaattagccaggcatggtggcatgcacctgtaatcccagctactcaggaggctgaggcacaagaattgtttgaacccgagaggca

SEQ ID NO: 404042 - DNA, 8519 bp, Homo sapiens
tgggcgtcggtcgtcggtggggtcggagctgggcgcggagcccctcacagtgcagacgcccagcggcagcaggatgagtgcggaggcaagcgcccggcctctgcgggtgggctcccgtgtagaggtgattggaaaaggccaccgaggcactgtggcctatgttggagccacactgtttgccactggcaaatgggtaggcgtgattctggatgaagcaaagggcaaaaatgatggaactgttcaaggcaggaagtacttcacttgtgatgaagggcatggcatctttgtgcgccagtcccagagggaactgatacaactgcaaagactagcaaactgcccacgcgcccagccagtactggggtggctggggccagtagctccctgggcccctctggctcagcgtcagcaggtgagctgagcagcagtgagcccagcaccccggctcagactccgctggcagcacccatcatccccacgccggtcctcacctctcctggagcagtccccccgcttccttccccatccaaggaggaggagggactaagggctcaggtgcgggacctggaggagaaactagagaccctgagactgaaacgggcagaagacaaagcaaagctaaaagagctggagaaacacaaaatccagctggagcaggtgcaggaatggaagagcaaaatgcaggagcagcaggccgacctgcagcggcgcctcaaggaggcgagaaaggaagccaaggaggcgctggaggcaaaggaacgctatatggaggagatggctgatactgctgatgccattgagatggccactttggacaaggagatggctgaagagcgggctgagtccctgcagcaggaggtggaggcactgaaggagcgggtggacgagctcactactgacttagagatcctcaaggctgagattgaagagaagggctcagatggcgctgcatccagttatcagctcaagcagcttgaggagcagaatgcccgcctgaaggatgccctggtgaggatgcgggatctttcttcctcagagaagcaggagcatgtgaagctccagaagctcatggaaaagaagaaccaagagctggaagttgtgaggcaacagcgggagcgtctgcaggaggagctaagccaggcagagagcaccattgatgagctcaaggagcaggtggatgctgctctgggtgctgaggagatggtggagatgctgacagatcggaacctgaatctggaagagaaagtgcgcgagttgagggagactgtgggagacttggaagcgatgaatgagatgaacgatgagctgcaggagaatgcacgtgagacagaactggagctgcgggagcagctggacatggcaggcgcgcgggttcgtgaggcccagaagcgtgtggaggcagcccaggagacggttgcagactaccagcagaccatcaagaagtaccgccagctgaccgcccatctacaggatgtgaatcgggaactgacaaaccagcaggaagcatctgtggagaggcaacagcagccacctccagagacctttgacttcaaaatcaagtttgctgagactaaggcccatgccaaggcaattgagatggaattgaggcagatggaggtggcccaggccaatcgacacatgtccctgctgacagccttcatgcctgacagcttccttcggccaggtggggaccatgactgcgttctggtgctgttgctcatgcctcgtctcatttgcaaggcagagctgatccggaagcaggcccaggagaagtttgaactaagtgagaactgttcagagcggcctgggctgcgaggagctgctggggagcaactcagctttgctgctggactggtgtactcgctgagcctgctgcaggccacgctacaccgctatgagcatgccctctctcagtgcagtgtggatgtgtataagaaagtgggcagcctgtaccctgagatgagtgcccatgagcgctccttggatttcctcattgaactgctgcacaaggatcagctggatgagactgtcaatgtggagcctctcaccaaggccatcaagtactatcagcatctgtacagcatccaccttgccgaacagcctgaggactgtactatgcagctggctgaccacattaagttcacgcagagtgctctggactgcatgagtgtggaggtaggacggctgcgtgccttcttgcagggtgggcaggaggctacagatattgccctcctgctccgggatctggaaacttcatgcagtgacatccgccagttctgcaagaagatccgaaggcgaatgccagggacagatgctcctgggatcccagctgcactggcctttggaccacaggtatctgacacgctcctagactgcaggaaacacttgacgtgggtcgtggctgtgctgcaggaggtggcagctgctgctgcccagctcattgccccactggcagagaatgaggggctacttgtggctgctctggaggaactggctttcaaagcaagcgagcagatctatgggaccccctccagcagcccctatgagtgtctgcgccagtcatgcaacatcctcatcagtaccatgaacaagctggccacagccatgcaggagggggagtatgatgcagagcggccccccagcaagcctccaccggttgaactgcgggctgctgcccttcgtgcagagatcacagatgctgaaggcctgggtttgaagctcgaagatcgagagacagttattaaggagttgaagaagtcactcaagattaagggagaggagctaagtgaggccaatgtgcggctgagcctcctggagaagaagttggacagtgctgccaaggatgcagatgagcgcatcgagaaagtccagactcggctggaggagacccaggcactgctgcgaaagaaggagaaagagtttgaggagacaatggatgcactccaggctgacatcgaccagctggaggcagagaaggcagaactaaagcagcgtctgaacagccagtccaaacgcacgattgagggactccggggccctcctccttcaggcattgctactctggtctctggcattgctggtggagccatccctgggcaggctccagggtctgtgccaggcccagggctggtgaaggactcaccactgctgcttcagcagatctctgccatgaggctgcacatctcccagctccagcatgagaacagcatcctcaagggagcccagatgaaggcatccttggcatccctgccccctctgcatgttgcaaagctatcccatgagggccctggcagtgagttaccagctggagcgctgtatcgtaagaccagccagctgctggagacattgaatcaattgagcacacacacgcacgtagtagacatcactcgcaccagccctgctgccaagagcccgtcggcccaacttatggagcaagtggctcagcttaagtccctgagtgacaccgtcgagaagctcaaggatgaggtcctcaaggagacagtatctcagcgccctggagccacagtacccactgactttgccaccttcccttcatcagccttcctcagggccaaggaggagcagcaggatgacacagtctacatgggcaaagtgaccttctcatgtgcggctggttttggacagcgacaccggctggtgctgacccaggagcagctgcaccagcttcacagtcgcctcatctcctaagcactcctttcccctgctgtccccttcgaccctcagccctctggtgccgctctgcccgatgcacagccacctcagccagcccccaggtagaaacgtgggttaagctcttcctgccccgttcagcttcactcccaccctttcagcgtcctgccccttcaccttgacccgggttcccccactcccattccctggcctctgccataatttgttgttcaactgctccctccttcctgaggggcctcagggcttgtggggggtaggctgagaccccaccaccaaaggttaagtgaggtccccttgattgaggacttcaccccttgattaaagcaacttctgcttcagtgcttcctgtgtggtgttgagagtgggacttgggccattaagctcacagcaggagtggaggagaagcgatgctgaggaagctttggctgtatcaaatttgaggtctcctcttcgtagtgaccagaagaatgctgtttctaaaattcatgtgcacaggcatcccaggatttggaattcagctgtgagctcatgagctgatggatgtttccaggagtaccctgaagaccacccaggtgggagtgtaagataaccttccagataaagagttgctgctaccaaaagagtgctgacaccatcacagtatgttcccttctcaaccctggacatggttcagaaacagctaaagcagacaagaatctggggcagccaatattgtaccacctgccaaagcttggcacaaacaatctggaagccaaaaattgcacatactgtggaacagagcaagtggttctggcctccctgggatttggatcctggtttccagagctaagaacacaaagtcatgaaggtgaaggaggagaaggctggggtaggaaagctggaccacactaaccacaggaggagatttccggatcagaaagaatgccctcctatccacattgggcttccagtacccacttaccctcaaagaaaaactgaccagaagggacatctttcaggcctgcaaaaagtccactggggcctgcggccagaccagccacagcaggaactgactggcccagggagtggggcaagcagccaggacagcagcatggatcttatcagcaggactcggtccccagctgctgagcagctccaggacatcctgggggaggaagatgaggctcccaaccccaccctctttacagagatggatactctgcagcatgacggagaccagatggagtggaaggagtcagccaggtggataaagtttgaagaaaaggtagaggaaggcggcgaacgctggagcaagccccacgtgtccacactatccctgcacagcctcttcgagctccgtacctgcctgcagacggggacggtgctgctggatttggacagtggctccttaccacagatcatagatgatgtcattgagaagcagattgaggatggtctcctgcggccagagctccgggagagggtcagttacgtcctcctgaggaggcaccgccaccaaaccaagaagcccatccaccgctccttagctgacattgggaagtcagtctccaccacaaatcgcagtcctgcccggagccctggtgctggcccgagtctacaccactccacggaagacctgcggatgcggcagagtgcaaattacggacgtctgtgtcatgcccagagcagaagcatgaatgacatttctctcaccccaaacacagaccagcggaaaaacaaattcatgaagaagatccccaaggactcagaagcgtccaacgtgctcgtgggcgaggtggacttcctagaccagccattcatcgcgttcgtgcgcctcatccagtcggccatgctgggaggagtgaccgaggtgcctgtccccaccagatttctgtttatactactgggaccttctgggagagcaaaatcctacaatgaaattggccgtgccattgcaaccctcatggtagatgatctcttcagtgacgtggcctacaaagcccgcaatcgggaagatctgatcgcaggaattgatgaatttctggatgaggtcatcgtccttcctcctggagaatgggacccaaatatccggattgagccccccaagaaggtgccctctgctgacaagaggaaatctgtgttctccctagcagagctgggccagatgaatggctctgtgggaggaggcggcggagctcctggaggaggcaatggaggtggtggtggtggtggcagtggcggcggggctggcagtggcggggccggcggaacaagcagcggggatgatggagagatgccagccatgcatgaaatcggggaggaacttatctggacaggaaggttcttcggtggcctgtgtctggatatcaagaggaagttgccctggttcccaagtgacttctatgatggcttccacattcagtccatctctgccatcctattcatctacctcggctgtatcaccaacgcgatcacctttggtgggcttctgggggatgccaccgacaattatcagggagtgatggagagcttcctgggcactgccatggctggctccttgttctgcctcttctcgggacagcctctcatcattctcagcagcacggggcccatcctcatctttgagaagctcctcttcgacttcagcaaaggcaatggcctggactacatggagttccgcctctggattggcctacactcagctgtccagtgccttatcctagtggccacagatgccagctttatcatcaaatatatcacccgcttcaccgaggagggcttctccacccttatcagcttcatcttcatctacgatgccatcaagaagatgatcggtgccttcaagtactaccctatcaatatggacttcaagccaaacttcatcactacctacaagtgcgagtgtgtcgcccctgacacagtgaatacaaccgtgttcaatgcttcagccccattggcaccagacaccaacgcttctctgtacaacctccttaacctcacagcgttggactggtccctgctgagcaagaaggagtgtctgagctacggcgggcgcctgcttgggaattcctgcaagtttatcccagacctggcgctcatgtccttcatccttttctttgggacatactccatgaccctgaccctgaagaagttcaaattcagccgctattttcctaccaaggtccgggccctggtggctgacttttccattgttttctccatcctgatgttctgtggaatcgatgcctgttttggcctagaaactcccaagctgcatgtgcccagtgtcatcaagccaacgcggcctgaccgaggctggttcgtggccccctttgggaagaacccgtggtgggtatacccagcaagcatcctgcccgccctgctggtgaccatcctgatcttcatggaccagcagatcactgccgtcattgtcaaccggaaggagaacaaactgaagaaggctgccggctaccatctggacctgttctgggtgggcatcctcatggctttgtgctcctttatggggctcccctggtacgtggctgccacggtcatctccatcgcccacatcgacagcctcaagatggagacagagaccagtgcccctggggagcagccccagtttctgggagtcagggaacagagagtaaccggcatcatcgtcttcatcctgacgggaatctctgtcttcctggctcccatcctaaagtgtatccccctgccggtgctgtacggagtcttcctctacatgggcgtggcctccctgaatggcatccagatggggaccggagggtcagaattcaaaatccagaagaagctgactccattctgggaacgctgcaagctcttcctgatgccagccaagcaccagccggaccatgccttcctgcggcacgtgccgctgcgccggatccacctcttcaccctggtgcagatcctctgcctggcggtgctctggatcctcaaatccacggtggctgccatcatcttcccggtcatgatcctgggcctcatcatcgttcgaaggcttctggatttcatcttttcccagcacgacctggcctggattgacaacatcctcccagagaaggaaaaaaaggagacagacaagaagaggaagagaaaaaaaggggcccacgaggactgtgatgaggagccccagttccctcctccctcggttataaagattcccatggaaagtgtccaatcagatccccaaaacggtatccactgcattgccagaaaaagatcttccagttggagttactcactctgattcttccttcagtgacacagaacttgaccgaaggtaagcaggcatggattagagacataagctatacgtcacttacaaaaacatctccagcaaactatctaaacttctttaaactccagagaactatcaaaagaataacgccagctggcagaagaacgaggacggaggtaggtcaactcaattgtttcttctctttctgcctcaagctgcctagagcaggagctacttctgctcgcatgaaagccaaaagccaaaacagacaaacctatccctgcctcaagtattttacagattaagctcctagcttggcacaacctgttgtgatataagactgtaggacaggccaggtgcagtggctcacgcctgtaatcctagcattttgggaggccgaggcaggtggatcacttgaggtcaggagtttgagaccagcctggccaatgtgatgaaaccccatctctactaaaaacacaaaaattagccaggcatggtggcatgcacctgtaatcccagctactcaggaggctgaggcacaagaattgtttgaacccgagaggca

SEQ ID NO: 404043 - DNA, 4538 bp, Homo sapiens
tgggcgtcggtcgtcggtggggtcggagctgggcgcggagcccctcacagtgcagacgcccagcggcagcaggatgagtgcggaggcaagcgcccggcctctgcgggtgggctcccgtgtagaggtgattggaaaaggccaccgaggcactgtggcctatgttggagccacactgtttgccactggcaaatgggtaggcgtgattctggatgaagcaaagggcaaaaatgatggaactgttcaaggcaggaagtacttcacttgtgatgaagggcatggcatctttgtgcgccagtcccagatccaggtatttgaagatggagcagatactacttccccagagacacctgattcttctgcttcaaaagtcctcaaaagagagggaactgatacaactgcaaagactagcaaactgcccacgcgcccagccagtactggggtggctggggccagtagctccctgggcccctctggctcagcgtcagcaggtgagctgagcagcagtgagcccagcaccccggctcagactccgctggcagcacccatcatccccacgccggtcctcacctctcctggagcagtccccccgcttccttccccatccaaggaggaggagggactaagggctcaggtgcgggacctggaggagaaactagagaccctgagactgaaacgggcagaagacaaagcaaagctaaaagagctggagaaacacaaaatccagctggagcaggtgcaggaatggaagagcaaaatgcaggagcagcaggccgacctgcagcggcgcctcaaggaggcgagaaaggaagccaaggaggcgctggaggcaaaggaacgctatatggaggagatggctgatactgctgatgccattgagatggccactttggacaaggagatggctgaagagcgggctgagtccctgcagcaggaggtggaggcactgaaggagcgggtggacgagctcactactgacttagagatcctcaaggctgagattgaagagaagggctcagatggcgctgcatccagttatcagctcaagcagcttgaggagcagaatgcccgcctgaaggatgccctggtgaggatgcgggatctttcttcctcagagaagcaggagcatgtgaagctccagaagctcatggaaaagaagaaccaagagctggaagttgtgaggcaacagcgggagcgtctgcaggaggagctaagccaggcagagagcaccattgatgagctcaaggagcaggtggatgctgctctgggtgctgaggagatggtggagatgctgacagatcggaacctgaatctggaagagaaagtgcgcgagttgagggagactgtgggagacttggaagcgatgaatgagatgaacgatgagctgcaggagaatgcacgtgagacagaactggagctgcgggagcagctggacatggcaggcgcgcgggttcgtgaggcccagaagcgtgtggaggcagcccaggagacggttgcagactaccagcagaccatcaagaagtaccgccagctgaccgcccatctacaggatgtgaatcgggaactgacaaaccagcaggaagcatctgtggagaggcaacagcagccacctccagagacctttgacttcaaaatcaagtttgctgagactaaggcccatgccaaggcaattgagatggaattgaggcagatggaggtggcccaggccaatcgacacatgtccctgctgacagccttcatgcctgacagcttccttcggccaggtggggaccatgactgcgttctggtgctgttgctcatgcctcgtctcatttgcaaggcagagctgatccggaagcaggcccaggagaagtttgaactaagtgagaactgttcagagcggcctgggctgcgaggagctgctggggagcaactcagctttgctgctggactggtgtactcgctgagcctgctgcaggccacgctacaccgctatgagcatgccctctctcagtgcagtgtggatgtgtataagaaagtgggcagcctgtaccctgagatgagtgcccatgagcgctccttggatttcctcattgaactgctgcacaaggatcagctggatgagactgtcaatgtggagcctctcaccaaggccatcaagtactatcagcatctgtacagcatccaccttgccgaacagcctgaggactgtactatgcagctggctgaccacattaagttcacgcagagtgctctggactgcatgagtgtggaggtaggacggctgcgtgccttcttgcagggtgggcaggaggctacagatattgccctcctgctccgggatctggaaacttcatgcagtgacatccgccagttctgcaagaagatccgaaggcgaatgccagggacagatgctcctgggatcccagctgcactggcctttggaccacaggtatctgacacgctcctagactgcaggaaacacttgacgtgggtcgtggctgtgctgcaggaggtggcagctgctgctgcccagctcattgccccactggcagagaatgaggggctacttgtggctgctctggaggaactggctttcaaagcaagcgagcagatctatgggaccccctccagcagcccctatgagtgtctgcgccagtcatgcaacatcctcatcagtaccatgaacaagctggccacagccatgcaggagggggagtatgatgcagagcggccccccagcaagcctccaccggttgaactgcgggctgctgcccttcgtgcagagatcacagatgctgaaggcctgggtttgaagctcgaagatcgagagacagttattaaggagttgaagaagtcactcaagattaagggagaggagctaagtgaggccaatgtgcggctgagcctcctggagaagaagttggacagtgctgccaaggatgcagatgagcgcatcgagaaagtccagactcggctggaggagacccaggcactgctgcgaaagaaggagaaagagtttgaggagacaatggatgcactccaggctgacatcgaccagctggaggcagagaaggcagaactaaagcagcgtctgaacagccagtccaaacgcacgattgagggactccggggccctcctccttcaggcattgctactctggtctctggcattgctggtggagccatccctgggcaggctccagggtctgtgccaggcccagggctggtgaaggactcaccactgctgcttcagcagatctctgccatgaggctgcacatctcccagctccagcatgagaacagcatcctcaagggagcccagatgaaggcatccttggcatccctgccccctctgcatgttgcaaagctatcccatgagggccctggcagtgagttaccagctggagcgctgtatcgtaagaccagccagctgctggagacattgaatcaattgagcacacacacgcacgtagtagacatcactcgcaccagccctgctgccaagagcccgtcggcccaacttatggagcaagtggctcagcttaagtccctgagtgacaccgtcgagaagctcaaggatgaggtcctcaaggagacagtatctcagcgccctggagccacagtacccactgactttgccaccttcccttcatcagccttcctcagggccaaggaggagcagcaggatgacacagtctacatgggcaaagtgaccttctcatgtgcggctggttttggacagcgacaccggctggtgctgacccaggagcagctgcaccagcttcacagtcgcctcatctcctaagcactcctttcccctgctgtccccttcgaccctcagccctctggtgccgctctgcccgatgcacagccacctcagccagcccccaggtagaaacgtgggttaagctcttcctgccccgttcagcttcactcccaccctttcagcgtcctgccccttcaccttgacccgggttcccccactcccattccctggcctctgccataatttgttgttcaactgctccctccttcctgaggggcctcagggcttgtggggggtaggctgagaccccaccaccaaaggttaagtgaggtccccttgattgaggacttcaccccttgattaaagcaacttctgcttcagtgaaaaaaaaaaaaaaaaaaaaaaaaaaaaaaaaaaaaaaaaaaaaaaaaaggggggggccccaaaaaaccccccgagcgagcgcgccacaaccaatacaagcgggacacagccacggcattcaatggtagaacaaggggtcgccccaataggagagagccccccagccaataataacagcgaccggcgccaacgaggagccgggagataaaacaccaaggacaacaagtgcgcaaaccaccgggcgccagccgggcggcactatgaggcgagcagacacccacactacccctggggcggcgggcgcacaattcatgggtgagaaacaactcacccaacaaaagacaagaatacaaagccctcgaaaggagcgcagtactaccacaatcgcaggaccgacaaacaggcgggc

SEQ ID NO: 404044 - DNA, 8202 bp, Homo sapiens
tgggcgtcggtcgtcggtggggtcggagctgggcgcggagcccctcacagtgcagacgcccagcggcagcaggatgagtgcggaggcaagcgcccggcctctgcgggtgggctcccgtgtagaggtgattggaaaaggccaccgaggcactgtggcctatgttggagccacactgtttgccactggcaaatgggtaggcgtgattctggatgaagcaaagggcaaaaatgatggaactgttcaaggcaggaagtacttcacttgtgatgaagggcatggcatctttgtgcgccagtcccagatccaggtatttgaagatggagcagatactacttccccagagacacctgattcttctgcttcaaaagtcctcaaaagagagggaactgatacaactgcaaagactagcaaactgcccacgcgcccagccagtactggggtggctggggccagtagctccctgggcccctctggctcagcgtcagcaggtgagctgagcagcagtgagcccagcaccccggctcagactccgctggcagcacccatcatccccacgccggtcctcacctctcctggagcagtccccccgcttccttccccatccaaggaggaggagggactaagggctcaggtgcgggacctggaggagaaactagagaccctgagactgaaacgggcagaagacaaagcaaagctaaaagagctggagaaacacaaaatccagctggagcaggtgcaggaatggaagagcaaaatgcaggagcagcaggccgacctgcagcggcgcctcaaggaggcgagaaaggaagccaaggaggcgctggaggcaaaggaacgctatatggaggagatggctgatactgctgatgccattgagatggccactttggacaaggagatggctgaagagcgggctgagtccctgcagcaggaggtggaggcactgaaggagcgggtggacgagctcactactgacttagagatcctcaaggctgagattgaagagaagggctcagatggcgctgcatccagttatcagctcaagcagcttgaggagcagaatgcccgcctgaaggatgccctggtgaggatgcgggatctttcttcctcagagaagcaggagcatgtgaagctccagaagctcatggaaaagaagaaccaagagctggaagttgtgaggcaacagcgggagcgtctgcaggaggagctaagccaggcagagagcaccattgatgagctcaaggagcaggtggatgctgctctgggtgctgaggagatggtggagatgctgacagatcggaacctgaatctggaagagaaagtgcgcgagttgagggagactgtgggagacttggaagcgatgaatgagatgaacgatgagctgcaggagaatgcacgtgagacagaactggagctgcgggagcagctggacatggcaggcgcgcgggttcgtgaggcccagaagcgtgtggaggcagcccaggagacggttgcagactaccagcagaccatcaagaagtaccgccagctgaccgcccatctacaggatgtgaatcgggaactgacaaaccagcaggaagcatctgtggagaggcaacagcagccacctccagagacctttgacttcaaaatcaagtttgctgagactaaggcccatgccaaggcaattgagatggaattgaggcagatggaggtggcccaggccaatcgacacatgtccctgctgacagccttcatgcctgacagcttccttcggccaggtggggaccatgactgcgttctggtgctgttgctcatgcctcgtctcatttgcaaggcagagctgatccggaagcaggcccaggagaagtttgaactaagtgagaactgttcagagcggcctgggctgcgaggagctgctggggagcaactcagctttgctgctggactggtgtactcgctgagcctgctgcaggccacgctacaccgctatgagcatgccctctctcagtgcagtgtggatgtgtataagaaagtgggcagcctgtaccctgagatgagtgcccatgagcgctccttggatttcctcattgaactgctgcacaaggatcagctggatgagactgtcaatgtggagcctctcaccaaggccatcaagtactatcagcatctgtacagcatccaccttgccgaacagcctgaggactgtactatgcagctggctgaccacattaagttcacgcagagtgctctggactgcatgagtgtggaggtaggacggctgcgtgccttcttgcagggtgggcaggaggctacagatattgccctcctgctccgggatctggaaacttcatgcagtgacatccgccagttctgcaagaagatccgaaggcgaatgccagggacagatgctcctgggatcccagctgcactggcctttggaccacaggtatctgacacgctcctagactgcaggaaacacttgacgtgggtcgtggctgtgctgcaggaggtggcagctgctgctgcccagctcattgccccactggcagagaatgaggggctacttgtggctgctctggaggaactggctttcaaagcaagcgagcagatctatgggaccccctccagcagcccctatgagtgtctgcgccagtcatgcaacatcctcatcagtaccatgaacaagctggccacagccatgcaggagggggagtatgatgcagagcggccccccagcaagcctccaccggttgaactgcgggctgctgcccttcgtgcagagatcacagatgctgaaggcctgggtttgaagctcgaagatcgagagacagttattaaggagttgaagaagtcactcaagattaagggagaggagctaagtgaggccaatgtgcggctgagcctcctggagaagaagttggacagtgctgccaaggatgcagatgagcgcatcgagaaagtccagactcggctggaggagacccaggcactgctgcgaaagaaggagaaagagtttgaggagacaatggatgcactccaggctgacatcgaccagctggaggcagagaaggcagaactaaagcagcgtctgaacagccagtccaaacgcacgattgagggactccggggccctcctccttcaggcattgctactctggtctctggcattgctggtggtgaaggactcaccactgctgcttcagcagatctctgccatgaggctgcacatctcccagctccagcatgagaacagcatcctcaagggagcccagatgaaggcatccttggcatccctgccccctctgcatgttgcaaagctatcccatgagggccctggcagtgagttaccagctggagcgctgtatcgtaagaccagccagctgctggagacattgaatcaattgagcacacacacgcacgtagtagacatcactcgcaccagccctgctgccaagagcccgtcggcccaacttatggagcaagtggctcagcttaagtccctgagtgacaccgtcgagaagctcaaggatgaggtcctcaaggagacagtatctcagcgccctggagccacagtacccactgactttgccaccttcccttcatcagccttcctcagggccaaggaggagcagcaggatgacacagtctacatgggcaaagtgaccttctcatgtgcggctggttttggacagcgacaccggctggtgctgacccaggagcagctgcaccagcttcacagtcgcctcatctcctaagcactcctttcccctgctgtccccttcgaccctcagccctctggtgccgctctgcccgatgcacagccacctcagccagcccccagtgcttcctgtgtggtgttgagagtgggacttgggccattaagctcacagcaggagtggaggagaagcgatgctgaggaagctttggctgtatcaaatttgaggtctcctcttcgtagtgaccagaagaatgctgtttctaaaattcatgtgcacaggcatcccaggatttggaattcagctgtgagctcatgagctgatggatgtttccaggagtaccctgaagaccacccaggtgggagtgtaagataaccttccagataaagagttgctgctaccaaaagagtgctgacaccatcacagtatgttcccttctcaaccctggacatggttcagaaacagctaaagcagacaagaatctggggcagccaatattgtaccacctgccaaagcttggcacaaacaatctggaagccaaaaattgcacatactgtggaacagagcaagtggttctggcctccctgggatttggatcctggtttccagagctaagaacacaaagtcatgaaggtgaaggaggagaaggctggggtaggaaagctggaccacactaaccacaggaggagatttccggatcagaaagaatgccctcctatccacattgggcttccagtacccacttaccctcaaagaaaaactgaccagaagggacatctttcaggcctgcaaaaagtccactggggcctgcggccagaccagccacagcaggaactgactggcccagggagtggggcaagcagccaggacagcagcatggatcttatcagcaggactcggtccccagctgctgagcagctccaggacatcctgggggaggaagatgaggctcccaaccccaccctctttacagagatggatactctgcagcatgacggagaccagatggagtggaaggagtcagccaggtggataaagtttgaagaaaaggtagaggaaggcggcgaacgctggagcaagccccacgtgtccacactatccctgcacagcctcttcgagctccgtacctgcctgcagacggggacggtgctgctggatttggacagtggctccttaccacagatcatagatgatgtcattgagaagcagattgaggatggtctcctgcggccagagctccgggagagggtcagttacgtcctcctgaggaggcaccgccaccaaaccaagaagcccatccaccgctccttagctgacattgggaagtcagtctccaccacaaatcgcagtcctgcccggagccctggtgctggcccgagtctacaccactccacggaagacctgcggatgcggcagagtgcaaattacggacgtctgtgtcatgcccagagcagaagcatgaatgacatttctctcaccccaaacacagaccagcggaaaaacaaattcatgaagaagatccccaaggactcagaagcgtccaacgtgctcgtgggcgaggtggacttcctagaccagccattcatcgcgttcgtgcgcctcatccagtcggccatgctgggaggagtgaccgaggtgcctgtccccaccagatttctgtttatactactgggaccttctgggagagcaaaatcctacaatgaaattggccgtgccattgcaaccctcatggtagatgatctcttcagtgacgtggcctacaaagcccgcaatcgggaagatctgatcgcaggaattgatgaatttctggatgaggtcatcgtccttcctcctggagaatgggacccaaatatccggattgagccccccaagaaggtgccctctgctgacaagaggaaatctgtgttctccctagcagagctgggccagatgaatggctctgtgggaggaggcggcggagctcctggaggaggcaatggaggtggtggtggtggtggcagtggcggcggggctggcagtggcggggccggcggaacaagcagcggggatgatggagagatgccagccatgcatgaaatcggggaggaacttatctggacaggaaggttcttcggtggcctgtgtctggatatcaagaggaagttgccctggttcccaagtgacttctatgatggcttccacattcagtccatctctgccatcctattcatctacctcggctgtatcaccaacgcgatcacctttggtgggcttctgggggatgccaccgacaattatcagggagtgatggagagcttcctgggcactgccatggctggctccttgttctgcctcttctcgggacagcctctcatcattctcagcagcacggggcccatcctcatctttgagaagctcctcttcgacttcagcaaaggcaatggcctggactacatggagttccgcctctggattggcctacactcagctgtccagtgccttatcctagtggccacagatgccagctttatcatcaaatatatcacccgcttcaccgaggagggcttctccacccttatcagcttcatcttcatctacgatgccatcaagaagatgatcggtgccttcaagtactaccctatcaatatggacttcaagccaaacttcatcactacctacaagtgcgagtgtgtcgcccctgacacagtgaatacaaccgtgttcaatgcttcagccccattggcaccagacaccaacgcttctctgtacaacctccttaacctcacagcgttggactggtccctgctgagcaagaaggagtgtctgagctacggcgggcgcctgcttgggaattcctgcaagtttatcccagacctggcgctcatgtccttcatccttttctttgggacatactccatgaccctgaccctgaagaagttcaaattcagccgctattttcctaccaaggtccgggccctggtggctgacttttccattgttttctccatcctgatgttctgtggaatcgatgcctgttttggcctagaaactcccaagctgcatgtgcccagtgtcatcaagccaacgcggcctgaccgaggctggttcgtggccccctttgggaagaacccgtggtgggtatacccagcaagcatcctgcccgccctgctggtgaccatcctgatcttcatggaccagcagatcactgccgtcattgtcaaccggaaggagaacaaactgaagaaggctgccggctaccatctggacctgttctgggtgggcatcctcatggctttgtgctcctttatggggctcccctggtacgtggctgccacggtcatctccatcgcccacatcgacagcctcaagatggagacagagaccagtgcccctggggagcagccccagtttctgggagtcagggaacagagagtaaccggcatcatcgtcttcatcctgacgggaatctctgtcttcctggctcccatcctaaagtgtatccccctgccggtgctgtacggagtcttcctctacatgggcgtggcctccctgaatggcatccagatggggaccggagggtcagaattcaaaatccagaagaagctgactccattctgggaacgctgcaagctcttcctgatgccagccaagcaccagccggaccatgccttcctgcggcacgtgccgctgcgccggatccacctcttcaccctggtgcagatcctctgcctggcggtgctctggatcctcaaatccacggtggctgccatcatcttcccggtcatgatcctgggcctcatcatcgttcgaaggcttctggatttcatcttttcccagcacgacctggcctggattgacaacatcctcccagagaaggaaaaaaaggagacagacaagaagaggaagagaaaaaaaggggcccacgaggactgtgatgaggagccccagttccctcctccctcggttataaagattcccatggaaagtgtccaatcagatccccaaaacggtatccactgcattgccagaaaaagatcttccagttggagttactcactctgattcttccttcagtgacacagaacttgaccgaaggtaagcaggcatggattagagacataagctatacgtcacttacaaaaacatctccagcaaactatctaaacttctttaaactccagagaactatcaaaagaataacgccagctggcagaagaacgaggacggaggttaatggctgctcctggctagatcacaggaccctgcatgatactggaatgctccctggtgaggtactgcagagttacaggatcgtgaactctatttattcccacatcaatgactgctgctccttccttgatcatatctgctgtgatcagatttggaatacctggaaatggagaaaggaaagatcaacttagtactgaaaacagtctacctgtcagattcttgtctaacttcaatttcaagagaccctgaagaactaatcaacatgttttattaaaacctgttaaaaatattaact

SEQ ID NO: 404045 - DNA, 8681 bp, Homo sapiens
tgggcgtcggtcgtcggtggggtcggagctgggcgcggagcccctcacagtgcagacgcccagcggcagcaggatgagtgcggaggcaagcgcccggcctctgcgggtgggctcccgtgtagaggtgattggaaaaggccaccgaggcactgtggcctatgttggagccacactgtttgccactggcaaatgggtaggcgtgattctggatgaagcaaagggcaaaaatgatggaactgttcaaggcaggaagtacttcacttgtgatgaagggcatggcatctttgtgcgccagtcccagatccaggtatttgaagatggagcagatactacttccccagagacacctgattcttctgcttcaaaagtcctcaaaagagagggaactgatacaactgcaaagactagcaaactgcccacgcgcccagccagtactggggtggctggggccagtagctccctgggcccctctggctcagcgtcagcaggtgagctgagcagcagtgagcccagcaccccggctcagactccgctggcagcacccatcatccccacgccggtcctcacctctcctggagcagtccccccgcttccttccccatccaaggaggaggagggactaagggctcaggtgcgggacctggaggagaaactagagaccctgagactgaaacgggcagaagacaaagcaaagctaaaagagctggagaaacacaaaatccagctggagcaggtgcaggaatggaagagcaaaatgcaggagcagcaggccgacctgcagcggcgcctcaaggaggcgagaaaggaagccaaggaggcgctggaggcaaaggaacgctatatggaggagatggctgatactgctgatgccattgagatggccactttggacaaggagatggctgaagagcgggctgagtccctgcagcaggaggtggaggcactgaaggagcgggtggacgagctcactactgacttagagatcctcaaggctgagattgaagagaagggctcagatggcgctgcatccagttatcagctcaagcagcttgaggagcagaatgcccgcctgaaggatgccctggtgaggatgcgggatctttcttcctcagagaagcaggagcatgtgaagctccagaagctcatggaaaagaagaaccaagagctggaagttgtgaggcaacagcgggagcgtctgcaggaggagctaagccaggcagagagcaccattgatgagctcaaggagcaggtggatgctgctctgggtgctgaggagatggtggagatgctgacagatcggaacctgaatctggaagagaaagtgcgcgagttgagggagactgtgggagacttggaagcgatgaatgagatgaacgatgagctgcaggagaatgcacgtgagacagaactggagctgcgggagcagctggacatggcaggcgcgcgggttcgtgaggcccagaagcgtgtggaggcagcccaggagacggttgcagactaccagcagaccatcaagaagtaccgccagctgaccgcccatctacaggatgtgaatcgggaactgacaaaccagcaggaagcatctgtggagaggcaacagcagccacctccagagacctttgacttcaaaatcaagtttgctgagactaaggcccatgccaaggcaattgagatggaattgaggcagatggaggtggcccaggccaatcgacacatgtccctgctgacagccttcatgcctgacagcttccttcggccaggtggggaccatgactgcgttctggtgctgttgctcatgcctcgtctcatttgcaaggcagagctgatccggaagcaggcccaggagaagtttgaactaagtgagaactgttcagagcggcctgggctgcgaggagctgctggggagcaactcagctttgctgctggactggtgtactcgctgagcctgctgcaggccacgctacaccgctatgagcatgccctctctcagtgcagtgtggatgtgtataagaaagtgggcagcctgtaccctgagatgagtgcccatgagcgctccttggatttcctcattgaactgctgcacaaggatcagctggatgagactgtcaatgtggagcctctcaccaaggccatcaagtactatcagcatctgtacagcatccaccttgccgaacagcctgaggactgtactatgcagctggctgaccacattaagttcacgcagagtgctctggactgcatgagtgtggaggtaggacggctgcgtgccttcttgcagggtgggcaggaggctacagatattgccctcctgctccgggatctggaaacttcatgcagtgacatccgccagttctgcaagaagatccgaaggcgaatgccagggacagatgctcctgggatcccagctgcactggcctttggaccacaggtatctgacacgctcctagactgcaggaaacacttgacgtgggtcgtggctgtgctgcaggaggtggcagctgctgctgcccagctcattgccccactggcagagaatgaggggctacttgtggctgctctggaggaactggctttcaaagcaagcgagcaggtgggcctggatggctgggtagaaggtgtggggagagttagtgaccagtgtggggcttttacttctgcccttggctcctgcagatctatgggaccccctccagcagcccctatgagtgtctgcgccagtcatgcaacatcctcatcagtaccatgaacaagctggccacagccatgcaggagggggagtatgatgcagagcggccccccagcaagcctccaccggttgaactgcgggctgctgcccttcgtgcagagatcacagatgctgaaggcctgggtttgaagctcgaagatcgagagacagttattaaggagttgaagaagtcactcaagattaagggagaggagctaagtgaggccaatgtgcggctgagcctcctggagaagaagttggacagtgctgccaaggatgcagatgagcgcatcgagaaagtccagactcggctggaggagacccaggcactgctgcgaaagaaggagaaagagtttgaggagacaatggatgcactccaggctgacatcgaccagctggaggcagagaaggcagaactaaagcagcgtctgaacagccagtccaaacgcacgattgagggactccggggccctcctccttcaggcattgctactctggtctctggcattgctggtggagccatccctgggcaggctccagggtctgtgccaggcccagggctggtgaaggactcaccactgctgcttcagcagatctctgccatgaggctgcacatctcccagctccagcatgagaacagcatcctcaagggagcccagatgaaggcatccttggcatccctgccccctctgcatgttgcaaagctatcccatgagggccctggcagtgagttaccagctggagcgctgtatcgtaagaccagccagctgctggagacattgaatcaattgagcacacacacgcacgtagtagacatcactcgcaccagccctgctgccaagagcccgtcggcccaacttatggagcaagtggctcagcttaagtccctgagtgacaccgtcgagaagctcaaggatgaggtcctcaaggagacagtatctcagcgccctggagccacagtacccactgactttgccaccttcccttcatcagccttcctcagggccaaggaggagcagcaggatgacacagtctacatgggcaaagtgaccttctcatgtgcggctggttttggacagcgacaccggctggtgctgacccaggagcagctgcaccagcttcacagtcgcctcatctcctaagcactcctttcccctgctgtccccttcgaccctcagccctctggtgccgctctgcccgatgcacagccacctcagccagcccccaggtagaaacgtgggttaagctcttcctgccccgttcagcttcactcccaccctttcagcgtcctgccccttcaccttgacccgggttcccccactcccattccctggcctctgccataatttgttgttcaactgctccctccttcctgaggggcctcagggcttgtggggggtaggctgagaccccaccaccaaaggttaagtgaggtccccttgattgaggacttcaccccttgattaaagcaacttctgcttcagtgcttcctgtgtggtgttgagagtgggacttgggccattaagctcacagcaggagtggaggagaagcgatgctgaggaagctttggctgtatcaaatttgaggtctcctcttcgtagtgaccagaagaatgctgtttctaaaattcatgtgcacaggcatcccaggatttggaattcagctgtgagctcatgagctgatggatgtttccaggagtaccctgaagaccacccaggtgggagtgtaagataaccttccagataaagagttgctgctaccaaaagagtgctgacaccatcacagtatgttcccttctcaaccctggacatggttcagaaacagctaaagcagacaagaatctggggcagccaatattgtaccacctgccaaagcttggcacaaacaatctggaagccaaaaattgcacatactgtggaacagagcaagtggttctggcctccctgggatttggatcctggtttccagagctaagaacacaaagtcatgaaggtgaaggaggagaaggctggggtaggaaagctggaccacactaaccacaggaggagatttccggatcagaaagaatgccctcctatccacattgggcttccagtacccacttaccctcaaagaaaaactgaccagaagggacatctttcaggcctgcaaaaagtccactggggcctgcggccagaccagccacagcaggaactgactggcccagggagtggggcaagcagccaggacagcagcatggatcttatcagcaggactcggtccccagctgctgagcagctccaggacatcctgggggaggaagatgaggctcccaaccccaccctctttacagagatggatactctgcagcatgacggagaccagatggagtggaaggagtcagccaggtggataaagtttgaagaaaaggtagaggaaggcggcgaacgctggagcaagccccacgtgtccacactatccctgcacagcctcttcgagctccgtacctgcctgcagacggggacggtgctgctggatttggacagtggctccttaccacagatcatagatgatgtcattgagaagcagattgaggatggtctcctgcggccagagctccgggagagggtcagttacgtcctcctgaggaggcaccgccaccaaaccaagaagcccatccaccgctccttagctgacattgggaagtcagtctccaccacaaatcgcagtcctgcccggagccctggtgctggcccgagtctacaccactccacggaagacctgcggatgcggcagagtgcaaattacggacgtctgtgtcatgcccagagcagaagcatgaatgacatttctctcaccccaaacacagaccagcggaaaaacaaattcatgaagaagatccccaaggactcagaagcgtccaacgtgctcgtgggcgaggtggacttcctagaccagccattcatcgcgttcgtgcgcctcatccagtcggccatgctgggaggagtgaccgaggtgcctgtccccaccagatttctgtttatactactgggaccttctgggagagcaaaatcctacaatgaaattggccgtgccattgcaaccctcatggtagatgatctcttcagtgacgtggcctacaaagcccgcaatcgggaagatctgatcgcaggaattgatgaatttctggatgaggtcatcgtccttcctcctggagaatgggacccaaatatccggattgagccccccaagaaggtgccctctgctgacaagaggaaatctgtgttctccctagcagagctgggccagatgaatggctctgtgggaggaggcggcggagctcctggaggaggcaatggaggtggtggtggtggtggcagtggcggcggggctggcagtggcggggccggcggaacaagcagcggggatgatggagagatgccagccatgcatgaaatcggggaggaacttatctggacaggaaggttcttcggtggcctgtgtctggatatcaagaggaagttgccctggttcccaagtgacttctatgatggcttccacattcagtccatctctgccatcctattcatctacctcggctgtatcaccaacgcgatcacctttggtgggcttctgggggatgccaccgacaattatcagggagtgatggagagcttcctgggcactgccatggctggctccttgttctgcctcttctcgggacagcctctcatcattctcagcagcacggggcccatcctcatctttgagaagctcctcttcgacttcagcaaaggcaatggcctggactacatggagttccgcctctggattggcctacactcagctgtccagtgccttatcctagtggccacagatgccagctttatcatcaaatatatcacccgcttcaccgaggagggcttctccacccttatcagcttcatcttcatctacgatgccatcaagaagatgatcggtgccttcaagtactaccctatcaatatggacttcaagccaaacttcatcactacctacaagtgcgagtgtgtcgcccctgacacagtgaatacaaccgtgttcaatgcttcagccccattggcaccagacaccaacgcttctctgtacaacctccttaacctcacagcgttggactggtccctgctgagcaagaaggagtgtctgagctacggcgggcgcctgcttgggaattcctgcaagtttatcccagacctggcgctcatgtccttcatccttttctttgggacatactccatgaccctgaccctgaagaagttcaaattcagccgctattttcctaccaaggtccgggccctggtggctgacttttccattgttttctccatcctgatgttctgtggaatcgatgcctgttttggcctagaaactcccaagctgcatgtgcccagtgtcatcaagccaacgcggcctgaccgaggctggttcgtggccccctttgggaagaacccgtggtgggtatacccagcaagcatcctgcccgccctgctggtgaccatcctgatcttcatggaccagcagatcactgccgtcattgtcaaccggaaggagaacaaactgaagaaggctgccggctaccatctggacctgttctgggtgggcatcctcatggctttgtgctcctttatggggctcccctggtacgtggctgccacggtcatctccatcgcccacatcgacagcctcaagatggagacagagaccagtgcccctggggagcagccccagtttctgggagtcagggaacagagagtaaccggcatcatcgtcttcatcctgacgggaatctctgtcttcctggctcccatcctaaagtgtatccccctgccggtgctgtacggagtcttcctctacatgggcgtggcctccctgaatggcatccagatggggaccggagggtcagaattcaaaatccagaagaagctgactccattctgggaacgctgcaagctcttcctgatgccagccaagcaccagccggaccatgccttcctgcggcacgtgccgctgcgccggatccacctcttcaccctggtgcagatcctctgcctggcggtgctctggatcctcaaatccacggtggctgccatcatcttcccggtcatgatcctgggcctcatcatcgttcgaaggcttctggatttcatcttttcccagcacgacctggcctggattgacaacatcctcccagagaaggaaaaaaaggagacagacaagaagaggaagagaaaaaaaggggcccacgaggactgtgatgaggagccccagttccctcctccctcggttataaagattcccatggaaagtgtccaatcagatccccaaaacggtatccactgcattgccagaaaaagatcttccagttggagttactcactctgattcttccttcagtgacacagaacttgaccgaaggtaagcaggcatggattagagacataagctatacgtcacttacaaaaacatctccagcaaactatctaaacttctttaaactccagagaactatcaaaagaataacgccagctggcagaagaacgaggacggaggtaggtcaactcaattgtttcttctctttctgcctcaagctgcctagagcaggagctacttctgctcgcatgaaagccaaaagccaaaacagacaaacctatccctgcctcaagtattttacagattaagctcctagcttggcacaacctgttgtgatataagactgtaggacaggccaggtgcagtggctcacgcctgtaatcctagcattttgggaggccgaggcaggtggatcacttgaggtcaggagtttgagaccagcctggccaatgtgatgaaaccccatctctactaaaaacacaaaaattagccaggcatggtggcatgcacctgtaatcccagctactcaggaggctgaggcacaagaattgtttgaacccgagaggca

SEQ ID NO: 404046 - DNA, 8508 bp, Homo sapiens
tgggcgtcggtcgtcggtggggtcggagctgggcgcggagcccctcacagtgcagacgcccagcggcagcaggatgagtgcggaggcaagcgcccggcctctgcgggtgggctcccgtgtagaggtgattggaaaaggccaccgaggcactgtggcctatgttggagccacactgtttgccactggcaaatgggtaggcgtgattctggatgaagcaaagggcaaaaatgatggaactgttcaaggcaggaagtacttcacttgtgatgaagggcatggcatctttgtgcgccagtcccagatccaggtatttgaagatggagcagatactacttccccagagacacctgattcttctgcttcaaaagtcctcaaaagagagggaactgatacaactgcaaagactagcaaactgcccacgcgcccagccagtactggggtggctggggccagtagctccctgggcccctctggctcagcgtcagcaggtgagctgagcagcagtgagcccagcaccccggctcagactccgctggcagcacccatcatccccacgccggtcctcacctctcctggagcagtccccccgcttccttccccatccaaggaggaggagggactaagggctcaggtgcgggacctggaggagaaactagagaccctgagactgaaacgggcagaagacaaagcaaagctaaaagagctggagaaacacaaaatccagctggagcaggtgcaggaatggaagagcaaaatgcaggagcagcaggccgacctgcagcggcgcctcaaggaggcgagaaaggaagccaaggaggcgctggaggcaaaggaacgctatatggaggagatggctgatactgctgatgccattgagatggccactttggacaaggagatggctgaagagcgggctgagtccctgcagcaggaggtggaggcactgaaggagcgggtggacgagctcactactgacttagagatcctcaaggctgagattgaagagaagggctcagatggcgctgcatccagttatcagctcaagcagcttgaggagcagaatgcccgcctgaaggatgccctggtgaggatgcgggatctttcttcctcagagaagcaggagcatgtgaagctccagaagctcatggaaaagaagaaccaagagctggaagttgtgaggcaacagcgggagcgtctgcaggaggagctaagccaggcagagagcaccattgatgagctcaaggagcaggtggatgctgctctgggtgctgaggagatggtggagatgctgacagatcggaacctgaatctggaagagaaagtgcgcgagttgagggagactgtgggagacttggaagcgatgaatgagatgaacgatgagctgcaggagaatgcacgtgagacagaactggagctgcgggagcagctggacatggcaggcgcgcgggttcgtgaggcccagaagcgtgtggaggcagcccaggagacggttgcagactaccagcagaccatcaagaagtaccgccagctgaccgcccatctacaggatgtgaatcgggaactgacaaaccagcaggaagcatctgtggagaggcaacagcagccacctccagagacctttgacttcaaaatcaagtttgctgagactaaggcccatgccaaggcaattgagatggaattgaggcagatggaggtggcccaggccaatcgacacatgtccctgctgacagccttcatgcctgacagcttccttcggccaggtggggaccatgactgcgttctggtgctgttgctcatgcctcgtctcatttgcaaggcagagctgatccggaagcaggcccaggagaagtttgaactaagtgagaactgttcagagcggcctgggctgcgaggagctgctggggagcaactcagctttgctgctggactggtgtactcgctgagcctgctgcaggccacgctacaccgctatgagcatgccctctctcagtgcagtgtggatgtgtataagaaagtgggcagcctgtaccctgagatgagtgcccatgagcgctccttggatttcctcattgaactgctgcacaaggatcagctggatgagactgtcaatgtggagcctctcaccaaggccatcaagtactatcagcatctgtacagcatccaccttgccgaacagcctgaggactgtactatgcagctggctgaccacattaagttcacgcagagtgctctggactgcatgagtgtggaggtaggacggctgcgtgccttcttgcagggtgggcaggaggctacagatattgccctcctgctccgggatctggaaacttcatgcagtgacatccgccagttctgcaagaagatccgaaggcgaatgccagggacagatgctcctgggatcccagctgcactggcctttggaccacaggtatctgacacgctcctagactgcaggaaacacttgacgtgggtcgtggctgtgctgcaggaggtggcagctgctgctgcccagctcattgccccactggcagagaatgaggggctacttgtggctgctctggaggaactggctttcaaagcaagcgagcagatctatgggaccccctccagcagcccctatgagtgtctgcgccagtcatgcaacatcctcatcagtaccatgaacaagctggccacagccatgcaggagggggagtatgatgcagagcggccccccagcaagcctccaccggttgaactgcgggctgctgcccttcgtgcagagatcacagatgctgaaggcctgggtttgaagctcgaagatcgagagacagttattaaggagttgaagaagtcactcaagattaagggagaggagctaagtgaggccaatgtgcggctgagcctcctggagaagaagttggacagtgctgccaaggatgcagatgagcgcatcgagaaagtccagactcggctggaggagacccaggcactgctgcgaaagaaggagaaagagtttgaggagacaatggatgcactccaggctgacatcgaccagctggaggcagagaaggcagaactaaagcagcgtctgaacagccagtccaaacgcacgattgagggactccggggccctcctccttcaggcattgctactctggtctctggcattgctggtggagccatccctgggcaggctccagggtctgtgccaggcccagggctggtgaaggactcaccactgctgcttcagcagatctctgccatgaggctgcacatctcccagctccagcatgagaacagcatcctcaagggagcccagatgaaggcatccttggcatccctgccccctctgcatgttgcaaagctatcccatgagggccctggcagtgagttaccagctggagcgctgtatcgtaagaccagccagctgctggagacattgaatcaattgagcacacacacgcacgtagtagacatcactcgcaccagccctgctgccaagagcccgtcggcccaacttatggagcaagtggctcagcttaagtccctgagtgacaccgtcgagaagctcaaggccaaggaggagcagcaggatgacacagtctacatgggcaaagtgaccttctcatgtgcggctggttttggacagcgacaccggctggtgctgacccaggagcagctgcaccagcttcacagtcgcctcatctcctaagcactcctttcccctgctgtccccttcgaccctcagccctctggtgccgctctgcccgatgcacagccacctcagccagcccccaggtagaaacgtgggttaagctcttcctgccccgttcagcttcactcccaccctttcagcgtcctgccccttcaccttgacccgggttcccccactcccattccctggcctctgccataatttgttgttcaactgctccctccttcctgaggggcctcagggcttgtggggggtaggctgagaccccaccaccaaaggttaagtgaggtccccttgattgaggacttcaccccttgattaaagcaacttctgcttcagtgcttcctgtgtggtgttgagagtgggacttgggccattaagctcacagcaggagtggaggagaagcgatgctgaggaagctttggctgtatcaaatttgaggtctcctcttcgtagtgaccagaagaatgctgtttctaaaattcatgtgcacaggcatcccaggatttggaattcagctgtgagctcatgagctgatggatgtttccaggagtaccctgaagaccacccaggtgggagtgtaagataaccttccagataaagagttgctgctaccaaaagagtgctgacaccatcacagtatgttcccttctcaaccctggacatggttcagaaacagctaaagcagacaagaatctggggcagccaatattgtaccacctgccaaagcttggcacaaacaatctggaagccaaaaattgcacatactgtggaacagagcaagtggttctggcctccctgggatttggatcctggtttccagagctaagaacacaaagtcatgaaggtgaaggaggagaaggctggggtaggaaagctggaccacactaaccacaggaggagatttccggatcagaaagaatgccctcctatccacattgggcttccagtacccacttaccctcaaagaaaaactgaccagaagggacatctttcaggcctgcaaaaagtccactggggcctgcggccagaccagccacagcaggaactgactggcccagggagtggggcaagcagccaggacagcagcatggatcttatcagcaggactcggtccccagctgctgagcagctccaggacatcctgggggaggaagatgaggctcccaaccccaccctctttacagagatggatactctgcagcatgacggagaccagatggagtggaaggagtcagccaggtggataaagtttgaagaaaaggtagaggaaggcggcgaacgctggagcaagccccacgtgtccacactatccctgcacagcctcttcgagctccgtacctgcctgcagacggggacggtgctgctggatttggacagtggctccttaccacagatcatagatgatgtcattgagaagcagattgaggatggtctcctgcggccagagctccgggagagggtcagttacgtcctcctgaggaggcaccgccaccaaaccaagaagcccatccaccgctccttagctgacattgggaagtcagtctccaccacaaatcgcagtcctgcccggagccctggtgctggcccgagtctacaccactccacggaagacctgcggatgcggcagagtgcaaattacggacgtctgtgtcatgcccagagcagaagcatgaatgacatttctctcaccccaaacacagaccagcggaaaaacaaattcatgaagaagatccccaaggactcagaagcgtccaacgtgctcgtgggcgaggtggacttcctagaccagccattcatcgcgttcgtgcgcctcatccagtcggccatgctgggaggagtgaccgaggtgcctgtccccaccagatttctgtttatactactgggaccttctgggagagcaaaatcctacaatgaaattggccgtgccattgcaaccctcatggtagatgatctcttcagtgacgtggcctacaaagcccgcaatcgggaagatctgatcgcaggaattgatgaatttctggatgaggtcatcgtccttcctcctggagaatgggacccaaatatccggattgagccccccaagaaggtgccctctgctgacaagaggaaatctgtgttctccctagcagagctgggccagatgaatggctctgtgggaggaggcggcggagctcctggaggaggcaatggaggtggtggtggtggtggcagtggcggcggggctggcagtggcggggccggcggaacaagcagcggggatgatggagagatgccagccatgcatgaaatcggggaggaacttatctggacaggaaggttcttcggtggcctgtgtctggatatcaagaggaagttgccctggttcccaagtgacttctatgatggcttccacattcagtccatctctgccatcctattcatctacctcggctgtatcaccaacgcgatcacctttggtgggcttctgggggatgccaccgacaattatcagggagtgatggagagcttcctgggcactgccatggctggctccttgttctgcctcttctcgggacagcctctcatcattctcagcagcacggggcccatcctcatctttgagaagctcctcttcgacttcagcaaaggcaatggcctggactacatggagttccgcctctggattggcctacactcagctgtccagtgccttatcctagtggccacagatgccagctttatcatcaaatatatcacccgcttcaccgaggagggcttctccacccttatcagcttcatcttcatctacgatgccatcaagaagatgatcggtgccttcaagtactaccctatcaatatggacttcaagccaaacttcatcactacctacaagtgcgagtgtgtcgcccctgacacagtgaatacaaccgtgttcaatgcttcagccccattggcaccagacaccaacgcttctctgtacaacctccttaacctcacagcgttggactggtccctgctgagcaagaaggagtgtctgagctacggcgggcgcctgcttgggaattcctgcaagtttatcccagacctggcgctcatgtccttcatccttttctttgggacatactccatgaccctgaccctgaagaagttcaaattcagccgctattttcctaccaaggtccgggccctggtggctgacttttccattgttttctccatcctgatgttctgtggaatcgatgcctgttttggcctagaaactcccaagctgcatgtgcccagtgtcatcaagccaacgcggcctgaccgaggctggttcgtggccccctttgggaagaacccgtggtgggtatacccagcaagcatcctgcccgccctgctggtgaccatcctgatcttcatggaccagcagatcactgccgtcattgtcaaccggaaggagaacaaactgaagaaggctgccggctaccatctggacctgttctgggtgggcatcctcatggctttgtgctcctttatggggctcccctggtacgtggctgccacggtcatctccatcgcccacatcgacagcctcaagatggagacagagaccagtgcccctggggagcagccccagtttctgggagtcagggaacagagagtaaccggcatcatcgtcttcatcctgacgggaatctctgtcttcctggctcccatcctaaagtgtatccccctgccggtgctgtacggagtcttcctctacatgggcgtggcctccctgaatggcatccagatggggaccggagggtcagaattcaaaatccagaagaagctgactccattctgggaacgctgcaagctcttcctgatgccagccaagcaccagccggaccatgccttcctgcggcacgtgccgctgcgccggatccacctcttcaccctggtgcagatcctctgcctggcggtgctctggatcctcaaatccacggtggctgccatcatcttcccggtcatgatcctgggcctcatcatcgttcgaaggcttctggatttcatcttttcccagcacgacctggcctggattgacaacatcctcccagagaaggaaaaaaaggagacagacaagaagaggaagagaaaaaaaggggcccacgaggactgtgatgaggagccccagttccctcctccctcggttataaagattcccatggaaagtgtccaatcagatccccaaaacggtatccactgcattgccagaaaaagatcttccagttggagttactcactctgattcttccttcagtgacacagaacttgaccgaaggtaagcaggcatggattagagacataagctatacgtcacttacaaaaacatctccagcaaactatctaaacttctttaaactccagagaactatcaaaagaataacgccagctggcagaagaacgaggacggaggtaggtcaactcaattgtttcttctctttctgcctcaagctgcctagagcaggagctacttctgctcgcatgaaagccaaaagccaaaacagacaaacctatccctgcctcaagtattttacagattaagctcctagcttggcacaacctgttgtgatataagactgtaggacaggccaggtgcagtggctcacgcctgtaatcctagcattttgggaggccgaggcaggtggatcacttgaggtcaggagtttgagaccagcctggccaatgtgatgaaaccccatctctactaaaaacacaaaaattagccaggcatggtggcatgcacctgtaatcccagctactcaggaggctgaggcacaagaattgtttgaacccgagaggca

SEQ ID NO: 404047 - DNA, 8484 bp, Homo sapiens
tgggcgtcggtcgtcggtggggtcggagctgggcgcggagcccctcacagtgcagacgcccagcggcagcaggatgagtgcggaggcaagcgcccggcctctgcgggtgggctcccgtgtagaggtgattggaaaaggccaccgaggcactgtggcctatgttggagccacactgtttgccactggcaaatgggtaggcgtgattctggatgaagcaaagggcaaaaatgatggaactgttcaaggcaggaagtacttcacttgtgatgaagggcatggcatctttgtgcgccagtcccagatccaggtatttgaagatggagcagatactacttccccagagacacctgattcttctgcttcaaaagtcctcaaaagagagggaactgatacaactgcaaagactagcaaactgcccacgcgcccagccagtactggggtggctggggccagtagctccctgggcccctctggctcagcgtcagcaggtgagctgagcagcagtgagcccagcaccccggctcagactccgctggcagcacccatcatccccacgccggtcctcacctctcctggagcagtccccccgcttccttccccatccaaggaggaggagggactaagggctcaggtgcgggacctggaggagaaactagagaccctgagactgaaacgggcagaagacaaagcaaagctaaaagagctggagaaacacaaaatccagctggagcaggtgcaggaatggaagagcaaaatgcaggagcagcaggccgacctgcagcggcgcctcaaggaggcgagaaaggaagccaaggaggcgctggaggcaaaggaacgctatatggaggagatggctgatactgctgatgccattgagatggccactttggacaaggagatggctgaagagcgggctgagtccctgcagcaggaggtggaggcactgaaggagcgggtggacgagctcactactgacttagagatcctcaaggctgagattgaagagaagggctcagatggcgctgcatccagttatcagctcaagcagcttgaggagcagaatgcccgcctgaaggatgccctggtgaggatgcgggatctttcttcctcagagaagcaggagcatgtgaagctccagaagctcatggaaaagaagaaccaagagctggaagttgtgaggcaacagcgggagcgtctgcaggaggagctaagccaggcagagagcaccattgatgagctcaaggagcaggtggatgctgctctgggtgctgaggagatggtggagatgctgacagatcggaacctgaatctggaagagaaagtgcgcgagttgagggagactgtgggagacttggaagcgatgaatgagatgaacgatgagctgcaggagaatgcacgtgagacagaactggagctgcgggagcagctggacatggcaggcgcgcgggttcgtgaggcccagaagcgtgtggaggcagcccaggagacggttgcagactaccagcagaccatcaagaagtaccgccagctgaccgcccatctacaggatgtgaatcgggaactgacaaaccagcaggaagcatctgtggagaggcaacagcagccacctccagagacctttgacttcaaaatcaagtttgctgagactaaggcccatgccaaggcaattgagatggaattgaggcagatggaggtggcccaggccaatcgacacatgtccctgctgacagccttcatgcctgacagcttccttcggccaggtggggaccatgactgcgttctggtgctgttgctcatgcctcgtctcatttgcaaggcagagctgatccggaagcaggcccaggagaagtttgaactaagtgagaactgttcagagcggcctgggctgcgaggagctgctggggagcaactcagctttgctgctggactggtgtactcgctgagcctgctgcaggccacgctacaccgctatgagcatgccctctctcagtgcagtgtggatgtgtataagaaagtgggcagcctgtaccctgagatgagtgcccatgagcgctccttggatttcctcattgaactgctgcacaaggatcagctggatgagactgtcaatgtggagcctctcaccaaggccatcaagtactatcagcatctgtacagcatccaccttgccgaacagcctgaggactgtactatgcagctggctgaccacattaagttcacgcagagtgctctggactgcatgagtgtggaggtaggacggctgcgtgccttcttgcagggtgggcaggaggctacagatattgccctcctgctccgggatctggaaacttcatgcagtgacatccgccagttctgcaagaagatccgaaggcgaatgccagggacagatgctcctgggatcccagctgcactggcctttggaccacaggtatctgacacgctcctagactgcaggaaacacttgacgtgggtcgtggctgtgctgcaggaggtggcagctgctgctgcccagctcattgccccactggcagagaatgaggggctacttgtggctgctctggaggaactggctttcaaagcaagcgagcagatctatgggaccccctccagcagcccctatgagtgtctgcgccagtcatgcaacatcctcatcagtaccatgaacaagctggccacagccatgcaggagggggagtatgatgcagagcggccccccagcaagcctccaccggttgaactgcgggctgctgcccttcgtgcagagatcacagatgctgaaggcctgggtttgaagctcgaagatcgagagacagttattaaggagttgaagaagtcactcaagattaagggagaggagctaagtgaggccaatgtgcggctgagcctcctggagaagaagttggacagtgctgccaaggatgcagatgagcgcatcgagaaagtccagactcggctggaggagacccaggcactgctgcgaaagaaggagaaagagtttgaggagacaatggatgcactccaggctgacatcgaccagctggaggcagagaaggcagaactaaagcagcgtctgaacagccagtccaaacgcacgattgagggactccggggccctcctccttcaggcattgctactctggtctctggcattgctggtggagccatccctgggcaggctccagggtctgtgccaggcccagggctggtgaaggactcaccactgctgcttcagcagatctctgccatgaggctgcacatctcccagctccagcatgagaacagcatcctcaagggagcccagatgaaggcatccttggcatccctgccccctctgcatgttgcaaagctatcccatgagggccctggcagtgagttaccagctggagcgctgtatcgtaagaccagccagctgctggagacattgaatcaattgagcacacacacgcacgtagtagacatcactcgcaccagccctgctgccaagagcccgtcggcccaacttatggagcaagtggctcagcttaagtccctgagtgacaccgtcgagaagctcaaggatgaggtcctcaaggagacagtatctcagcgccctggagccacagtacccactgactttgccaccttcccttcatcagccttcctcagggccaaggaggagcagcaggatgacacagtctacatgggcaaagtgaccttctcatgtgcggctggttttggacagcgacaccggctggtgctgacccaggagcagctgcaccagcttcacagtcgcctcatctcctaagcactcctttcccctgctgtccccttcgaccctcagccctctggtgccgctctgcccgatgcacagccacctcagccagcccccaggtagaaacgtgggttaagctcttcctgccccgttcagcttcactcccaccctttcagcgtcctgccccttcaccttgacccgggttcccccactcccattccctggcctctgccataatttgttgttcaactgctccctccttcctgaggggcctcagggcttgtggggggtaggctgagaccccaccaccaaaggttaagtgaggtccccttgattgaggacttcaccccttgattaaagcaacttctgcttcagtgcttcctgtgtggtgttgagagtgggacttgggccattaagctcacagcaggagtggaggagaagcgatgctgaggaagctttggctgtatcaaatttgaggtctcctcttcgtagtgaccagaagaatgctgtttctaaaattcatgtgcacaggcatcccaggatttggaattcagctgtgagctcatgagctgatggatgtttccaggagtaccctgaagaccacccaggtgggagtgtaagataaccttccagataaagagttgctgctaccaaaagagtgctgacaccatcacagtatgttcccttctcaaccctggacatggttcagaaacagctaaagcagacaagaatctggggcagccaatattgtaccacctgccaaagcttggcacaaacaatctggaagccaaaaattgcacatactgtggaacagagcaagtggttctggcctccctgggatttggatcctggtttccagagctaagaacacaaagtcatgaaggtgaaggaggagaaggctggggtaggaaagctggaccacactaaccacaggaggagatttccggatcagaaagaatgccctcctatccacattgggcttccagtacccacttaccctcaaagaaaaactgaccagaagggacatctttcaggcctgcaaaaagtccactggggcctgcggccagaccagccacagcaggaactgactggcccagggagtggggcaagcagccaggacagcagcatggatcttatcagcaggactcggtccccagctgctgagcagctccaggacatcctgggggaggaagatgaggctcccaaccccaccctctttacagagatggatactctgcagcatgacggagaccagatggagtggaaggagtcagccaggtggataaagtttgaagaaaaggtagaggaaggcggcgaacgctggagcaagccccacgtgtccacactatccctgcacagcctcttcgagctccgtacctgcctgcagacggggacggtgctgctggatttggacagtggctccttaccacagatcatagatgatgtcattgagaagcagattgaggatggtctcctgcggccagagctccgggagagggtcagttacgtcctcctgaggaggcaccgccaccaaaccaagaagcccatccaccgctccttagctgacattgggaagtcagtctccaccacaaatcgcagtcctgcccggagccctggtgctggcccgagtctacaccactccacggaagacctgcggatgcggcagagtgcaaattacggacgtctgtgtcatgcccagagcagaagcatgaatgacatttctctcaccccaaacacagaccagcggaaaaacaaattcatgaagaagatccccaaggactcagaagcgtccaacgtgctcgtgggcgaggtggacttcctagaccagccattcatcgcgttcgtgcgcctcatccagtcggccatgctgggaggagtgaccgaggtgcctgtccccaccagatttctgtttatactactgggaccttctgggagagcaaaatcctacaatgaaattggccgtgccattgcaaccctcatggtagatgatctcttcagtgacgtggcctacaaagcccgcaatcgggaagatctgatcgcaggaattgatgaatttctggatgaggtcatcgtccttcctcctggagaatgggacccaaatatccggattgagccccccaagaaggtgccctctgctgacaagaggaaatctgtgttctccctagcagagctgggccagatgaatggctctgtgggaggaggcggcggagctcctggaggaggcaatggaggtggtggtggtggtggcagtggcggcggggctggcagtggcggggccggcggaacaagcagcggggatgatggagagatgccagccatgcatgaaatcggggaggaacttatctggacaggaaggttcttcggtggcctgtgtctggatatcaagaggaagttgccctggttcccaagtgacttctatgatggcttccacattcagtccatctctgccatcctattcatctacctcggctgtatcaccaacgcgatcacctttggtgggcttctgggggatgccaccgacaattatcagggagtgatggagagcttcctgggcactgccatggctggctccttgttctgcctcttctcgggacagcctctcatcattctcagcagcacggggcccatcctcatctttgagaagctcctcttcgacttcagcaaaggcaatggcctggactacatggagttccgcctctggattggcctacactcagctgtccagtgccttatcctagtggccacagatgccagctttatcatcaaatatatcacccgcttcaccgaggagggcttctccacccttatcagcttcatcttcatctacgatgccatcaagaagatgatcggtgccttcaagtactaccctatcaatatggacttcaagccaaacttcatcactacctacaagtgcgagtgtgtcgcccctgacacagtgaatacaaccgtgttcaatgcttcagccccattggcaccagacaccaacgcttctctgtacaacctccttaacctcacagcgttggactggtccctgctgagcaagaaggagtgtctgagctacggcgggcgcctgcttgggaattcctgcaagtttatcccagacctggcgctcatgtccttcatccttttctttgggacatactccatgaccctgaccctgaagaagttcaaattcagccgctattttcctaccaagccaacgcggcctgaccgaggctggttcgtggccccctttgggaagaacccgtggtgggtatacccagcaagcatcctgcccgccctgctggtgaccatcctgatcttcatggaccagcagatcactgccgtcattgtcaaccggaaggagaacaaactgaagaaggctgccggctaccatctggacctgttctgggtgggcatcctcatggctttgtgctcctttatggggctcccctggtacgtggctgccacggtcatctccatcgcccacatcgacagcctcaagatggagacagagaccagtgcccctggggagcagccccagtttctgggagtcagggaacagagagtaaccggcatcatcgtcttcatcctgacgggaatctctgtcttcctggctcccatcctaaagtgtatccccctgccggtgctgtacggagtcttcctctacatgggcgtggcctccctgaatggcatccagatggggaccggagggtcagaattcaaaatccagaagaagctgactccattctgggaacgctgcaagctcttcctgatgccagccaagcaccagccggaccatgccttcctgcggcacgtgccgctgcgccggatccacctcttcaccctggtgcagatcctctgcctggcggtgctctggatcctcaaatccacggtggctgccatcatcttcccggtcatgatcctgggcctcatcatcgttcgaaggcttctggatttcatcttttcccagcacgacctggcctggattgacaacatcctcccagagaaggaaaaaaaggagacagacaagaagaggaagagaaaaaaaggggcccacgaggactgtgatgaggagccccagttccctcctccctcggttataaagattcccatggaaagtgtccaatcagatccccaaaacggtatccactgcattgccagaaaaagatcttccagttggagttactcactctgattcttccttcagtgacacagaacttgaccgaaggtaagcaggcatggattagagacataagctatacgtcacttacaaaaacatctccagcaaactatctaaacttctttaaactccagagaactatcaaaagaataacgccagctggcagaagaacgaggacggaggtaggtcaactcaattgtttcttctctttctgcctcaagctgcctagagcaggagctacttctgctcgcatgaaagccaaaagccaaaacagacaaacctatccctgcctcaagtattttacagattaagctcctagcttggcacaacctgttgtgatataagactgtaggacaggccaggtgcagtggctcacgcctgtaatcctagcattttgggaggccgaggcaggtggatcacttgaggtcaggagtttgagaccagcctggccaatgtgatgaaaccccatctctactaaaaacacaaaaattagccaggcatggtggcatgcacctgtaatcccagctactcaggaggctgaggcacaagaattgtttgaacccgagaggca

SEQ ID NO: 404048 - DNA, 4111 bp, Homo sapiens
  misc_feature (4068)..(4068): n is a, c, g, or t
tgggcgtcggtcgtcggtggggtcggagctgggcgcggagcccctcacagtgcagacgcccagcggcagcaggatgagtgcggaggcaagcgcccggcctctgcgggtgggctcccgtgtagaggtgattggaaaaggccaccgaggcactgtggcctatgttggagccacactgtttgccactggcaaatgggtaggcgtgattctggatgaagcaaagggcaaaaatgatggaactgttcaaggcaggaagtacttcacttgtgatgaagggcatggcatctttgtgcgccagtcccagatccaggtatttgaagatggagcagatactacttccccagagacacctgattcttctgcttcaaaagtcctcaaaagagagggaactgatacaactgcaaagactagcaaactgcccacgcgcccagccagtactggggtggctggggccagtagctccctgggcccctctggctcagcgtcagcaggtgagctgagcagcagtgagcccagcaccccggctcagactccgctggcagcacccatcatccccacgccggtcctcacctctcctggagcagtccccccgcttccttccccatccaaggaggaggagggactaagggctcaggtgcgggacctggaggagaaactagagaccctgagactgaaacgggcagaagacaaagcaaagctaaaagagctggagaaacacaaaatccagctggagcaggtgcaggaatggaagagcaaaatgcaggagcagcaggccgacctgcagcggcgcctcaaggaggcgagaaaggaagccaaggaggcgctggaggcaaaggaacgctatatggaggagatggctgatactgctgatgccattgagatggccactttggacaaggagatggctgaagagcgggctgagtccctgcagcaggaggtggaggcactgaaggagcgggtggacgagctcactactgacttagagatcctcaaggctgagattgaagagaagggctcagatggcgctgcatccagttatcagctcaagcagcttgaggagcagaatgcccgcctgaaggatgccctggtgaggatgcgggatctttcttcctcagagaagcaggagcatgtgaagctccagaagctcatggaaaagaagaaccaagagctggaagttgtgaggcaacagcgggagcgtctgcaggaggagctaagccaggcagagagcaccattgatgagctcaaggagcaggtggatgctgctctgggtgctgaggagatggtggagatgctgacagatcggaacctgaatctggaagagaaagtgcgcgagttgagggagactgtgggagacttggaagcgatgaatgagatgaacgatgagctgcaggagaatgcacgtgagacagaactggagctgcgggagcagctggacatggcaggcgcgcgggttcgtgaggcccagaagcgtgtggaggcagcccaggagacggttgcagactaccagcagaccatcaagaagtaccgccagctgaccgcccatctacaggatgtgaatcgggaactgacaaaccagcaggaagcatctgtggagaggcaacagcagccacctccagagacctttgacttcaaaatcaagtttgctgagactaaggcccatgccaaggcaattgagatggaattgaggcagatggaggtggcccaggccaatcgacacatgtccctgctgacagccttcatgcctgacagcttccttcggccaggtggggaccatgactgcgttctggtgctgttgctcatgcctcgtctcatttgcaaggcagagctgatccggaagcaggcccaggagaagtttgaactaagtgagaactgttcagagcggcctgggctgcgaggagctgctggggagcaactcagctttgctgctggactggtgtactcgctgagcctgctgcaggccacgctacaccgctatgagcatgccctctctcagtgcagtgtggatgtgtataagaaagtgggcagcctgtaccctgagatgagtgcccatgagcgctccttggatttcctcattgaactgctgcacaaggatcagctggatgagactgtcaatgtggagcctctcaccaaggccatcaagtactatcagcatctgtacagcatccaccttgccgaacagcctgaggactgtactatgcagctggctgaccacattaagttcacgcagagtgctctggactgcatgagtgtggaggtaggacggctgcgtgccttcttgcagggtgggcaggaggctacagatattgccctcctgctccgggatctggaaacttcatgcagtgacatccgccagttctgcaagaagatccgaaggcgaatgccagggacagatgctcctgggatcccagctgcactggcctttggaccacaggtatctgacacgctcctagactgcaggaaacacttgacgtgggtcgtggctgtgctgcaggaggtggcagctgctgctgcccagctcattgccccactggcagagaatgaggggctacttgtggctgctctggaggaactggctttcaaagcaagcgagcagatctatgggaccccctccagcagcccctatgagtgtctgcgccagtcatgcaacatcctcatcagtaccatgaacaagctggccacagccatgcaggagggggagtatgatgcagagcggccccccagcaagcctccaccggttgaactgcgggctgctgcccttcgtgcagagatcacagatgctgaaggcctgggtttgaagctcgaagatcgagagacagttattaaggagttgaagaagtcactcaagattaagggagaggagctaagtgaggccaatgtgcggctgagcctcctggagaagaagttggacagtgctgccaaggatgcagatgagcgcatcgagaaagtccagactcggctggaggagacccaggcactgctgcgaaagaaggagaaagagtttgaggagacaatggatgcactccaggctgacatcgaccagctggaggcagagaaggcagaactaaagcagcgtctgaacagccagtccaaacgcacgattgagggactccggggccctcctccttcaggcattgctactctggtctctggcattgctggtggagccatccctgggcaggctccagggtctgtgccaggcccagggctggtgaaggactcaccactgctgcttcagcagatctctgccatgaggctgcacatctcccagctccagcatgagaacagcatcctcaagggagcccagatgaaggcatccttggcatccctgccccctctgcatgttgcaaagctatcccatgagggccctggcagtgagttaccagctggagcgctgtatcgtaagaccagccagctgctggagacattgaatcaattgagcacacacacgcacgtagtagacatcactcgcaccagccctgctgccaagagcccgtcggcccaacttatggagcaagtggctcagcttaagtccctgagtgacaccgtcgagaagctcaaggatgaggtcctcaaggagacagtatctcagcgccctggagccacagtacccactgactttgccaccttcccttcatcagccttcctcagggccaaggaggagcagcaggatgacacagtctacatgggcaaagtgaccttctcatgtgcggctggttttggacagcgacaccggctggtgctgacccaggagcagctgcaccagcttcacagtcgcctcatctcctaagcactcctttcccctgctgtccccttcgaccctcagccctctggtgccgctctgcccgatgcacagccacctcagccagcccccaggtagaaacgtgggttaagctcttcctgccccgttcagcttcactcccaccctttcagcgtcctgccccttcaccttgacccgggttcccccactcccattccctggcctctgccataatttgttgttcaactgctccctccttcctgaggggcctcagggcttgtggggggtaggctgagaccaccccaagttagtgngcctgttgggattccctgatagattgtcctgaaaaaaaaaaaa

SEQ ID NO: 404049 - DNA, 3952 bp, Homo sapiens
tgggcgtcggtcgtcggtggggtcggagctgggcgcggagcccctcacagtgcagacgcccagcggcagcaggatgagtgcggaggcaagcgcccggcctctgcgggtgggctcccgtgtagaggtgattggaaaaggccaccgaggcactgtggcctatgttggagccacactgtttgccactggcaaatgggtaggcgtgattctggatgaagcaaagggcaaaaatgatggaactgttcaaggcaggaagtacttcacttgtgatgaagggcatggcatctttgtgcgccagtcccagatccaggtatttgaagatggagcagatactacttccccagagacacctgattcttctgcttcaaaagtcctcaaaagagagggaactgatacaactgcaaagactagcaaactgcccacgcgcccagccagtactggggtggctggggccagtagctccctgggcccctctggctcagcgtcagcaggtgagctgagcagcagtgagcccagcaccccggctcagactccgctggcagcacccatcatccccacgccggtcctcacctctcctggagcagtccccccgcttccttccccatccaaggaggaggagggactaagggctcaggtgcgggacctggaggagaaactagagaccctgagactgaaacgggcagaagacaaagcaaagctaaaagagctggagaaacacaaaatccagctggagcaggtgcaggaatggaagagcaaaatgcaggagcagcaggccgacctgcagcggcgcctcaaggaggcgagaaaggaagccaaggaggcgctggaggcaaaggaacgctatatggaggagatggctgatactgctgatgccattgagatggccactttggacaaggagatggctgaagagcgggctgagtccctgcagcaggaggtggaggcactgaaggagcgggtggacgagctcactactgacttagagatcctcaaggctgagattgaagagaagggctcagatggcgctgcatccagttatcagctcaagcagcttgaggagcagaatgcccgcctgaaggatgccctggtgaggatgcgggatctttcttcctcagagaagcaggagcatgtgaagctccagaagctcatggaaaagaagaaccaagagctggaagttgtgaggcaacagcgggagcgtctgcaggaggagctaagccaggcagagagcaccattgatgagctcaaggagcaggtggatgctgctctgggtgctgaggagatggtggagatgctgacagatcggaacctgaatctggaagagaaagtgcgcgagttgagggagactgtgggagacttggaagcgatgaatgagatgaacgatgagctgcaggagaatgcacgtgagacagaactggagctgcgggagcagctggacatggcaggcgcgcgggttcgtgaggcccagaagcgtgtggaggcagcccaggagacggttgcagactaccagcagaccatcaagaagtaccgccagctgaccgcccatctacaggatgtgaatcgggaactgacaaaccagcaggaagcatctgtggagaggcaacagcagccacctccagagacctttgacttcaaaatcaagtttgctgagactaaggcccatgccaaggcaattgagatggaattgaggcagatggaggtggcccaggccaatcgacacatgtccctgctgacagccttcatgcctgacagcttccttcggccaggtggggaccatgactgcgttctggtgctgttgctcatgcctcgtctcatttgcaaggcagagctgatccggaagcaggcccaggagaagtttgaactaagtgagaactgttcagagcggcctgggctgcgaggagctgctggggagcaactcagctttgctgctggactggtgtactcgctgagcctgctgcaggccacgctacaccgctatgagcatgccctctctcagtgcagtgtggatgtgtataagaaagtgggcagcctgtaccctgagatgagtgcccatgagcgctccttggatttcctcattgaactgctgcacaaggatcagctggatgagactgtcaatgtggagcctctcaccaaggccatcaagtactatcagcatctgtacagcatccaccttgccgaacagcctgaggactgtactatgcagctggctgaccacattaagttcacgcagagtgctctggactgcatgagtgtggaggtaggacggctgcgtgccttcttgcagggtgggcaggaggctacagatattgccctcctgctccgggatctggaaacttcatgcagtgacatccgccagttctgcaagaagatccgaaggcgaatgccagggacagatgctcctgggatcccagctgcactggcctttggaccacaggtatctgacacgctcctagactgcaggaaacacttgacgtgggtcgtggctgtgctgcaggaggtggcagctgctgctgcccagctcattgccccactggcagagaatgaggggctacttgtggctgctctggaggaactggctttcaaagcaagcgagcagatctatgggaccccctccagcagcccctatgagtgtctgcgccagtcatgcaacatcctcatcagtaccatgaacaagctggccacagccatgcaggagggggagtatgatgcagagcggccccccagcaagcctccaccggttgaactgcgggctgctgcccttcgtgcagagatcacagatgctgaaggcctgggtttgaagctcgaagatcgagagacagttattaaggagttgaagaagtcactcaagattaagggagaggagctaagtgaggccaatgtgcggctgagcctcctggagaagaagttggacagtgctgccaaggatgcagatgagcgcatcgagaaagtccagactcggctggaggagacccaggcactgctgcgaaagaaggagaaagagtttgaggagacaatggatgcactccaggctgacatcgaccagctggaggcagagaaggcagaactaaagcagcgtctgaacagccagtccaaacgcacgattgagggactccggggccctcctccttcaggcattgctactctggtctctggcattgctggtggagccatccctgggcaggctccagggtctgtgccaggcccagggctggtgaaggactcaccactgctgcttcagcagatctctgccatgaggctgcacatctcccagctccagcatgagaacagcatcctcaagggagcccagatgaaggcatccttggcatccctgccccctctgcatgttgcaaagctatcccatgagggccctggcagtgagttaccagctggagcgctgtatcgtaagaccagccagctgctggagacattgaatcaattgagcacacacacgcacgtagtagacatcactcgcaccagccctgctgccaagagcccgtcggcccaacttatggagcaagtggctcagcttaagtccctgagtgacaccgtcgagaagctcaaggatgaggtcctcaaggagacagtatctcagcgccctggagccacagtacccactgactttgccaccttcccttcatcagccttcctcagggccaaggaggagcagcaggatgacacagtctacatgggcaaagtgaccttctcatgtgcggctggttttggacagcgacaccggctggtgctgacccaggagcagctgcaccagcttcacagtcgcctcatctcctaagcactcctttcccctgctgtccccttcgaccctcagccctctggtgccgctctgcccgatgcacagccacctcagccagcccccaggtagaaacgtgggttaagctcttcctgccccgttcagcttcactcccaccctagtgcttcagtgacctcggggagtcctcta

SEQ ID NO: 404050 - DNA, 8154 bp, Homo sapiens
tgggcgtcggtcgtcggtggggtcggagctgggcgcggagcccctcacagtgcagacgcccagcggcagcaggatgagtgcggaggcaagcgcccggcctctgcgggtgggctcccgtgtagaggtgattggaaaaggccaccgaggcactgtggcctatgttggagccacactgtttgccactggcaaatgggtaggcgtgattctggatgaagcaaagggcaaaaatgatggaactgttcaaggcaggaagtacttcacttgtgatgaagggcatggcatctttgtgcgccagtcccagatccaggtatttgaagatggagcagatactacttccccagagacacctgattcttctgcttcaaaagtcctcaaaagagagggaactgatacaactgcaaagactagcaaactgcccacgcgcccagccagtactggggtggctggggccagtagctccctgggcccctctggctcagcgtcagcaggtgagctgagcagcagtgagcccagcaccccggctcagactccgctggcagcacccatcatccccacgccggtcctcacctctcctggagcagtccccccgcttccttccccatccaaggaggaggagggactaagggctcaggtgcgggacctggaggagaaactagagaccctgagactgaaacgggcagaagacaaagcaaagctaaaagagctggagaaacacaaaatccagctggagcaggtgcaggaatggaagagcaaaatgcaggagcagcaggccgacctgcagcggcgcctcaaggaggcgagaaaggaagccaaggaggcgctggaggcaaaggaacgctatatggaggagatggctgatactgctgatgccattgagatggccactttggacaaggagatggctgaagagcgggctgagtccctgcagcaggaggtggaggcactgaaggagcgggtggacgagctcactactgacttagagatcctcaaggctgagattgaagagaagggctcagatggcgctgcatccagttatcagctcaagcagcttgaggagcagaatgcccgcctgaaggatgccctggtgaggatgcgggatctttcttcctcagagaagcaggagcatgtgaagctccagaagctcatggaaaagaagaaccaagagctggaagttgtgaggcaacagcgggagcgtctgcaggaggagctaagccaggcagagagcaccattgatgagctcaaggagcaggtggatgctgctctgggtgctgaggagatggtggagatgctgacagatcggaacctgaatctggaagagaaagtgcgcgagttgagggagactgtgggagacttggaagcgatgaatgagatgaacgatgagctgcaggagaatgcacgtgagacagaactggagctgcgggagcagctggacatggcaggcgcgcgggttcgtgaggcccagaagcgtgtggaggcagcccaggagacggttgcagactaccagcagaccatcaagaagtaccgccagctgaccgcccatctacaggatgtgaatcgggaactgacaaaccagcaggaagcatctgtggagaggcaacagcagccacctccagagacctttgacttcaaaatcaagtttgctgagactaaggcccatgccaaggcaattgagatggaattgaggcagatggaggtggcccaggccaatcgacacatgtccctgctgacagccttcatgcctgacagcttccttcggccaggtggggaccatgactgcgttctggtgctgttgctcatgcctcgtctcatttgcaaggcagagctgatccggaagcaggcccaggagaagtttgaactaagtgagaactgttcagagcggcctgggctgcgaggagctgctggggagcaactcagctttgctgctggactggtgtactcgctgagcctgctgcaggccacgctacaccgctatgagcatgccctctctcagtgcagtgtggatgtgtataagaaagtgggcagcctgtaccctgagatgagtgcccatgagcgctccttggatttcctcattgaactgctgcacaaggatcagctggatgagactgtcaatgtggagcctctcaccaaggccatcaagtactatcagcatctgtacagcatccaccttgccgaacagcctgaggactgtactatgcagctggctgaccacattaagttcacgcagagtgctctggactgcatgagtgtggaggtaggacggctgcgtgccttcttgcagggtgggcaggaggctacagatattgccctcctgctccgggatctggaaacttcatgcagtgacatccgccagttctgcaagaagatccgaaggcgaatgccagggacagatgctcctgggatcccagctgcactggcctttggaccacaggtatctgacacgctcctagactgcaggaaacacttgacgtgggtcgtggctgtgctgcaggaggtggcagctgctgctgcccagctcattgccccactggcagagaatgaggggctacttgtggctgctctggaggaactggctttcaaagcaagcgagcagatctatgggaccccctccagcagcccctatgagtgtctgcgccagtcatgcaacatcctcatcagtaccatgaacaagctggccacagccatgcaggagggggagtatgatgcagagcggccccccagcaagcctccaccggttgaactgcgggctgctgcccttcgtgcagagatcacagatgctgaaggcctgggtttgaagctcgaagatcgagagacagttattaaggagttgaagaagtcactcaagattaagggagaggagctaagtgaggccaatgtgcggctgagcctcctggagaagaagttggacagtgctgccaaggatgcagatgagcgcatcgagaaagtccagactcggctggaggagacccaggcactgctgcgaaagaaggagaaagagtttgaggagacaatggatgcactccaggctgacatcgaccagctggaggcagagaaggcagaactaaagcagcgtctgaacagccagtccaaacgcacgattgagggactccggggccctcctccttcaggcattgctactctggtctctggcattgctggtggtgaaggactcaccactgctgcttcagcagatctctgccatgaggctgcacatctcccagctccagcatgagaacagcatcctcaagggagcccagatgaaggcatccttggcatccctgccccctctgcatgttgcaaagctatcccatgagggccctggcagtgagttaccagctggagcgctgtatcgtaagaccagccagctgctggagacattgaatcaattgagcacacacacgcacgtagtagacatcactcgcaccagccctgctgccaagagcccgtcggcccaacttatggagcaagtggctcagcttaagtccctgagtgacaccgtcgagaagctcaaggatgaggtcctcaaggagacagtatctcagcgccctggagccacagtacccactgactttgccaccttcccttcatcagccttcctcagggccaaggaggagcagcaggatgacacagtctacatgggcaaagtgaccttctcatgtgcggctggttttggacagcgacaccggctggtgctgacccaggagcagctgcaccagcttcacagtcgcctcatctcctaagcactcctttcccctgctgtccccttcgaccctcagccctctggtgccgctctgcccgatgcacagccacctcagccagcccccagtgcttcctgtgtggtgttgagagtgggacttgggccattaagctcacagcaggagtggaggagaagcgatgctgaggaagctttggctgtatcaaatttgaggtctcctcttcgtagtgaccagaagaatgctgtttctaaaattcatgtgcacaggcatcccaggatttggaattcagctgtgagctcatgagctgatggatgtttccaggagtaccctgaagaccacccaggtgggagtgtaagataaccttccagataaagagttgctgctaccaaaagagtgctgacaccatcacagtatgttcccttctcaaccctggacatggttcagaaacagctaaagcagacaagaatctggggcagccaatattgtaccacctgccaaagcttggcacaaacaatctggaagccaaaaattgcacatactgtggaacagagcaagtggttctggcctccctgggatttggatcctggtttccagagctaagaacacaaagtcatgaaggtgaaggaggagaaggctggggtaggaaagctggaccacactaaccacaggaggagatttccggatcagaaagaatgccctcctatccacattgggcttccagtacccacttaccctcaaagaaaaactgaccagaagggacatctttcaggcctgcaaaaagtccactggggcctgcggccagaccagccacagcaggaactgactggcccagggagtggggcaagcagccaggacagcagcatggatcttatcagcaggactcggtccccagctgctgagcagctccaggacatcctgggggaggaagatgaggctcccaaccccaccctctttacagagatggatactctgcagcatgacggagaccagatggagtggaaggagtcagccaggtggataaagtttgaagaaaaggtagaggaaggcggcgaacgctggagcaagccccacgtgtccacactatccctgcacagcctcttcgagctccgtacctgcctgcagacggggacggtgctgctggatttggacagtggctccttaccacagatcatagatgatgtcattgagaagcagattgaggatggtctcctgcggccagagctccgggagagggtcagttacgtcctcctgaggaggcaccgccaccaaaccaagaagcccatccaccgctccttagctgacattgggaagtcagtctccaccacaaatcgcagtcctgcccggagccctggtgctggcccgagtctacaccactccacggaagacctgcggatgcggcagagtgcaaattacggacgtctgtgtcatgcccagagcagaagcatgaatgacatttctctcaccccaaacacagaccagcggaaaaacaaattcatgaagaagatccccaaggactcagaagcgtccaacgtgctcgtgggcgaggtggacttcctagaccagccattcatcgcgttcgtgcgcctcatccagtcggccatgctgggaggagtgaccgaggtgcctgtccccaccagatttctgtttatactactgggaccttctgggagagcaaaatcctacaatgaaattggccgtgccattgcaaccctcatggtagatgatctcttcagtgacgtggcctacaaagcccgcaatcgggaagatctgatcgcaggaattgatgaatttctggatgaggtcatcgtccttcctcctggagaatgggacccaaatatccggattgagccccccaagaaggtgccctctgctgacaagaggaaatctgtgttctccctagcagagctgggccagatgaatggctctgtgggaggaggcggcggagctcctggaggaggcaatggaggtggtggtggtggtggcagtggcggcggggctggcagtggcggggccggcggaacaagcagcggggatgatggagagatgccagccatgcatgaaatcggggaggaacttatctggacaggaaggttcttcggtggcctgtgtctggatatcaagaggaagttgccctggttcccaagtgacttctatgatggcttccacattcagtccatctctgccatcctattcatctacctcggctgtatcaccaacgcgatcacctttggtgggcttctgggggatgccaccgacaattatcagggagtgatggagagcttcctgggcactgccatggctggctccttgttctgcctcttctcgggacagcctctcatcattctcagcagcacggggcccatcctcatctttgagaagctcctcttcgacttcagcaaaggcaatggcctggactacatggagttccgcctctggattggcctacactcagctgtccagtgccttatcctagtggccacagatgccagctttatcatcaaatatatcacccgcttcaccgaggagggcttctccacccttatcagcttcatcttcatctacgatgccatcaagaagatgatcggtgccttcaagtactaccctatcaatatggacttcaagccaaacttcatcactacctacaagtgcgagtgtgtcgcccctgacacagtgaatacaaccgtgttcaatgcttcagccccattggcaccagacaccaacgcttctctgtacaacctccttaacctcacagcgttggactggtccctgctgagcaagaaggagtgtctgagctacggcgggcgcctgcttgggaattcctgcaagtttatcccagacctggcgctcatgtccttcatccttttctttgggacatactccatgaccctgaccctgaagaagttcaaattcagccgctattttcctaccaaggtccgggccctggtggctgacttttccattgttttctccatcctgatgttctgtggaatcgatgcctgttttggcctagaaactcccaagctgcatgtgcccagtgtcatcaagccaacgcggcctgaccgaggctggttcgtggccccctttgggaagaacccgtggtgggtatacccagcaagcatcctgcccgccctgctggtgaccatcctgatcttcatggaccagcagatcactgccgtcattgtcaaccggaaggagaacaaactgaagaaggctgccggctaccatctggacctgttctgggtgggcatcctcatggctttgtgctcctttatggggctcccctggtacgtggctgccacggtcatctccatcgcccacatcgacagcctcaagatggagacagagaccagtgcccctggggagcagccccagtttctgggagtcagggaacagagagtaaccggcatcatcgtcttcatcctgacgggaatctctgtcttcctggctcccatcctaaagtgtatccccctgccggtgctgtacggagtcttcctctacatgggcgtggcctccctgaatggcatccagttctgggaacgctgcaagctcttcctgatgccagccaagcaccagccggaccatgccttcctgcggcacgtgccgctgcgccggatccacctcttcaccctggtgcagatcctctgcctggcggtgctctggatcctcaaatccacggtggctgccatcatcttcccggtcatgatcctgggcctcatcatcgttcgaaggcttctggatttcatcttttcccagcacgacctggcctggattgacaacatcctcccagagaaggaaaaaaaggagacagacaagaagaggaagagaaaaaaaggggcccacgaggactgtgatgaggagccccagttccctcctccctcggttataaagattcccatggaaagtgtccaatcagatccccaaaacggtatccactgcattgccagaaaaagatcttccagttggagttactcactctgattcttccttcagtgacacagaacttgaccgaaggtaagcaggcatggattagagacataagctatacgtcacttacaaaaacatctccagcaaactatctaaacttctttaaactccagagaactatcaaaagaataacgccagctggcagaagaacgaggacggaggttaatggctgctcctggctagatcacaggaccctgcatgatactggaatgctccctggtgaggtactgcagagttacaggatcgtgaactctatttattcccacatcaatgactgctgctccttccttgatcatatctgctgtgatcagatttggaatacctggaaatggagaaaggaaagatcaacttagtactgaaaacagtctacctgtcagattcttgtctaacttcaatttcaagagaccctgaagaactaatcaacatgttttattaaaacctgttaaaaatattaact

SEQ ID NO: 404051 - DNA, 4036 bp, Homo sapiens
tgggcgtcggtcgtcggtggggtcggagctgggcgcggagcccctcacagtgcagacgcccagcggcagcaggatgagtgcggaggcaagcgcccggcctctgcgggtgggctcccgtgtagaggtgattggaaaaggccaccgaggcactgtggcctatgttggagccacactgtttgccactggcaaatgggtaggcgtgattctggatgaagcaaagggcaaaaatgatggaactgttcaaggcaggaagtacttcacttgtgatgaagggcatggcatctttgtgcgccagtcccagatccaggtatttgaagatggagcagatactacttccccagagacacctgattcttctgcttcaaaagtcctcaaaagagagggaactgatacaactgcaaagactagcaaactgcccacgcgcccagccagtactggggtggctggggccagtagctccctgggcccctctggctcagcgtcagcaggtgagctgagcagcagtgagcccagcaccccggctcagactccgctggcagcacccatcatccccacgccggtcctcacctctcctggagcagtccccccgcttccttccccatccaaggaggaggagggactaagggctcaggtgcgggacctggaggagaaactagagaccctgagactgaaacgggcagaagacaaagcaaagctaaaagagctggagaaacacaaaatccagctggagcaggtgcaggaatggaagagcaaaatgcaggagcagcaggccgacctgcagcggcgcctcaaggaggcgagaaaggaagccaaggaggcgctggaggcaaaggaacgctatatggaggagatggctgatactgctgatgccattgagatggccactttggacaaggagatggctgaagagcgggctgagtccctgcagcaggaggtggaggcactgaaggagcgggtggacgagctcactactgacttagagatcctcaaggctgagattgaagagaagggctcagatggcgctgcatccagttatcagctcaagcagcttgaggagcagaatgcccgcctgaaggatgccctggtgaggatgcgggatctttcttcctcagagaagcaggagcatgtgaagctccagaagctcatggaaaagaagaaccaagagctggaagttgtgaggcaacagcgggagcgtctgcaggaggagctaagccaggcagagagcaccattgatgagctcaaggagcaggtggatgctgctctgggtgctgaggagatggtggagatgctgacagatcggaacctgaatctggaagagaaagtgcgcgagttgagggagactgtgggagacttggaagcgatgaatgagatgaacgatgagctgcaggagaatgcacgtgagacagaactggagctgcgggagcagctggacatggcaggcgcgcgggttcgtgaggcccagaagcgtgtggaggcagcccaggagacggttgcagactaccagcagaccatcaagaagtaccgccagctgaccgcccatctacaggatgtgaatcgggaactgacaaaccagcaggaagcatctgtggagaggcaacagcagccacctccagagacctttgacttcaaaatcaagtttgctgagactaaggcccatgccaaggcaattgagatggaattgaggcagatggaggtggcccaggccaatcgacacatgtccctgctgacagccttcatgcctgacagcttccttcggccaggtggggaccatgactgcgttctggtgctgttgctcatgcctcgtctcatttgcaaggcagagctgatccggaagcaggcccaggagaagtttgaactaagtgagaactgttcagagcggcctgggctgcgaggagctgctggggagcaactcagctttgctgctggactggtgtactcgctgagcctgctgcaggccacgctacaccgctatgagcatgccctctctcagtgcagtgtggatgtgtataagaaagtgggcagcctgtaccctgagatgagtgcccatgagcgctccttggatttcctcattgaactgctgcacaaggatcagctggatgagactgtcaatgtggagcctctcaccaaggccatcaagtactatcagcatctgtacagcatccaccttgccgaacagcctgaggactgtactatgcagctggctgaccacattaagttcacgcagagtgctctggactgcatgagtgtggaggtaggacggctgcgtgccttcttgcagggtgggcaggaggctacagatattgccctcctgctccgggatctggaaacttcatgcagtgacatccgccagttctgcaagaagatccgaaggcgaatgccagggacagatgctcctgggatcccagctgcactggcctttggaccacaggtatctgacacgctcctagactgcaggaaacacttgacgtgggtcgtggctgtgctgcaggaggtggcagctgctgctgcccagctcattgccccactggcagagaatgaggggctacttgtggctgctctggaggaactggctttcaaagcaagcgagcagatctatgggaccccctccagcagcccctatgagtgtctgcgccagtcatgcaacatcctcatcagtaccatgaacaagctggccacagccatgcaggagggggagtatgatgcagagcggccccccagcaagcctccaccggttgaactgcgggctgctgcccttcgtgcagagatcacagatgctgaaggcctgggtttgaagctcgaagatcgagagacagttattaaggagttgaagaagtcactcaagattaagggagaggagctaagtgaggccaatgtgcggctgagcctcctggagaagaagttggacagtgctgccaaggatgcagatgagcgcatcgagaaagtccagactcggctggaggagacccaggcactgctgcgaaagaaggagaaagagtttgaggagacaatggatgcactccaggctgacatcgaccagctggaggcagagaaggcagaactaaagcagcgtctgaacagccagtccaaacgcacgattgagggactccggggccctcctccttcaggcattgctactctggtctctggcattgctggtggagccatccctgggcaggctccagggtctgtgccaggcccagggctggtgaaggactcaccactgctgcttcagcagatctctgccatgaggctgcacatctcccagctccagcatgagaacagcatcctcaagggagcccagatgaaggcatccttggcatccctgccccctctgcatgttgcaaagctatcccatgagggccctggcagtgagttaccagctggagcgctgtatcgtaagaccagccagctgctggagacattgaatcaattgagcacacacacgcacgtagtagacatcactcgcaccagccctgctgccaagagcccgtcggcccaacttatggagcaagtggctcagcttaagtccctgagtgacaccgtcgagaagctcaaggccaaggaggagcagcaggatgacacagtctacatgggcaaagtgaccttctcatgtgcggctggttttggacagcgacaccggctggtgctgacccaggagcagctgcaccagcttcacagtcgcctcatctcctaagcactcctttcccctgctgtccccttcgaccctcagccctctggtgccgctctgcccgatgcacagccacctcagccagcccccaggtagaaacgtgggttaagctcttcctgccccgttcagcttcactcccaccctttcagcgtcctgccccttcaccttgacccgggttcccccactcccattccctggcctctgccataatttgttgttcaactgctccctccttcctgaggggcctcagggcttgtggggggtaggctgagaccccaccaccaaaggttaagtgaggtccccttgattgaggacttcaccccttgattaaagcaacttctgcttcag

SEQ ID NO: 404052 - DNA, 3691 bp, Homo sapiens
  misc_feature (3448)..(3448): n is a, c, g, or t
  misc_feature (3451)..(3451): n is a, c, g, or t
  misc_feature (3454)..(3455): n is a, c, g, or t
  misc_feature (3457)..(3457): n is a, c, g, or t
  misc_feature (3462)..(3465): n is a, c, g, or t
  misc_feature (3468)..(3468): n is a, c, g, or t
  misc_feature (3470)..(3470): n is a, c, g, or t
  misc_feature (3476)..(3476): n is a, c, g, or t
tgggcgtcggtcgtcggtggggtcggagctgggcgcggagcccctcacagtgcagacgcccagcggcagcaggatgagtgcggaggcaagcgcccggcctctgcgggtgggctcccgtgtagaggtgattggaaaaggccaccgaggcactgtggcctatgttggagccacactgtttgccactggcaaatgggtaggcgtgattctggatgaagcaaagggcaaaaatgatggaactgttcaaggcaggaagtacttcacttgtgatgaagggcatggcatctttgtgcgccagtcccagatccaggtatttgaagatggagcagatactacttccccagagacacctgattcttctgcttcaaaagtcctcaaaagagagggaactgatacaactgcaaagactagcaaactgcccacgcgcccagccagtactggggtggctggggccagtagctccctgggcccctctggctcagcgtcagcaggtgagctgagcagcagtgagcccagcaccccggctcagactccgctggcagcacccatcatccccacgccggtcctcacctctcctggagcagtccccccgcttccttccccatccaaggaggaggagggactaagggctcaggtgcgggacctggaggagaaactagagaccctgagactgaaacgggcagaagacaaagcaaagctaaaagagctggagaaacacaaaatccagctggagcaggtgcaggaatggaagagcaaaatgcaggagcagcaggccgacctgcagcggcgcctcaaggaggcgagaaaggaagccaaggaggcgctggaggcaaaggaacgctatatggaggagatggctgatactgctgatgccattgagatggccactttggacaaggagatggctgaagagcgggctgagtccctgcagcaggaggtggaggcactgaaggagcgggtggacgagctcactactgacttagagatcctcaaggctgagattgaagagaagggctcagatggcgctgcatccagttatcagctcaagcagcttgaggagcagaatgcccgcctgaaggatgccctggtgaggatgcgggatctttcttcctcagagaagcaggagcatgtgaagctccagaagctcatggaaaagaagaaccaagagctggaagttgtgaggcaacagcgggagcgtctgcaggaggagctaagccaggcagagagcaccattgatgagctcaaggagcaggtggatgctgctctgggtgctgaggagatggtggagatgctgacagatcggaacctgaatctggaagagaaagtgcgcgagttgagggagactgtgggagacttggaagcgatgaatgagatgaacgatgagctgcaggagaatgcacgtgagacagaactggagctgcgggagcagctggacatggcaggcgcgcgggttcgtgaggcccagaagcgtgtggaggcagcccaggagacggttgcagactaccagcagaccatcaagaagtaccgccagctgaccgcccatctacaggatgtgaatcgggaactgacaaaccagcaggaagcatctgtggagaggcaacagcagccacctccagagacctttgacttcaaaatcaagtttgctgagactaaggcccatgccaaggcaattgagatggaattgaggcagatggaggtggcccaggccaatcgacacatgtccctgctgacagccttcatgcctgacagcttccttcggccaggtggggaccatgactgcgttctggtgctgttgctcatgcctcgtctcatttgcaaggcagagctgatccggaagcaggcccaggagaagtttgaactaagtgagaactgttcagagcggcctgggctgcgaggagctgctggggagcaactcagctttgctgctggactggtgtactcgctgagcctgctgcaggccacgctacaccgctatgagcatgccctctctcagtgcagtgtggatgtgtataagaaagtgggcagcctgtaccctgagatgagtgcccatgagcgctccttggatttcctcattgaactgctgcacaaggatcagctggatgagactgtcaatgtggagcctctcaccaaggccatcaagtactatcagcatctgtacagcatccaccttgccgaacagcctgaggactgtactatgcagctggctgaccacattaagttcacgcagagtgctctggactgcatgagtgtggaggtaggacggctgcgtgccttcttgcagggtgggcaggaggctacagatattgccctcctgctccgggatctggaaacttcatgcagtgacatccgccagttctgcaagaagatccgaaggcgaatgccagggacagatgctcctgggatcccagctgcactggcctttggaccacaggtatctgacacgctcctagactgcaggaaacacttgacgtgggtcgtggctgtgctgcaggaggtggcagctgctgctgcccagctcattgccccactggcagagaatgaggggctacttgtggctgctctggaggaactggctttcaaagcaagcgagcagatctatgggaccccctccagcagcccctatgagtgtctgcgccagtcatgcaacatcctcatcagtaccatgaacaagctggccacagccatgcaggagggggagtatgatgcagagcggccccccagcaagcctccaccggttgaactgcgggctgctgcccttcgtgcagagatcacagatgctgaaggcctgggtttgaagctcgaagatcgagagacagttattaaggagttgaagaagtcactcaagattaagggagaggagctaagtgaggccaatgtgcggctgagcctcctggagaagaagttggacagtgctgccaaggatgcagatgagcgcatcgagaaagtccagactcggctggaggagacccaggcactgctgcgaaagaaggagaaagagtttgaggagacaatggatgcactccaggctgacatcgaccagctggaggcagagaaggcagaactaaagcagcgtctgaacagccagtccaaacgcacgattgagggactccggggccctcctccttcaggcattgctactctggtctctggcattgctggtggagccatccctgggcaggctccagggtctgtgccaggcccagggctggtgaaggactcaccactgctgcttcagcagatctctgccatgaggctgcacatctcccagctccagcatgagaacagcatcctcaagggagcccagatgaaggcatccttggcatccctgccccctctgcatgttgcaaagctatcccatgagggccctggcagtgagttaccagctggagcgctgtatcgtaagaccagccagccgcacatgagaaggtcactttgcccatgtagactggtnacntgnngntcccnnnngcncngagganggctgatgaagggaaggtggcaaagtcagtgggtactgtgaccttctcatgtgcggctggttttggacagcgacaccggctggtgctgacccaggagcagctgcaccagcttcacagtcgcctcatctcctaagcaccctctgtgcagtccacctcctctgtgctgtcacagaagctgaagccgggaggagtgggagccccctcctctgtgctgt

SEQ ID NO: 404053 - DNA, 6894 bp, Homo sapiens
tgggcgtcggtcgtcggtggggtcggagctgggcgcggagcccctcacagtgcagacgcccagcggcagcaggatgagtgcggaggcaagcgcccggcctctgcgggtgggctcccgtgtagaggtgattggaaaaggccaccgaggcactgtggcctatgttggagccacactgtttgccactggcaaatgggtaggcgtgattctggatgaagcaaagggcaaaaatgatggaactgttcaaggcaggaagtacttcacttgtgatgaagggcatggcatctttgtgcgccagtcccagatccaggtatttgaagatggagcagatactacttccccagagacacctgattcttctgcttcaaaagtcctcaaaagagagggaactgatacaactgcaaagactagcaaactgcccacgcgcccagccagtactggggtggctggggccagtagctccctgggcccctctggctcagcgtcagcaggtgagctgagcagcagtgagcccagcaccccggctcagactccgctggcagcacccatcatccccacgccggtcctcacctctcctggagcagtccccccgcttccttccccatccaaggaggaggagggactaagggctcaggtgcgggacctggaggagaaactagagaccctgagactgaaacgggcagaagacaaagcaaagctaaaagagctggagaaacacaaaatccagctggagcaggtgcaggaatggaagagcaaaatgcaggagcagcaggccgacctgcagcggcgcctcaaggaggcgagaaaggaagccaaggaggcgctggaggcaaaggaacgctatatggaggagatggctgatactgctgatgccattgagatggccactttggacaaggagatggctgaagagcgggctgagtccctgcagcaggaggtggaggcactgaaggagcgggtggacgagctcactactgacttagagatcctcaaggctgagattgaagagaagggctcagatggcgctgcatccagttatcagctcaagcagcttgaggagcagaatgcccgcctgaaggatgccctggtgaggatgcgggatctttcttcctcagagaagcaggagcatgtgaagctccagaagctcatggaaaagaagaaccaagagctggaagttgtgaggcaacagcgggagcgtctgcaggaggagctaagccaggcagagagcaccattgatgagctcaaggagcaggtggatgctgctctgggtgctgaggagatggtggagatgctgacagatcggaacctgaatctggaagagaaagtgcgcgagttgagggagactgtgggagacttggaagcgatgaatgagatgaacgatgagctgcaggagaatgcacgtgagacagaactggagctgcgggagcagctggacatggcaggcgcgcgggttcgtgaggcccagaagcgtgtggaggcagcccaggagacggttgcagactaccagcagaccatcaagaagtaccgccagctgaccgcccatctacaggatgtgaatcgggaactgacaaaccagcaggaagcatctgtggagaggcaacagcagccacctccagagacctttgacttcaaaatcaagtttgctgagactaaggcccatgccaaggcaattgagatggaattgaggcagatggaggtggcccaggccaatcgacacatgtccctgctgacagccttcatgcctgacagcttccttcggccaggtggggaccatgactgcgttctggtgctgttgctcatgcctcgtctcatttgcaaggcagagctgatccggaagcaggcccaggagaagtttgaactaagtgagaactgttcagagcggcctgggctgcgaggagctgctggggagcaactcagctttgctgctggactggtgtactcgctgagcctgctgcaggccacgctacaccgctatgagcatgccctctctcagtgcagtgtggatgtgtataagaaagtgggcagcctgtaccctgagatgagtgcccatgagcgctccttggatttcctcattgaactgctgcacaaggatcagctggatgagactgtcaatgtggagcctctcaccaaggccatcaagtactatcagccacctcagccagcccccaggtagaaacgtgggttaagctcttcctgccccgttcagcttcactcccaccctttcagcgtcctgccccttcaccttgacccgggttcccccactcccattccctggcctctgccataatttgttgttcaactgctccctccttcctgaggggcctcagggcttgtggggggtaggctgagaccccaccaccaaaggttaagtgaggtccccttgattgaggacttcaccccttgattaaagcaacttctgcttcagtgcttcctgtgtggtgttgagagtgggacttgggccattaagctcacagcaggagtggaggagaagcgatgctgaggaagctttggctgtatcaaatttgaggtctcctcttcgtagtgaccagaagaatgctgtttctaaaattcatgtgcacaggcatcccaggatttggaattcagctgtgagctcatgagctgatggatgtttccaggagtaccctgaagaccacccaggtgggagtgtaagataaccttccagataaagagttgctgctaccaaaagagtgctgacaccatcacagtatgttcccttctcaaccctggacatggttcagaaacagctaaagcagacaagaatctggggcagccaatattgtaccacctgccaaagcttggcacaaacaatctggaagccaaaaattgcacatactgtggaacagagcaagtggttctggcctccctgggatttggatcctggtttccagagctaagaacacaaagtcatgaaggtgaaggaggagaaggctggggtaggaaagctggaccacactaaccacaggaggagatttccggatcagaaagaatgccctcctatccacattgggcttccagtacccacttaccctcaaagaaaaactgaccagaagggacatctttcaggcctgcaaaaagtccactggggcctgcggccagaccagccacagcaggaactgactggcccagggagtggggcaagcagccaggacagcagcatggatcttatcagcaggactcggtccccagctgctgagcagctccaggacatcctgggggaggaagatgaggctcccaaccccaccctctttacagagatggatactctgcagcatgacggagaccagatggagtggaaggagtcagccaggtggataaagtttgaagaaaaggtagaggaaggcggcgaacgctggagcaagccccacgtgtccacactatccctgcacagcctcttcgagctccgtacctgcctgcagacggggacggtgctgctggatttggacagtggctccttaccacagatcatagatgatgtcattgagaagcagattgaggatggtctcctgcggccagagctccgggagagggtcagttacgtcctcctgaggaggcaccgccaccaaaccaagaagcccatccaccgctccttagctgacattgggaagtcagtctccaccacaaatcgcagtcctgcccggagccctggtgctggcccgagtctacaccactccacggaagacctgcggatgcggcagagtgcaaattacggacgtctgtgtcatgcccagagcagaagcatgaatgacatttctctcaccccaaacacagaccagcggaaaaacaaattcatgaagaagatccccaaggactcagaagcgtccaacgtgctcgtgggcgaggtggacttcctagaccagccattcatcgcgttcgtgcgcctcatccagtcggccatgctgggaggagtgaccgaggtgcctgtccccaccagatttctgtttatactactgggaccttctgggagagcaaaatcctacaatgaaattggccgtgccattgcaaccctcatggtagatgatctcttcagtgacgtggcctacaaagcccgcaatcgggaagatctgatcgcaggaattgatgaatttctggatgaggtcatcgtccttcctcctggagaatgggacccaaatatccggattgagccccccaagaaggtgccctctgctgacaagaggaaatctgtgttctccctagcagagctgggccagatgaatggctctgtgggaggaggcggcggagctcctggaggaggcaatggaggtggtggtggtggtggcagtggcggcggggctggcagtggcggggccggcggaacaagcagcggggatgatggagagatgccagccatgcatgaaatcggggaggaacttatctggacaggaaggttcttcggtggcctgtgtctggatatcaagaggaagttgccctggttcccaagtgacttctatgatggcttccacattcagtccatctctgccatcctattcatctacctcggctgtatcaccaacgcgatcacctttggtgggcttctgggggatgccaccgacaattatcagggagtgatggagagcttcctgggcactgccatggctggctccttgttctgcctcttctcgggacagcctctcatcattctcagcagcacggggcccatcctcatctttgagaagctcctcttcgacttcagcaaaggcaatggcctggactacatggagttccgcctctggattggcctacactcagctgtccagtgccttatcctagtggccacagatgccagctttatcatcaaatatatcacccgcttcaccgaggagggcttctccacccttatcagcttcatcttcatctacgatgccatcaagaagatgatcggtgccttcaagtactaccctatcaatatggacttcaagccaaacttcatcactacctacaagtgcgagtgtgtcgcccctgacacagtgaatacaaccgtgttcaatgcttcagccccattggcaccagacaccaacgcttctctgtacaacctccttaacctcacagcgttggactggtccctgctgagcaagaaggagtgtctgagctacggcgggcgcctgcttgggaattcctgcaagtttatcccagacctggcgctcatgtccttcatccttttctttgggacatactccatgaccctgaccctgaagaagttcaaattcagccgctattttcctaccaaggtccgggccctggtggctgacttttccattgttttctccatcctgatgttctgtggaatcgatgcctgttttggcctagaaactcccaagctgcatgtgcccagtgtcatcaagccaacgcggcctgaccgaggctggttcgtggccccctttgggaagaacccgtggtgggtatacccagcaagcatcctgcccgccctgctggtgaccatcctgatcttcatggaccagcagatcactgccgtcattgtcaaccggaaggagaacaaactgaagaaggctgccggctaccatctggacctgttctgggtgggcatcctcatggctttgtgctcctttatggggctcccctggtacgtggctgccacggtcatctccatcgcccacatcgacagcctcaagatggagacagagaccagtgcccctggggagcagccccagtttctgggagtcagggaacagagagtaaccggcatcatcgtcttcatcctgacgggaatctctgtcttcctggctcccatcctaaagtgtatccccctgccggtgctgtacggagtcttcctctacatgggcgtggcctccctgaatggcatccagatggggaccggagggtcagaattcaaaatccagaagaagctgactccattctgggaacgctgcaagctcttcctgatgccagccaagcaccagccggaccatgccttcctgcggcacgtgccgctgcgccggatccacctcttcaccctggtgcagatcctctgcctggcggtgctctggatcctcaaatccacggtggctgccatcatcttcccggtcatgatcctgggcctcatcatcgttcgaaggcttctggatttcatcttttcccagcacgacctggcctggattgacaacatcctcccagagaaggaaaaaaaggagacagacaagaagaggaagagaaaaaaaggggcccacgaggactgtgatgaggagccccagttccctcctccctcggttataaagattcccatggaaagtgtccaatcagatccccaaaacggtatccactgcattgccagaaaaagatcttccagttggagttactcactctgattcttccttcagtgacacagaacttgaccgaaggtaagcaggcatggattagagacataagctatacgtcacttacaaaaacatctccagcaaactatctaaacttctttaaactccagagaactatcaaaagaataacgccagctggcagaagaacgaggacggaggtaggtcaactcaattgtttcttctctttctgcctcaagctgcctagagcaggagctacttctgctcgcatgaaagccaaaagccaaaacagacaaacctatccctgcctcaagtattttacagattaagctcctagcttggcacaacctgttgtgatataagactgtaggacaggccaggtgcagtggctcacgcctgtaatcctagcattttgggaggccgaggcaggtggatcacttgaggtcaggagtttgagaccagcctggccaatgtgatgaaaccccatctctactaaaaacacaaaaattagccaggcatggtggcatgcacctgtaatcccagctactcaggaggctgaggcacaagaattgtttgaacccgagaggca

SEQ ID NO: 404054 - DNA, 3089 bp, Homo sapiens
tgggcgtcggtcgtcggtggggtcggagctgggcgcggagcccctcacagtgcagacgcccagcggcagcaggatgagtgcggaggcaagcgcccggcctctgcgggtgggctcccgtgtagaggtgattggaaaaggccaccgaggcactgtggcctatgttggagccacactgtttgccactggcaaatgggtaggcgtgattctggatgaagcaaagggcaaaaatgatggaactgttcaaggcaggaagtacttcacttgtgatgaagggcatggcatctttgtgcgccagtcccagatccaggtatttgaagatggagcagatactacttccccagagacacctgattcttctgcttcaaaagtcctcaaaagagagggaactgatacaactgcaaagactagcaaactgcccacgcgcccagccagtactggggtggctggggccagtagctccctgggcccctctggctcagcgtcagcaggtgagctgagcagcagtgagcccagcaccccggctcagactccgctggcagcacccatcatccccacgccggtcctcacctctcctggagcagtccccccgcttccttccccatccaaggaggaggagggactaagggctcaggtgcgggacctggaggagaaactagagaccctgagactgaaacgggcagaagacaaagcaaagctaaaagagctggagaaacacaaaatccagctggagcaggtgcaggaatggaagagcaaaatgcaggagcagcaggccgacctgcagcggcgcctcaaggaggcgagaaaggaagccaaggaggcgctggaggcaaaggaacgctatatggaggagatggctgatactgctgatgccattgagatggccactttggacaaggagatggctgaagagcgggctgagtccctgcagcaggaggtggaggcactgaaggagcgggtggacgagctcactactgacttagagatcctcaaggctgagattgaagagaagggctcagatggcgctgcatccagttatcagctcaagcagcttgaggagcagaatgcccgcctgaaggatgccctggtgaggatgcgggatctttcttcctcagagaagcaggagcatgtgaagctccagaagctcatggaaaagaagaaccaagagctggaagttgtgaggcaacagcgggagcgtctgcaggaggagctaagccaggcagagagcaccattgatgagctcaaggagcaggtggatgctgctctgggtgctgaggagatggtggagatgctgacagatcggaacctgaatctggaagagaaagtgcgcgagttgagggagactgtgggagacttggaagcgatgaatgagatgaacgatgagctgcaggagaatgcacgtgagacagaactggagctgcgggagcagctggacatggcaggcgcgcgggttcgtgaggcccagaagcgtgtggaggcagcccaggagacggttgcagactaccagcagaccatcaagaagtaccgccagctgaccgcccatctacaggatgtgaatcgggaactgacaaaccagcaggaagcatctgtggagaggcaacagcagccacctccagagacctttgacttcaaaatcaagtttgctgagactaaggcccatgccaaggcaattgagatggaattgaggcagatggaggtggcccaggccaatcgacacatgtccctgctgacagccttcatgcctgacagcttccttcggccaggtggggaccatgactgcgttctggtgctgttgctcatgcctcgtctcatttgcaaggcagagctgatccggaagcaggcccaggagaagtttgaactaagtgagaactgttcagagcggcctgggctgcgaggagctgctggggagcaactcagctttgctgctggactggtgtactcgctgagcctgctgcaggccacgctacaccgctatgagcatgccctctctcagtgcagtgtggatgtgtataagaaagtgggcagcctgtaccctgagatgagtgcccatgagcgctccttggatttcctcattgaactgctgcacaaggatcagctggatgagactgtcaatgtggagcctctcaccaaggccatcaagtactatcagcatctgtacagcatccaccttgccgaacagcctgaggactgtactatgcagctggctgaccacattaagttcacgcagagtgctctggactgcatgagtgtggaggtaggacggctgcgtgccttcttgcagggtgggcaggaggctacagatattgccctcctgctccgggatctggaaacttcatgcagtgacatccgccagttctgcaagaagatccgaaggcgaatgccagggacagatgctcctgggatcccagctgcactggcctttggaccacaggtatctgacacgctcctagactgcaggaaacacttgacgtgggtcgtggctgtgctgcaggaggtggcagctgctgctgcccagctcattgccccactggcagagaatgaggggctacttgtggctgctctggaggaactggctttcaaagcaagcgagcagatctatgggaccccctccagcagcccctatgagtgtctgcgccagtcatgcaacatcctcatcagtaccatgaacaagctggccacagccatgcaggagggggagtatgatgcagagcggccccccagcaagcctccaccggttgaactgcgggctgctgcccttcgtgcagagatcacagatgctgaaggcctgggtttgaagctcgaagatcgagagacagttattaaggagttgaagaagtcactcaagattaagggagaggagctaagtgaggccaatgtgcggctgagcctcctggagaagaagttggacagtgctgccaaggatgcagatgagcgcatcgagaaagtccagactcggctggaggagacccaggcactgctgcgaaagaaggagaagtcaggcactttccctggggccttgcttcctctaatcctcccactgctggagctctctgcctcctaacccatacccctactcaggttctcttatagtg

SEQ ID NO: 404055 - DNA, 5203 bp, Homo sapiens
agtgactctagagtgatctcccccgactagccctgacagcacacactgcacgtatgtagacatcactcgcaccatgccctgctgccaagagcccgtcggcccaacttatggagcaagtggctcagcttaagtccctgagtgacaccgtcgagaagctcaaggatgaggtcctcaaggagacagtatctcagcgccctggagccacagtacccactgactttgccaccttcccttcatcagccttcctcagggccaaggaggagcagcaggatgacacagtctacatgggcaaagtgaccttctcatgtgcggctggttttggacagcgacaccggctggtgctgacccaggagcagctgcaccagcttcacagtcgcctcatctcctaagcactcctttcccctgctgtccccttcgaccctcagccctctggtgccgctctgcccgatgcacagccacctcagccagcccccaggtagaaacgtgggttaagctcttcctgccccgttcagcttcactcccaccctttcagcgtcctgccccttcaccttgacccgggttcccccactcccattccctggcctctgccataatttgttgttcaactgctccctccttcctgaggggcctcagggcttgtggggggtaggctgagaccccaccaccaaaggttaagtgaggtccccttgattgaggacttcaccccttgattaaagcaacttctgcttcagtgcttcctgtgtggtgttgagagtgggacttgggccattaagctcacagcaggagtggaggagaagcgatgctgaggaagctttggctgtatcaaatttgaggtctcctcttcgtagtgaccagaagaatgctgtttctaaaattcatgtgcacaggcatcccaggatttggaattcagctgtgagctcatgagctgatggatgtttccaggagtaccctgaagaccacccaggtgggagtgtaagataaccttccagataaagagttgctgctaccaaaagagtgctgacaccatcacagtatgttcccttctcaaccctggacatggttcagaaacagctaaagcagacaagaatctggggcagccaatattgtaccacctgccaaagcttggcacaaacaatctggaagccaaaaattgcacatactgtggaacagagcaagtggttctggcctccctgggatttggatcctggtttccagagctaagaacacaaagtcatgaaggtgaaggaggagaaggctggggtaggaaagctggaccacactaaccacaggaggagatttccggatcagaaagaatgccctcctatccacattgggcttccagtacccacttaccctcaaagaaaaactgaccagaagggacatctttcaggcctgcaaaaagtccactggggcctgcggccagaccagccacagcaggaactgactggcccagggagtggggcaagcagccaggacagcagcatggatcttatcagcaggactcggtccccagctgctgagcagctccaggacatcctgggggaggaagatgaggctcccaaccccaccctctttacagagatggatactctgcagcatgacggagaccagatggagtggaaggagtcagccaggtggataaagtttgaagaaaaggtagaggaaggcggcgaacgctggagcaagccccacgtgtccacactatccctgcacagcctcttcgagctccgtacctgcctgcagacggggacggtgctgctggatttggacagtggctccttaccacagatcatagatgatgtcattgagaagcagattgaggatggtctcctgcggccagagctccgggagagggtcagttacgtcctcctgaggaggcaccgccaccaaaccaagaagcccatccaccgctccttagctgacattgggaagtcagtctccaccacaaatcgcagtcctgcccggagccctggtgctggcccgagtctacaccactccacggaagacctgcggatgcggcagagtgcaaattacggacgtctgtgtcatgcccagagcagaagcatgaatgacatttctctcaccccaaacacagaccagcggaaaaacaaattcatgaagaagatccccaaggactcagaagcgtccaacgtgctcgtgggcgaggtggacttcctagaccagccattcatcgcgttcgtgcgcctcatccagtcggccatgctgggaggagtgaccgaggtgcctgtccccaccagatttctgtttatactactgggaccttctgggagagcaaaatcctacaatgaaattggccgtgccattgcaaccctcatggtagatgatctcttcagtgacgtggcctacaaagcccgcaatcgggaagatctgatcgcaggaattgatgaatttctggatgaggtcatcgtccttcctcctggagaatgggacccaaatatccggattgagccccccaagaaggtgccctctgctgacaagaggaaatctgtgttctccctagcagagctgggccagatgaatggctctgtgggaggaggcggcggagctcctggaggaggcaatggaggtggtggtggtggtggcagtggcggcggggctggcagtggcggggccggcggaacaagcagcggggatgatggagagatgccagccatgcatgaaatcggggaggaacttatctggacaggaaggttcttcggtggcctgtgtctggatatcaagaggaagttgccctggttcccaagtgacttctatgatggcttccacattcagtccatctctgccatcctattcatctacctcggctgtatcaccaacgcgatcacctttggtgggcttctgggggatgccaccgacaattatcagggagtgatggagagcttcctgggcactgccatggctggctccttgttctgcctcttctcgggacagcctctcatcattctcagcagcacggggcccatcctcatctttgagaagctcctcttcgacttcagcaaaggcaatggcctggactacatggagttccgcctctggattggcctacactcagctgtccagtgccttatcctagtggccacagatgccagctttatcatcaaatatatcacccgcttcaccgaggagggcttctccacccttatcagcttcatcttcatctacgatgccatcaagaagatgatcggtgccttcaagtactaccctatcaatatggacttcaagccaaacttcatcactacctacaagtgcgagtgtgtcgcccctgacacagtgaatacaaccgtgttcaatgcttcagccccattggcaccagacaccaacgcttctctgtacaacctccttaacctcacagcgttggactggtccctgctgagcaagaaggagtgtctgagctacggcgggcgcctgcttgggaattcctgcaagtttatcccagacctggcgctcatgtccttcatccttttctttgggacatactccatgaccctgaccctgaagaagttcaaattcagccgctattttcctaccaaggtccgggccctggtggctgacttttccattgttttctccatcctgatgttctgtggaatcgatgcctgttttggcctagaaactcccaagctgcatgtgcccagtgtcatcaagccaacgcggcctgaccgaggctggttcgtggccccctttgggaagaacccgtggtgggtatacccagcaagcatcctgcccgccctgctggtgaccatcctgatcttcatggaccagcagatcactgccgtcattgtcaaccggaaggagaacaaactgaagaaggctgccggctaccatctggacctgttctgggtgggcatcctcatggctttgtgctcctttatggggctcccctggtacgtggctgccacggtcatctccatcgcccacatcgacagcctcaagatggagacagagaccagtgcccctggggagcagccccagtttctgggagtcagggaacagagagtaaccggcatcatcgtcttcatcctgacgggaatctctgtcttcctggctcccatcctaaagtgtatccccctgccggtgctgtacggagtcttcctctacatgggcgtggcctccctgaatggcatccagatggggaccggagggtcagaattcaaaatccagaagaagctgactccattctgggaacgctgcaagctcttcctgatgccagccaagcaccagccggaccatgccttcctgcggcacgtgccgctgcgccggatccacctcttcaccctggtgcagatcctctgcctggcggtgctctggatcctcaaatccacggtggctgccatcatcttcccggtcatgatcctgggcctcatcatcgttcgaaggcttctggatttcatcttttcccagcacgacctggcctggattgacaacatcctcccagagaaggaaaaaaaggagacagacaagaagaggaagagaaaaaaaggggcccacgaggactgtgatgaggagccccagttccctcctccctcggttataaagattcccatggaaagtgtccaatcagatccccaaaacggtatccactgcattgccagaaaaagatcttccagttggagttactcactctgattcttccttcagtgacacagaacttgaccgaaggtaagcaggcatggattagagacataagctatacgtcacttacaaaaacatctccagcaaactatctaaacttctttaaactccagagaactatcaaaagaataacgccagctggcagaagaacgaggacggaggtaggtcaactcaattgtttcttctctttctgcctcaagctgcctagagcaggagctacttctgctcgcatgaaagccaaaagccaaaacagacaaacctatccctgcctcaagtattttacagattaagctcctagcttggcacaacctgttgtgatataagactgtaggacaggccaggtgcagtggctcacgcctgtaatcctagcattttgggaggccgaggcaggtggatcacttgaggtcaggagtttgagaccagcctggccaatgtgatgaaaccccatctctactaaaaacacaaaaattagccaggcatggtggcatgcacctgtaatcccagctactcaggaggctgaggcacaagaattgtttgaacccgagaggca

SEQ ID NO: 404056 - DNA, 5206 bp, Homo sapiens
  misc_feature (231)..(231): n is a, c, g, or t
  misc_feature (234)..(234): n is a, c, g, or t
  misc_feature (237)..(238): n is a, c, g, or t
  misc_feature (240)..(240): n is a, c, g, or t
  misc_feature (245)..(248): n is a, c, g, or t
  misc_feature (251)..(251): n is a, c, g, or t
  misc_feature (253)..(253): n is a, c, g, or t
  misc_feature (259)..(259): n is a, c, g, or t
gcggccgcctactactactaaattcgcggccgcgtcgacatctcccagctccagcatgagaacagcatcctcaagggagcccagatgaaggcatccttggcatccctgccccctctgcatgttgcaaagctatcccatgagggccctggcagtgagttaccagctggagcgctgtatcgtaagaccagccagccgcacatgagaaggtcactttgcccatgtagactggtnacntgnngntcccnnnngcncngagganggctgatgaagggaaggtggcaaagtcagtgggtactgtgaccttctcatgtgcggctggttttggacagcgacaccggctggtgctgacccaggagcagctgcaccagcttcacagtcgcctcatctcctaagcactcctttcccctgctgtccccttcgaccctcagccctctggtgccgctctgcccgatgcacagccacctcagccagcccccaggtagaaacgtgggttaagctcttcctgccccgttcagcttcactcccaccctttcagcgtcctgccccttcaccttgacccgggttcccccactcccattccctggcctctgccataatttgttgttcaactgctccctccttcctgaggggcctcagggcttgtggggggtaggctgagaccccaccaccaaaggttaagtgaggtccccttgattgaggacttcaccccttgattaaagcaacttctgcttcagtgcttcctgtgtggtgttgagagtgggacttgggccattaagctcacagcaggagtggaggagaagcgatgctgaggaagctttggctgtatcaaatttgaggtctcctcttcgtagtgaccagaagaatgctgtttctaaaattcatgtgcacaggcatcccaggatttggaattcagctgtgagctcatgagctgatggatgtttccaggagtaccctgaagaccacccaggtgggagtgtaagataaccttccagataaagagttgctgctaccaaaagagtgctgacaccatcacagtatgttcccttctcaaccctggacatggttcagaaacagctaaagcagacaagaatctggggcagccaatattgtaccacctgccaaagcttggcacaaacaatctggaagccaaaaattgcacatactgtggaacagagcaagtggttctggcctccctgggatttggatcctggtttccagagctaagaacacaaagtcatgaaggtgaaggaggagaaggctggggtaggaaagctggaccacactaaccacaggaggagatttccggatcagaaagaatgccctcctatccacattgggcttccagtacccacttaccctcaaagaaaaactgaccagaagggacatctttcaggcctgcaaaaagtccactggggcctgcggccagaccagccacagcaggaactgactggcccagggagtggggcaagcagccaggacagcagcatggatcttatcagcaggactcggtccccagctgctgagcagctccaggacatcctgggggaggaagatgaggctcccaaccccaccctctttacagagatggatactctgcagcatgacggagaccagatggagtggaaggagtcagccaggtggataaagtttgaagaaaaggtagaggaaggcggcgaacgctggagcaagccccacgtgtccacactatccctgcacagcctcttcgagctccgtacctgcctgcagacggggacggtgctgctggatttggacagtggctccttaccacagatcatagatgatgtcattgagaagcagattgaggatggtctcctgcggccagagctccgggagagggtcagttacgtcctcctgaggaggcaccgccaccaaaccaagaagcccatccaccgctccttagctgacattgggaagtcagtctccaccacaaatcgcagtcctgcccggagccctggtgctggcccgagtctacaccactccacggaagacctgcggatgcggcagagtgcaaattacggacgtctgtgtcatgcccagagcagaagcatgaatgacatttctctcaccccaaacacagaccagcggaaaaacaaattcatgaagaagatccccaaggactcagaagcgtccaacgtgctcgtgggcgaggtggacttcctagaccagccattcatcgcgttcgtgcgcctcatccagtcggccatgctgggaggagtgaccgaggtgcctgtccccaccagatttctgtttatactactgggaccttctgggagagcaaaatcctacaatgaaattggccgtgccattgcaaccctcatggtagatgatctcttcagtgacgtggcctacaaagcccgcaatcgggaagatctgatcgcaggaattgatgaatttctggatgaggtcatcgtccttcctcctggagaatgggacccaaatatccggattgagccccccaagaaggtgccctctgctgacaagaggaaatctgtgttctccctagcagagctgggccagatgaatggctctgtgggaggaggcggcggagctcctggaggaggcaatggaggtggtggtggtggtggcagtggcggcggggctggcagtggcggggccggcggaacaagcagcggggatgatggagagatgccagccatgcatgaaatcggggaggaacttatctggacaggaaggttcttcggtggcctgtgtctggatatcaagaggaagttgccctggttcccaagtgacttctatgatggcttccacattcagtccatctctgccatcctattcatctacctcggctgtatcaccaacgcgatcacctttggtgggcttctgggggatgccaccgacaattatcagggagtgatggagagcttcctgggcactgccatggctggctccttgttctgcctcttctcgggacagcctctcatcattctcagcagcacggggcccatcctcatctttgagaagctcctcttcgacttcagcaaaggcaatggcctggactacatggagttccgcctctggattggcctacactcagctgtccagtgccttatcctagtggccacagatgccagctttatcatcaaatatatcacccgcttcaccgaggagggcttctccacccttatcagcttcatcttcatctacgatgccatcaagaagatgatcggtgccttcaagtactaccctatcaatatggacttcaagccaaacttcatcactacctacaagtgcgagtgtgtcgcccctgacacagtgaatacaaccgtgttcaatgcttcagccccattggcaccagacaccaacgcttctctgtacaacctccttaacctcacagcgttggactggtccctgctgagcaagaaggagtgtctgagctacggcgggcgcctgcttgggaattcctgcaagtttatcccagacctggcgctcatgtccttcatccttttctttgggacatactccatgaccctgaccctgaagaagttcaaattcagccgctattttcctaccaaggtccgggccctggtggctgacttttccattgttttctccatcctgatgttctgtggaatcgatgcctgttttggcctagaaactcccaagctgcatgtgcccagtgtcatcaagccaacgcggcctgaccgaggctggttcgtggccccctttgggaagaacccgtggtgggtatacccagcaagcatcctgcccgccctgctggtgaccatcctgatcttcatggaccagcagatcactgccgtcattgtcaaccggaaggagaacaaactgaagaaggctgccggctaccatctggacctgttctgggtgggcatcctcatggctttgtgctcctttatggggctcccctggtacgtggctgccacggtcatctccatcgcccacatcgacagcctcaagatggagacagagaccagtgcccctggggagcagccccagtttctgggagtcagggaacagagagtaaccggcatcatcgtcttcatcctgacgggaatctctgtcttcctggctcccatcctaaagtgtatccccctgccggtgctgtacggagtcttcctctacatgggcgtggcctccctgaatggcatccagatggggaccggagggtcagaattcaaaatccagaagaagctgactccattctgggaacgctgcaagctcttcctgatgccagccaagcaccagccggaccatgccttcctgcggcacgtgccgctgcgccggatccacctcttcaccctggtgcagatcctctgcctggcggtgctctggatcctcaaatccacggtggctgccatcatcttcccggtcatgatcctgggcctcatcatcgttcgaaggcttctggatttcatcttttcccagcacgacctggcctggattgacaacatcctcccagagaaggaaaaaaaggagacagacaagaagaggaagagaaaaaaaggggcccacgaggactgtgatgaggagccccagttccctcctccctcggttataaagattcccatggaaagtgtccaatcagatccccaaaacggtatccactgcattgccagaaaaagatcttccagttggagttactcactctgattcttccttcagtgacacagaacttgaccgaaggtaagcaggcatggattagagacataagctatacgtcacttacaaaaacatctccagcaaactatctaaacttctttaaactccagagaactatcaaaagaataacgccagctggcagaagaacgaggacggaggtaggtcaactcaattgtttcttctctttctgcctcaagctgcctagagcaggagctacttctgctcgcatgaaagccaaaagccaaaacagacaaacctatccctgcctcaagtattttacagattaagctcctagcttggcacaacctgttgtgatataagactgtaggacaggccaggtgcagtggctcacgcctgtaatcctagcattttgggaggccgaggcaggtggatcacttgaggtcaggagtttgagaccagcctggccaatgtgatgaaaccccatctctactaaaaacacaaaaattagccaggcatggtggcatgcacctgtaatcccagctactcaggaggctgaggcacaagaattgtttgaacccgagaggca

SEQ ID NO: 404057 - DNA, 896 bp, Homo sapiens
agattggtactggtggtcgttcttacaagcgtcgatgactggaacaaccctgtgcggtggttcccccaccacagaagctcttcccagcagtgttctttggcttcactgttcagtttgtttgattcacccactctctctcaagtacttgttctgttagagagtcttatacctgcacccctaacccttaatccagtagaactgcctgcctgcgccttggtgggcctcaccagctttctctccccacagctgccaagagcccgtcggcccaacttatggagcaagtggctcagcttaagtccctgagtgacaccgtcgagaagctcaaggatgaggtcctcaaggagacagtatctcagcgccctggagccacagtacccactgactttgccaccttcccttcatcagccttcctcagggccaaggaggagcagcaggatgacacagtctacatgggcaaagtgaccttctcatgtgcggctggttttggacagcgacaccggctggtgctgacccaggagcagctgcaccagcttcacagtcgcctcatctcctaagcactcctttcccctgctgtccccttcgaccctcagccctctggtgccgctctgcccgatgcacagccacctcagccagcccccaggtagaaacgtgggttaagctcttcctgccccgttcagcttcactcccaccctttcagcgtcctgccccttcaccttgacccgggttcccccactcccattccctggcctctgccataatttgttgttcaactgctccctccttcctgaggggcctcagggcttgtggggggtaggctgagaccccaccaccaaaggttaagtgaggtccccttgattgaggacttcaccccttgattaaagcaacttctgcttcag

SEQ ID NO: 404058 - DNA, 1736 bp, Homo sapiens
  misc_feature (1667)..(1667): n is a, c, g, or t
  misc_feature (1684)..(1685): n is a, c, g, or t
  misc_feature (1692)..(1692): n is a, c, g, or t
  misc_feature (1714)..(1714): n is a, c, g, or t
  misc_feature (1727)..(1727): n is a, c, g, or t
tgggcgtcggtcgtcggtggggtcggagctgggcgcggagcccctcacagtgcagacgcccagcggcagcaggatgagtgcggaggcaagcgcccggcctctgcgggtgggctcccgtgtagaggtgattggaaaaggccaccgaggcactgtggcctatgttggagccacactgtttgccactggcaaatgggtaggcgtgattctggatgaagcaaagggcaaaaatgatggaactgttcaaggcaggaagtacttcacttgtgatgaagggcatggcatctttgtgcgccagtcccagatccaggtatttgaagatggagcagatactacttccccagagacacctgattcttctgcttcaaaagtcctcaaaagagagggaactgatacaactgcaaagactagcaaactgcccacgcgcccagccagtactggggtggctggggccagtagctccctgggcccctctggctcagcgtcagcaggtgagctgagcagcagtgagcccagcaccccggctcagactccgctggcagcacccatcatccccacgccggtcctcacctctcctggagcagtccccccgcttccttccccatccaaggaggaggagggactaagggctcaggtgcgggacctggaggagaaactagagaccctgagactgaaacgggcagaagacaaagcaaagctaaaagagctggagaaacacaaaatccagctggagcaggtgcaggaatggaagagcaaaatgcaggagcagcaggccgacctgcagcggcgcctcaaggaggcgagaaaggaagccaaggaggcgctggaggcaaaggaacgctatatggaggagatggctgatactgctgatgccattgagatggccactttggacaaggagatggctgaagagcgggctgagtccctgcagcaggaggtggaggcactgaaggagcgggtggacgagctcactactgacttagagatcctcaaggctgagattgaagagaagggctcagatggcgctgcatccagttatcagctcaagcagcttgaggagcagaatgcccgcctgaaggatgccctggtgaggatgcgggatctttcttcctcagagaagcaggagcatgtgaagctccagaagctcatggaaaagaagaaccaagagctggaagttgtgaggcaacagcgggagcgtctgcaggaggagctaagccaggcagagagcaccattgatgagctcaaggagcaggtggatgctgctctgggtgctgaggagatggtggagatgctgacagatcggaacctgaatctggaagagaaagtgcgcgagttgagggagactgtgggagacttggaagcgatgaatgagatgaacgatgagctgcaggagaatgcacgtgagacagaactggagctgcgggagcagctggacatggcaggcgcgcgggttcgtgaggcccagaagcgtgtggaggcagcccaggagacggttgcagactaccagcagaccatcaagaagtaccgccagctgaccgcccatctacaggatgtgaatcgggaactgacaaaccagcaggaagcatctgtggagaggcaacagcagccacctccagagacctttgacttcaaaatcaagtttgctgagactaaggcccatgccaaggcanttaaatggaattaggcnntgggggnggccagccaattgaaaattttnctttttgaaaacnttttcttta

SEQ ID NO: 404059 - DNA, 1951 bp, Homo sapiens
tgggcgtcggtcgtcggtggggtcggagctgggcgcggagcccctcacagtgcagacgcccagcggcagcaggatgagtgcggaggcaagcgcccggcctctgcgggtgggctcccgtgtagaggtgattggaaaaggccaccgaggcactgtggcctatgttggagccacactgtttgccactggcaaatgggtaggcgtgattctggatgaagcaaagggcaaaaatgatggaactgttcaaggcaggaagtacttcacttgtgatgaagggcatggcatctttgtgcgccagtcccagatccaggtatttgaagatggagcagatactacttccccagagacacctgattcttctgcttcaaaagtcctcaaaagagagggaactgatacaactgcaaagactagcaaactgcccacgcgcccagccagtactggggtggctggggccagtagctccctgggcccctctggctcagcgtcagcaggtgagctgagcagcagtgagcccagcaccccggctcagactccgctggcagcacccatcatccccacgccggtcctcacctctcctggagcagtccccccgcttccttccccatccaaggaggaggagggactaagggctcaggtgcgggacctggaggagaaactagagaccctgagactgaaacgggcagaagacaaagcaaagctaaaagagctggagaaacacaaaatccagctggagcaggtgcaggaatggaagagcaaaatgcaggagcagcaggccgacctgcagcggcgcctcaaggaggcgagaaaggaagccaaggaggcgctggaggcaaaggaacgctatatggaggagatggctgatactgctgatgccattgagatggccactttggacaaggagatggctgaagagcgggctgagtccctgcagcaggaggtggaggcactgaaggagcgggtggacgagctcactactgacttagagatcctcaaggctgagattgaagagaagggctcagatggcgctgcatccagttatcagctcaagcagcttgaggagcagaatgcccgcctgaaggatgccctggtgaggatgcgggatctttcttcctcagagaagcaggagcatgtgaagctccagaagctcatggaaaagaagaaccaagagctggaagttgtgaggcaacagcgggagcgtctgcaggaggagctaagccaggcagagagcaccattgatgagctcaaggagcaggtggatgctgctctgggtgctgaggagatggtggagatgctgacagatcggaacctgaatctggaagagaaagtgcgcgagttgagggagactgtgggagacttggaagcgatgaatgagatgaacgatgagctgcaggagaatgcacgtgagacagaactggagctgcgggagcagctggacatggcaggcgcgcgggttcgtgaggcccagaagcgtgtggaggcagcccaggagacggttgcagactaccagcagaccatcaagaagtaccgccagctgaccgcccatctacaggatgtgaatcgggaactgacaaaccagcaggaagcatctgtggagaggcaacagcagccacctccagagacctttgacttcaaaatcaagtttgctgagactaaggcccatgccaaggcaattgagatggaattgaggcagatggaggtggcccaggccaatcgacacatgtccctgctgacagccttcatgcctgacagcttccttcggccaggtggggaccatgactgcgttctggtgctgttgctcatgcctcgtctcatttgcaaggtatggccaatcaatcacatgttccacagaaatctagtgaacttgccatgaaccaggcattgaagatgctgagtgaagacaacagagtctctgcccacaaagagtttatggtatagtggaggaacacagcaaagt

SEQ ID NO: 404060 - DNA, 1143 bp, Homo sapiens
  misc_feature (65)..(65): n is a, c, g, or t
aagtaacaatgtaaaaaaatcacaatccaaaacataagtccaatataaagtttggagcagtttgnaggtcctctaagcccttgaaccaggtcaatgcaaactaagagtttggggggaagaaggcaggtcaggagcatttctcagagtaattaatcaacagggtgacattcgtggagcaccagccggaccatgccttcctgcggcacgtgccgctgcgccggatccacctcttcaccctggtgcagatcctctgcctggcggtgctctggatcctcaaatccacggtggctgccatcatcttcccggtcatgatcctgggcctcatcatcgttcgaaggcttctggatttcatcttttcccagcacgacctggcctggattgacaacatcctcccagagaaggaaaaaaaggagacagacaagaagaggaagagaaaaaaaggggcccacgaggactgtgatgaggagccccagttccctcctccctcggttataaagattcccatggaaagtgtccaatcagatccccaaaacggtatccactgcattgccagaaaaagatcttccagttggagttactcactctgattcttccttcagtgacacagaacttgaccgaaggtaagcaggcatggattagagacataagctatacgtcacttacaaaaacatctccagcaaactatctaaacttctttaaactccagagaactatcaaaagaataacgccagctggcagaagaacgaggacggaggtaggtcaactcaattgtttcttctctttctgcctcaagctgcctagagcaggagctacttctgctcgcatgaaagccaaaagccaaaacagacaaacctatccctgcctcaagtattttacagattaagctcctagcttggcacaacctgttgtgatataagactgtaggacaggccaggtgcagtggctcacgcctgtaatcctagcattttgggaggccgaggcaggtggatcacttgaggtcaggagtttgagaccagcctggccaatgtgatgaaaccccatctctactaaaaacacaaaaattagccaggcatggtggcatgcacctgtaatcccagctactcaggaggctgaggcacaagaattgtttgaacccgagaggca

SEQ ID NO: 404061 - DNA, 639 bp, Homo sapiens
acggagtcttcctctacatgggcgtggcctccctgaatggcatccaggtaaggctttccctccagatcccttcatgatctggagtcaacattccatgtctggttccatgtcaccaagacccccaattcagttgtcccaattgtccccaattgtcctaattcaatgaaagaataatagtaataatgatactaccacttactgatgctatcaggcaaaataaatatgttaggcacttcataggcctcatataattgaatctatgtaattaggtcctctgatccccattttacagatggggaccggagggtcagaattcaaaatccagaagaagctgactccagtgagcatttcactgtacctctctctcttccctaaggcagctatgcagaagaaaacatttttgttttgttctgtatttactgtgaaatcccagaattcttaaacagtttgtgttacaattaacttgcactttccctgaatatggacaatgtccattttgtggccagctccagggctcctcccctcacccagggctcaggaccctttctctaagaccccattatgcatccgcctagacacctccagcccccctcccgtgcatccttaaggcctgagcagggggcttcccctctctgagac

SEQ ID NO: 404062 - DNA, 237 bp, Homo sapiens
tgaataaaactgccccctccacttggcccagggatttagcccctgctcaggtggttcccccaccacagaagctcttcccagcagtgttctttggcttcactgttcagtttgtttgattcacccactctctctcaagtacttgttctgttagagagtcttatacctgcacccctaacccttaatccagtagaactgcctgcctgcgccttggtgggcctcaccagctttctctcccca

SEQ ID NO: 404063 - DNA, 543 bp, Homo sapiens
cttgcagagctactgctagttgtgggaggacggggagacaggaggaaggcatctggagagcaccatcctgcctagaaggcagggttttccctgtaactggatctctctgtaaggagcacagtgatgatctcttctctccaccctcactttctcaccccctaccgaccattccttagcctccaccggttgaactgcgggctgctgcccttcgtgcagagatcacagatgctgaaggcctgggtttgaagctcgaagatcgagagacagttattaaggagttgaagaagtcactcaagattaagggagaggagctaagtgaggccaatgtgcggctgagcctcctggagaagaagttggacagtgctgccaaggatgcagatgagcgcatcgagaaagtccagactcggctggaggagacccaggcactgctgcgaaagaaggagaagtcaggcactttccctggggccttgcttcctctaatcctcccactgctggagctctctgcctcctaacccatacccctactcaggttctcttatagtg

SEQ ID NO: 404064 - DNA, 4971 bp, Homo sapiens
  misc_feature (4178)..(4178): n is a, c, g, or t
  misc_feature (4180)..(4180): n is a, c, g, or t
tgggcgtcggtcgtcggtggggtcggagctgggcgcggagcccctcacagtgcagacgcccagcggcagcaggatgagtgcggaggcaagcgcccggcctctgcgggtgggctcccgtgtagaggtgattggaaaaggccaccgaggcactgtggcctatgttggagccacactgtttgccactggcaaatgggtaggcgtgattctggatgaagcaaagggcaaaaatgatggaactgttcaaggcaggaagtacttcacttgtgatgaagggcatggcatctttgtgcgccagtcccagatccaggtatttgaagatggagcagatactacttccccagagacacctgattcttctgcttcaaaagtcctcaaaagagagggaactgatacaactgcaaagactagcaaactgcccacgcgcccagccagtactggggtggctggggccagtagctccctgggcccctctggctcagcgtcagcaggtgagctgagcagcagtgagcccagcaccccggctcagactccgctggcagcacccatcatccccacgccggtcctcacctctcctggagcagtccccccgcttccttccccatccaaggaggaggagggactaagggctcaggtgcgggacctggaggagaaactagagaccctgagactgaaacgggcagaagacaaagcaaagctaaaagagctggagaaacacaaaatccagctggagcaggtgcaggaatggaagagcaaaatgcaggagcagcaggccgacctgcagcggcgcctcaaggaggcgagaaaggaagccaaggaggcgctggaggcaaaggaacgctatatggaggagatggctgatactgctgatgccattgagatggccactttggacaaggagatggctgaagagcgggctgagtccctgcagcaggaggtggaggcactgaaggagcgggtggacgagctcactactgacttagagatcctcaaggctgagattgaagagaagggctcagatggcgctgcatccagttatcagctcaagcagcttgaggagcagaatgcccgcctgaaggatgccctggtgaggatgcgggatctttcttcctcagagaagcaggagcatgtgaagctccagaagctcatggaaaagaagaaccaagagctggaagttgtgaggcaacagcgggagcgtctgcaggaggagctaagccaggcagagagcaccattgatgagctcaaggagcaggtggatgctgctctgggtgctgaggagatggtggagatgctgacagatcggaacctgaatctggaagagaaagtgcgcgagttgagggagactgtgggagacttggaagcgatgaatgagatgaacgatgagctgcaggagaatgcacgtgagacagaactggagctgcgggagcagctggacatggcaggcgcgcgggttcgtgaggcccagaagcgtgtggaggcagcccaggagacggttgcagactaccagcagaccatcaagaagtaccgccagctgaccgcccatctacaggatgtgaatcgggaactgacaaaccagcaggaagcatctgtggagaggcaacagcagccacctccagagacctttgacttcaaaatcaagtttgctgagactaaggcccatgccaaggcaattgagatggaattgaggcagatggaggtggcccaggccaatcgacacatgtccctgctgacagccttcatgcctgacagcttccttcggccaggtggggaccatgactgcgttctggtgctgttgctcatgcctcgtctcatttgcaaggcagagctgatccggaagcaggcccaggagaagtttgaactaagtgagaactgttcagagcggcctgggctgcgaggagctgctggggagcaactcagctttgctgctggactggtgtactcgctgagcctgctgcaggccacgctacaccgctatgagcatgccctctctcagtgcagtgtggatgtgtataagaaagtgggcagcctgtaccctgagatgagtgcccatgagcgctccttggatttcctcattgaactgctgcacaaggatcagctggatgagactgtcaatgtggagcctctcaccaaggccatcaagtactatcagcatctgtacagcatccaccttgccgaacagcctgaggactgtactatgcagctggctgaccacattaagttcacgcagagtgctctggactgcatgagtgtggaggtaggacggctgcgtgccttcttgcagggtgggcaggaggctacagatattgccctcctgctccgggatctggaaacttcatgcagtgacatccgccagttctgcaagaagatccgaaggcgaatgccagggacagatgctcctgggatcccagctgcactggcctttggaccacaggtatctgacacgctcctagactgcaggaaacacttgacgtgggtcgtggctgtgctgcaggaggtggcagctgctgctgcccagctcattgccccactggcagagaatgaggggctacttgtggctgctctggaggaactggctttcaaagcaagcgagcagatctatgggaccccctccagcagcccctatgagtgtctgcgccagtcatgcaacatcctcatcagtaccatgaacaagctggccacagccatgcaggagggggagtatgatgcagagcggccccccagcaagcctccaccggttgaactgcgggctgctgcccttcgtgcagagatcacagatgctgaaggcctgggtttgaagctcgaagatcgagagacagttattaaggagttgaagaagtcactcaagattaagggagaggagctaagtgaggccaatgtgcggctgagcctcctggagaagaagttggacagtgctgccaaggatgcagatgagcgcatcgagaaagtccagactcggctggaggagacccaggcactgctgcgaaagaaggagaaagagtttgaggagacaatggatgcactccaggctgacatcgaccagctggaggcagagaaggcagaactaaagcagcgtctgaacagccagtccaaacgcacgattgagggactccggggccctcctccttcaggcattgctactctggtctctggcattgctggtggagccatccctgggcaggctccagggtctgtgccaggcccagggctggtgaaggactcaccactgctgcttcagcagatctctgccatgaggctgcacatctcccagctccagcatgagaacagcatcctcaagggagcccagatgaaggcatccttggcatccctgccccctctgcatgttgcaaagctatcccatgagggccctggcagtgagttaccagctggagcgctgtatcgtaagaccagccagctgctggagacattgaatcaattgagcacacacacgcacgtagtagacatcactcgcaccagccctgctgccaagagcccgtcggcccaacttatggagcaagtggctcagcttaagtccctgagtgacaccgtcgagaagctcaaggatgaggtcctcaaggagacagtatctcagcgccctggagccacagtacccactgactttgccaccttcccttcatcagccttcctcagggccaaggaggagcagcaggatgacacagtctacatgggcaaagtgaccttctcatgtgcggctggttttggacagcgacaccggctggtgctgacccaggagcagctgcaccagcttcacagtcgcctcatctcctaagcactcctttcccctgctgtccccttcgaccctcagccctctggtgccgctctgcccgatgcacagccacctcagccagcccccaggtagaaacgtgggttaagctcttcctgccccgttcagcttcactcccaccctttcagcgtcctgccccttcaccttgacccgggttcccccactcccattccctggcctctgccataatttgttgttcaactgctccctccttcctgaggggcctcagggcttgtggggggtaggctgagaccccaccaccaaaggttaagtgaggtccccttgattgaggacttcaccccttgattaaagcaacttctgcttcagtgaaaaaaaaaaaaaaaaaaaaaaaaaaaaaaaaaaaaaaaaaaaaaaaaananaaaaaaaaaaaaaaaaaaaaaaaaaaaaaaaacaaaacaacaaaaaaaaaaaaaagaaaaacagaaaagaaaagaaagacagacaaaagaataagaagagagatgaagaaaaccgacaacgaaggggggagaccgagagaacaaatgatagggggaggaagcggggcggagaaaggagagacggggggagagcgacgggaggaagaaggcgacagacaatagtcgcgcgggagcgacgacgctgcagggagtaagggcagagaagaaggagggacgaggcgacaaggaatctgcagacaggggaacgcgggacgggcgggagagcagagagaggaagacgacgagacaggggcagacgacgagggggggggcggaggcagggggggagcgcagcgggcagccgcaggggggagcgagggaagacacagagcaaagacgaggacgaaggcgggagggaagggcaggcagacggcgggggaaagagagaaggagaagagcagagggcgggcggggaagcgagagagagaagcagagacaacagaaagacggcggcgacaccgccggcagaacagggagggacacagaagcaagagacaccagacccagcacggagagcagagaacgaaacgggccaagaccagcacaaggcgaaagggagacaagggcacgaaagcaggaggacggaggagggagaagggggaggggacagcagcgggccgggaggagcgggcgggggacgagagagagagagcacgacacggagagcacagaagaacgaaacaaccagagcg

SEQ ID NO: 404065 - DNA, 8761 bp, Homo sapiens
tgggcgtcggtcgtcggtggggtcggagctgggcgcggagcccctcacagtgcagacgcccagcggcagcaggatgagtgcggaggcaagcgcccggcctctgcgggtgggctcccgtgtagaggtgattggaaaaggccaccgaggcactgtggcctatgttggagccacactgtttgccactggcaaatgggtaggcgtgattctggatgaagcaaagggcaaaaatgatggaactgttcaaggcaggaagtacttcacttgtgatgaagggcatggcatctttgtgcgccagtcccagatccaggtatttgaagatggagcagatactacttccccagagacacctgattcttctgcttcaaaagtcctcaaaagagagggaactgatacaactgcaaagactagcaaactgcccacgcgcccagccagtactggggtggctggggccagtagctccctgggcccctctggctcagcgtcagcaggtgagctgagcagcagtgagcccagcaccccggctcagactccgctggcagcacccatcatccccacgccggtcctcacctctcctggagcagtccccccgcttccttccccatccaaggaggaggagggactaagggctcaggtgcgggacctggaggagaaactagagaccctgagactgaaacgggcagaagacaaagcaaagctaaaagagctggagaaacacaaaatccagctggagcaggtgcaggaatggaagagcaaaatgcaggagcagcaggccgacctgcagcggcgcctcaaggaggcgagaaaggaagccaaggaggcgctggaggcaaaggaacgctatatggaggagatggctgatactgctgatgccattgagatggccactttggacaaggagatggctgaagagcgggctgagtccctgcagcaggaggtggaggcactgaaggagcgggtggacgagctcactactgacttagagatcctcaaggctgagattgaagagaagggctcagatggcgctgcatccagttatcagctcaagcagcttgaggagcagaatgcccgcctgaaggatgccctggtgaggatgcgggatctttcttcctcagagaagcaggagcatgtgaagctccagaagctcatggaaaagaagaaccaagagctggaagttgtgaggcaacagcgggagcgtctgcaggaggagctaagccaggcagagagcaccattgatgagctcaaggagcaggtggatgctgctctgggtgctgaggagatggtggagatgctgacagatcggaacctgaatctggaagagaaagtgcgcgacaccatacccagctaatttttgtatttttagtagagatggggtttcaccatgttggccagcatgatctcgatctcgacctcatgatccgcctgctttgacctcccaaagtgctgggattacaggtgtgaaccaccgccgctggccgaccctgcctttctttagcccaaactatggtgtggtgtcctaggaagcgatgaatgagatgaacgatgagctgcaggagaatgcacgtgagacagaactggagctgcgggagcagctggacatggcaggcgcgcgggttcgtgaggcccagaagcgtgtggaggcagcccaggagacggttgcagactaccagcagaccatcaagaagtaccgccagctgaccgcccatctacaggatgtgaatcgggaactgacaaaccagcaggaagcatctgtggagaggcaacagcagccacctccagagacctttgacttcaaaatcaagtttgctgagactaaggcccatgccaaggcaattgagatggaattgaggcagatggaggtggcccaggccaatcgacacatgtccctgctgacagccttcatgcctgacagcttccttcggccaggtggggaccatgactgcgttctggtgctgttgctcatgcctcgtctcatttgcaaggcagagctgatccggaagcaggcccaggagaagtttgaactaagtgagaactgttcagagcggcctgggctgcgaggagctgctggggagcaactcagctttgctgctggactggtgtactcgctgagcctgctgcaggccacgctacaccgctatgagcatgccctctctcagtgcagtgtggatgtgtataagaaagtgggcagcctgtaccctgagatgagtgcccatgagcgctccttggatttcctcattgaactgctgcacaaggatcagctggatgagactgtcaatgtggagcctctcaccaaggccatcaagtactatcagcatctgtacagcatccaccttgccgaacagcctgaggactgtactatgcagctggctgaccacattaagttcacgcagagtgctctggactgcatgagtgtggaggtaggacggctgcgtgccttcttgcagggtgggcaggaggctacagatattgccctcctgctccgggatctggaaacttcatgcagtgacatccgccagttctgcaagaagatccgaaggcgaatgccagggacagatgctcctgggatcccagctgcactggcctttggaccacaggtatctgacacgctcctagactgcaggaaacacttgacgtgggtcgtggctgtgctgcaggaggtggcagctgctgctgcccagctcattgccccactggcagagaatgaggggctacttgtggctgctctggaggaactggctttcaaagcaagcgagcagatctatgggaccccctccagcagcccctatgagtgtctgcgccagtcatgcaacatcctcatcagtaccatgaacaagctggccacagccatgcaggagggggagtatgatgcagagcggccccccagcaagcctccaccggttgaactgcgggctgctgcccttcgtgcagagatcacagatgctgaaggcctgggtttgaagctcgaagatcgagagacagttattaaggagttgaagaagtcactcaagattaagggagaggagctaagtgaggccaatgtgcggctgagcctcctggagaagaagttggacagtgctgccaaggatgcagatgagcgcatcgagaaagtccagactcggctggaggagacccaggcactgctgcgaaagaaggagaaagagtttgaggagacaatggatgcactccaggctgacatcgaccagctggaggcagagaaggcagaactaaagcagcgtctgaacagccagtccaaacgcacgattgagggactccggggccctcctccttcaggcattgctactctggtctctggcattgctggtggagccatccctgggcaggctccagggtctgtgccaggcccagggctggtgaaggactcaccactgctgcttcagcagatctctgccatgaggctgcacatctcccagctccagcatgagaacagcatcctcaagggagcccagatgaaggcatccttggcatccctgccccctctgcatgttgcaaagctatcccatgagggccctggcagtgagttaccagctggagcgctgtatcgtaagaccagccagctgctggagacattgaatcaattgagcacacacacgcacgtagtagacatcactcgcaccagccctgctgccaagagcccgtcggcccaacttatggagcaagtggctcagcttaagtccctgagtgacaccgtcgagaagctcaaggatgaggtcctcaaggagacagtatctcagcgccctggagccacagtacccactgactttgccaccttcccttcatcagccttcctcagggccaaggaggagcagcaggatgacacagtctacatgggcaaagtgaccttctcatgtgcggctggttttggacagcgacaccggctggtgctgacccaggagcagctgcaccagcttcacagtcgcctcatctcctaagcactcctttcccctgctgtccccttcgaccctcagccctctggtgccgctctgcccgatgcacagccacctcagccagcccccaggtagaaacgtgggttaagctcttcctgccccgttcagcttcactcccaccctttcagcgtcctgccccttcaccttgacccgggttcccccactcccattccctggcctctgccataatttgttgttcaactgctccctccttcctgaggggcctcagggcttgtggggggtaggctgagaccccaccaccaaaggttaagtgaggtccccttgattgaggacttcaccccttgattaaagcaacttctgcttcagtgcttcctgtgtggtgttgagagtgggacttgggccattaagctcacagcaggagtggaggagaagcgatgctgaggaagctttggctgtatcaaatttgaggtctcctcttcgtagtgaccagaagaatgctgtttctaaaattcatgtgcacaggcatcccaggatttggaattcagctgtgagctcatgagctgatggatgtttccaggagtaccctgaagaccacccaggtgggagtgtaagataaccttccagataaagagttgctgctaccaaaagagtgctgacaccatcacagtatgttcccttctcaaccctggacatggttcagaaacagctaaagcagacaagaatctggggcagccaatattgtaccacctgccaaagcttggcacaaacaatctggaagccaaaaattgcacatactgtggaacagagcaagtggttctggcctccctgggatttggatcctggtttccagagctaagaacacaaagtcatgaaggtgaaggaggagaaggctggggtaggaaagctggaccacactaaccacaggaggagatttccggatcagaaagaatgccctcctatccacattgggcttccagtacccacttaccctcaaagaaaaactgaccagaagggacatctttcaggcctgcaaaaagtccactggggcctgcggccagaccagccacagcaggaactgactggcccagggagtggggcaagcagccaggacagcagcatggatcttatcagcaggactcggtccccagctgctgagcagctccaggacatcctgggggaggaagatgaggctcccaaccccaccctctttacagagatggatactctgcagcatgacggagaccagatggagtggaaggagtcagccaggtggataaagtttgaagaaaaggtagaggaaggcggcgaacgctggagcaagccccacgtgtccacactatccctgcacagcctcttcgagctccgtacctgcctgcagacggggacggtgctgctggatttggacagtggctccttaccacagatcatagatgatgtcattgagaagcagattgaggatggtctcctgcggccagagctccgggagagggtcagttacgtcctcctgaggaggcaccgccaccaaaccaagaagcccatccaccgctccttagctgacattgggaagtcagtctccaccacaaatcgcagtcctgcccggagccctggtgctggcccgagtctacaccactccacggaagacctgcggatgcggcagagtgcaaattacggacgtctgtgtcatgcccagagcagaagcatgaatgacatttctctcaccccaaacacagaccagcggaaaaacaaattcatgaagaagatccccaaggactcagaagcgtccaacgtgctcgtgggcgaggtggacttcctagaccagccattcatcgcgttcgtgcgcctcatccagtcggccatgctgggaggagtgaccgaggtgcctgtccccaccagatttctgtttatactactgggaccttctgggagagcaaaatcctacaatgaaattggccgtgccattgcaaccctcatggtagatgatctcttcagtgacgtggcctacaaagcccgcaatcgggaagatctgatcgcaggaattgatgaatttctggatgaggtcatcgtccttcctcctggagaatgggacccaaatatccggattgagccccccaagaaggtgccctctgctgacaagaggaaatctgtgttctccctagcagagctgggccagatgaatggctctgtgggaggaggcggcggagctcctggaggaggcaatggaggtggtggtggtggtggcagtggcggcggggctggcagtggcggggccggcggaacaagcagcggggatgatggagagatgccagccatgcatgaaatcggggaggaacttatctggacaggaaggttcttcggtggcctgtgtctggatatcaagaggaagttgccctggttcccaagtgacttctatgatggcttccacattcagtccatctctgccatcctattcatctacctcggctgtatcaccaacgcgatcacctttggtgggcttctgggggatgccaccgacaattatcagggagtgatggagagcttcctgggcactgccatggctggctccttgttctgcctcttctcgggacagcctctcatcattctcagcagcacggggcccatcctcatctttgagaagctcctcttcgacttcagcaaaggcaatggcctggactacatggagttccgcctctggattggcctacactcagctgtccagtgccttatcctagtggccacagatgccagctttatcatcaaatatatcacccgcttcaccgaggagggcttctccacccttatcagcttcatcttcatctacgatgccatcaagaagatgatcggtgccttcaagtactaccctatcaatatggacttcaagccaaacttcatcactacctacaagtgcgagtgtgtcgcccctgacacagtgaatacaaccgtgttcaatgcttcagccccattggcaccagacaccaacgcttctctgtacaacctccttaacctcacagcgttggactggtccctgctgagcaagaaggagtgtctgagctacggcgggcgcctgcttgggaattcctgcaagtttatcccagacctggcgctcatgtccttcatccttttctttgggacatactccatgaccctgaccctgaagaagttcaaattcagccgctattttcctaccaaggtccgggccctggtggctgacttttccattgttttctccatcctgatgttctgtggaatcgatgcctgttttggcctagaaactcccaagctgcatgtgcccagtgtcatcaagccaacgcggcctgaccgaggctggttcgtggccccctttgggaagaacccgtggtgggtatacccagcaagcatcctgcccgccctgctggtgaccatcctgatcttcatggaccagcagatcactgccgtcattgtcaaccggaaggagaacaaactgaagaaggctgccggctaccatctggacctgttctgggtgggcatcctcatggctttgtgctcctttatggggctcccctggtacgtggctgccacggtcatctccatcgcccacatcgacagcctcaagatggagacagagaccagtgcccctggggagcagccccagtttctgggagtcagggaacagagagtaaccggcatcatcgtcttcatcctgacgggaatctctgtcttcctggctcccatcctaaagtgtatccccctgccggtgctgtacggagtcttcctctacatgggcgtggcctccctgaatggcatccagatggggaccggagggtcagaattcaaaatccagaagaagctgactccattctgggaacgctgcaagctcttcctgatgccagccaagcaccagccggaccatgccttcctgcggcacgtgccgctgcgccggatccacctcttcaccctggtgcagatcctctgcctggcggtgctctggatcctcaaatccacggtggctgccatcatcttcccggtcatgatcctgggcctcatcatcgttcgaaggcttctggatttcatcttttcccagcacgacctggcctggattgacaacatcctcccagagaaggaaaaaaaggagacagacaagaagaggaagagaaaaaaaggggcccacgaggactgtgatgaggagccccagttccctcctccctcggttataaagattcccatggaaagtgtccaatcagatccccaaaacggtatccactgcattgccagaaaaagatcttccagttggagttactcactctgattcttccttcagtgacacagaacttgaccgaaggtaagcaggcatggattagagacataagctatacgtcacttacaaaaacatctccagcaaactatctaaacttctttaaactccagagaactatcaaaagaataacgccagctggcagaagaacgaggacggaggtaggtcaactcaattgtttcttctctttctgcctcaagctgcctagagcaggagctacttctgctcgcatgaaagccaaaagccaaaacagacaaacctatccctgcctcaagtattttacagattaagctcctagcttggcacaacctgttgtgatataagactgtaggacaggccaggtgcagtggctcacgcctgtaatcctagcattttgggaggccgaggcaggtggatcacttgaggtcaggagtttgagaccagcctggccaatgtgatgaaaccccatctctactaaaaacacaaaaattagccaggcatggtggcatgcacctgtaatcccagctactcaggaggctgaggcacaagaattgtttgaacccgagaggca

SEQ ID NO: 404066 - DNA, 7419 bp, Homo sapiens
tcagctggtcccaccgcggttatgggatatcgtcgacccacggcctcgattgatgagctcgaacgagcaggtggatgctgctctgggtgctgaggagatggtggagatgctgacagatcggaacctgaatctggaagagaaagtgcgcgagttgagggagactgtgggagacttggaagcgatgaatgagatgaacgatgagctgcaggagaatgcacgtgagacagaactggagctgcgggagcagctggacatggcaggcgcgcgggttcgtgaggcccagaagcgtgtggaggcagcccaggagacggttgcagactaccagcagaccatcaagaagtaccgccagctgaccgcccatctacaggatgtgaatcgggaactgacaaaccagcaggaagcatctgtggagaggcaacagcagccacctccagagacctttgacttcaaaatcaagtttgctgagactaaggcccatgccaaggcaattgagatggaattgaggcagatggaggtggcccaggccaatcgacacatgtccctgctgacagccttcatgcctgacagcttccttcggccaggtggggaccatgactgcgttctggtgctgttgctcatgcctcgtctcatttgcaaggcagagctgatccggaagcaggcccaggagaagtttgaactaagtgagaactgttcagagcggcctgggctgcgaggagctgctggggagcaactcagctttgctgctggactggtgtactcgctgagcctgctgcaggccacgctacaccgctatgagcatgccctctctcagtgcagtgtggatgtgtataagaaagtgggcagcctgtaccctgagatgagtgcccatgagcgctccttggatttcctcattgaactgctgcacaaggatcagctggatgagactgtcaatgtggagcctctcaccaaggccatcaagtactatcagcatctgtacagcatccaccttgccgaacagcctgaggactgtactatgcagctggctgaccacattaagttcacgcagagtgctctggactgcatgagtgtggaggtaggacggctgcgtgccttcttgcagggtgggcaggaggctacagatattgccctcctgctccgggatctggaaacttcatgcagtgacatccgccagttctgcaagaagatccgaaggcgaatgccagggacagatgctcctgggatcccagctgcactggcctttggaccacaggtatctgacacgctcctagactgcaggaaacacttgacgtgggtcgtggctgtgctgcaggaggtggcagctgctgctgcccagctcattgccccactggcagagaatgaggggctacttgtggctgctctggaggaactggctttcaaagcaagcgagcagatctatgggaccccctccagcagcccctatgagtgtctgcgccagtcatgcaacatcctcatcagtaccatgaacaagctggccacagccatgcaggagggggagtatgatgcagagcggccccccagcaagcctccaccggttgaactgcgggctgctgcccttcgtgcagagatcacagatgctgaaggcctgggtttgaagctcgaagatcgagagacagttattaaggagttgaagaagtcactcaagattaagggagaggagctaagtgaggccaatgtgcggctgagcctcctggagaagaagttggacagtgctgccaaggatgcagatgagcgcatcgagaaagtccagactcggctggaggagacccaggcactgctgcgaaagaaggagaaagagtttgaggagacaatggatgcactccaggctgacatcgaccagctggaggcagagaaggcagaactaaagcagcgtctgaacagccagtccaaacgcacgattgagggactccggggccctcctccttcaggcattgctactctggtctctggcattgctggtggagccatccctgggcaggctccagggtctgtgccaggcccagggctggtgaaggactcaccactgctgcttcagcagatctctgccatgaggctgcacatctcccagctccagcatgagaacagcatcctcaagggagcccagatgaaggcatccttggcatccctgccccctctgcatgttgcaaagctatcccatgagggccctggcagtgagttaccagctggagcgctgtatcgtaagaccagccagctgctggagacattgaatcaattgagcacacacacgcacgtagtagacatcactcgcaccagccctgctgccaagagcccgtcggcccaacttatggagcaagtggctcagcttaagtccctgagtgacaccgtcgagaagctcaaggatgaggtcctcaaggagacagtatctcagcgccctggagccacagtacccactgactttgccaccttcccttcatcagccttcctcagggccaaggaggagcagcaggatgacacagtctacatgggcaaagtgaccttctcatgtgcggctggttttggacagcgacaccggctggtgctgacccaggagcagctgcaccagcttcacagtcgcctcatctcctaagcactcctttcccctgctgtccccttcgaccctcagccctctggtgccgctctgcccgatgcacagccacctcagccagcccccaggtagaaacgtgggttaagctcttcctgccccgttcagcttcactcccaccctttcagcgtcctgccccttcaccttgacccgggttcccccactcccattccctggcctctgccataatttgttgttcaactgctccctccttcctgaggggcctcagggcttgtggggggtaggctgagaccccaccaccaaaggttaagtgaggtccccttgattgaggacttcaccccttgattaaagcaacttctgcttcagtgcttcctgtgtggtgttgagagtgggacttgggccattaagctcacagcaggagtggaggagaagcgatgctgaggaagctttggctgtatcaaatttgaggtctcctcttcgtagtgaccagaagaatgctgtttctaaaattcatgtgcacaggcatcccaggatttggaattcagctgtgagctcatgagctgatggatgtttccaggagtaccctgaagaccacccaggtgggagtgtaagataaccttccagataaagagttgctgctaccaaaagagtgctgacaccatcacagtatgttcccttctcaaccctggacatggttcagaaacagctaaagcagacaagaatctggggcagccaatattgtaccacctgccaaagcttggcacaaacaatctggaagccaaaaattgcacatactgtggaacagagcaagtggttctggcctccctgggatttggatcctggtttccagagctaagaacacaaagtcatgaaggtgaaggaggagaaggctggggtaggaaagctggaccacactaaccacaggaggagatttccggatcagaaagaatgccctcctatccacattgggcttccagtacccacttaccctcaaagaaaaactgaccagaagggacatctttcaggcctgcaaaaagtccactggggcctgcggccagaccagccacagcaggaactgactggcccagggagtggggcaagcagccaggacagcagcatggatcttatcagcaggactcggtccccagctgctgagcagctccaggacatcctgggggaggaagatgaggctcccaaccccaccctctttacagagatggatactctgcagcatgacggagaccagatggagtggaaggagtcagccaggtggataaagtttgaagaaaaggtagaggaaggcggcgaacgctggagcaagccccacgtgtccacactatccctgcacagcctcttcgagctccgtacctgcctgcagacggggacggtgctgctggatttggacagtggctccttaccacagatcatagatgatgtcattgagaagcagattgaggatggtctcctgcggccagagctccgggagagggtcagttacgtcctcctgaggaggcaccgccaccaaaccaagaagcccatccaccgctccttagctgacattgggaagtcagtctccaccacaaatcgcagtcctgcccggagccctggtgctggcccgagtctacaccactccacggaagacctgcggatgcggcagagtgcaaattacggacgtctgtgtcatgcccagagcagaagcatgaatgacatttctctcaccccaaacacagaccagcggaaaaacaaattcatgaagaagatccccaaggactcagaagcgtccaacgtgctcgtgggcgaggtggacttcctagaccagccattcatcgcgttcgtgcgcctcatccagtcggccatgctgggaggagtgaccgaggtgcctgtccccaccagatttctgtttatactactgggaccttctgggagagcaaaatcctacaatgaaattggccgtgccattgcaaccctcatggtagatgatctcttcagtgacgtggcctacaaagcccgcaatcgggaagatctgatcgcaggaattgatgaatttctggatgaggtcatcgtccttcctcctggagaatgggacccaaatatccggattgagccccccaagaaggtgccctctgctgacaagaggaaatctgtgttctccctagcagagctgggccagatgaatggctctgtgggaggaggcggcggagctcctggaggaggcaatggaggtggtggtggtggtggcagtggcggcggggctggcagtggcggggccggcggaacaagcagcggggatgatggagagatgccagccatgcatgaaatcggggaggaacttatctggacaggaaggttcttcggtggcctgtgtctggatatcaagaggaagttgccctggttcccaagtgacttctatgatggcttccacattcagtccatctctgccatcctattcatctacctcggctgtatcaccaacgcgatcacctttggtgggcttctgggggatgccaccgacaattatcagggagtgatggagagcttcctgggcactgccatggctggctccttgttctgcctcttctcgggacagcctctcatcattctcagcagcacggggcccatcctcatctttgagaagctcctcttcgacttcagcaaaggcaatggcctggactacatggagttccgcctctggattggcctacactcagctgtccagtgccttatcctagtggccacagatgccagctttatcatcaaatatatcacccgcttcaccgaggagggcttctccacccttatcagcttcatcttcatctacgatgccatcaagaagatgatcggtgccttcaagtactaccctatcaatatggacttcaagccaaacttcatcactacctacaagtgcgagtgtgtcgcccctgacacagtgaatacaaccgtgttcaatgcttcagccccattggcaccagacaccaacgcttctctgtacaacctccttaacctcacagcgttggactggtccctgctgagcaagaaggagtgtctgagctacggcgggcgcctgcttgggaattcctgcaagtttatcccagacctggcgctcatgtccttcatccttttctttgggacatactccatgaccctgaccctgaagaagttcaaattcagccgctattttcctaccaaggtccgggccctggtggctgacttttccattgttttctccatcctgatgttctgtggaatcgatgcctgttttggcctagaaactcccaagctgcatgtgcccagtgtcatcaagccaacgcggcctgaccgaggctggttcgtggccccctttgggaagaacccgtggtgggtatacccagcaagcatcctgcccgccctgctggtgaccatcctgatcttcatggaccagcagatcactgccgtcattgtcaaccggaaggagaacaaactgaagaaggctgccggctaccatctggacctgttctgggtgggcatcctcatggctttgtgctcctttatggggctcccctggtacgtggctgccacggtcatctccatcgcccacatcgacagcctcaagatggagacagagaccagtgcccctggggagcagccccagtttctgggagtcagggaacagagagtaaccggcatcatcgtcttcatcctgacgggaatctctgtcttcctggctcccatcctaaagtgtatccccctgccggtgctgtacggagtcttcctctacatgggcgtggcctccctgaatggcatccagatggggaccggagggtcagaattcaaaatccagaagaagctgactccattctgggaacgctgcaagctcttcctgatgccagccaagcaccagccggaccatgccttcctgcggcacgtgccgctgcgccggatccacctcttcaccctggtgcagatcctctgcctggcggtgctctggatcctcaaatccacggtggctgccatcatcttcccggtcatgatcctgggcctcatcatcgttcgaaggcttctggatttcatcttttcccagcacgacctggcctggattgacaacatcctcccagagaaggaaaaaaaggagacagacaagaagaggaagagaaaaaaaggggcccacgaggactgtgatgaggagccccagttccctcctccctcggttataaagattcccatggaaagtgtccaatcagatccccaaaacggtatccactgcattgccagaaaaagatcttccagttggagttactcactctgattcttccttcagtgacacagaacttgaccgaaggtaagcaggcatggattagagacataagctatacgtcacttacaaaaacatctccagcaaactatctaaacttctttaaactccagagaactatcaaaagaataacgccagctggcagaagaacgaggacggaggtaggtcaactcaattgtttcttctctttctgcctcaagctgcctagagcaggagctacttctgctcgcatgaaagccaaaagccaaaacagacaaacctatccctgcctcaagtattttacagattaagctcctagcttggcacaacctgttgtgatataagactgtaggacaggccaggtgcagtggctcacgcctgtaatcctagcattttgggaggccgaggcaggtggatcacttgaggtcaggagtttgagaccagcctggccaatgtgatgaaaccccatctctactaaaaacacaaaaattagccaggcatggtggcatgcacctgtaatcccagctactcaggaggctgaggcacaagaattgtttgaacccgagaggca

SEQ ID NO: 404067 - DNA, 8614 bp, Homo sapiens
tgggcgtcggtcgtcggtggggtcggagctgggcgcggagcccctcacagtgcagacgcccagcggcagcaggatgagtgcggaggcaagcgcccggcctctgcgggtgggctcccgtgtagaggtgattggaaaaggccaccgaggcactgtggcctatgttggagccacactgtttgccactggcaaatgggtaggcgtgattctggatgaagcaaagggcaaaaatgatggaactgttcaaggcaggaagtacttcacttgtgatgaagggcatggcatctttgtgcgccagtcccagatccaggtatttgaagatggagcagatactacttccccagagacacctgattcttctgcttcaaaagtcctcaaaagagagggaactgatacaactgcaaagactagcaaactgcccacgcgcccagccagtactggggtggctggggccagtagctccctgggcccctctggctcagcgtcagcaggtgagctgagcagcagtgagcccagcaccccggctcagactccgctggcagcacccatcatccccacgccggtcctcacctctcctggagcagtccccccgcttccttccccatccaaggaggaggagggactaagggctcaggtgcgggacctggaggagaaactagagaccctgagactgaaacgggcagaagacaaagcaaagctaaaagagctggagaaacacaaaatccagctggagcaggtgcaggaatggaagagcaaaatgcaggagcagcaggccgacctgcagcggcgcctcaaggaggcgagaaaggaagccaaggaggcgctggaggcaaaggaacgctatatggaggagatggctgatactgctgatgccattgagatggccactttggacaaggagatggctgaagagcgggctgagtccctgcagcaggaggtggaggcactgaaggagcgggtggacgagctcactactgacttagagatcctcaaggctgagattgaagagaagggctcagatggcgctgcatccagttatcagctcaagcagcttgaggagcagaatgcccgcctgaaggatgccctggtgaggatgcgggatctttcttcctcagagaagcaggagcatgtgaagctccagaagctcatggaaaagaagaaccaagagctggaagttgtgaggcaacagcgggagcgtctgcaggaggagctaagccaggcagagagcaccattgatgagctcaaggagcaggtggatgctgctctgggtgctgaggagatggtggagatgctgacagatcggaacctgaatctggaagagaaagtgcgcgagttgagggagactgtgggagacttggaagcgatgaatgagatgaacgatgagctgcaggagaatgcacgtgagacagaactggagctgcgggagcagctggacatggcaggcgcgcgggttcgtgaggcccagaagcgtgtggaggcagcccaggagacggttgcagactaccagcagaccatcaagaagtaccgccagctgaccgcccatctacaggatgtgaatcgggaactgacaaaccagcaggaagcatctgtggagaggcaacagcagccacctccagagacctttgacttcaaaatcaagtttgctgagactaaggcccatgccaaggcaattgagatggaattgaggcagatggaggtggcccaggccaatcgacacatgtccctgctgacagccttcatgcctgacagcttccttcggccaggtggggaccatgactgcgttctggtgctgttgctcatgcctcgtctcatttgcaaggcagagctgatccggaagcaggcccaggagaagtttgaactaagtgagaactgttcagagcggcctgggctgcgaggagctgctggggagcaactcagctttgctgctggactggtgtactcgctgagcctgctgcaggccacgctacaccgctatgagcatgccctctctcagtgcagtgtggatgtgtataagaaagtgggcagcctgtaccctgagatgagtgcccatgagcgctccttggatttcctcattgaactgctgcacaaggatcagctggatgagactgtcaatgtggagcctctcaccaaggccatcaagtactatcagcatctgtacagcatccaccttgccgaacagcctgaggactgtactatgcagctggctgaccacattaagttcacgcagagtgctctggactgcatgagtgtggaggtaggacggctgcgtgccttcttgcagggtgggcaggaggctacagatattgccctcctgctccgggatctggaaacttcatgcagtgacatccgccagttctgcaagaagatccgaaggcgaatgccagggacagatgctcctgggatcccagctgcactggcctttggaccacaggtatctgacacgctcctagactgcaggaaacacttgacgtgggtcgtggctgtgctgcaggaggtggcagctgctgctgcccagctcattgccccactggcagagaatgaggggctacttgtggctgctctggaggaactggctttcaaagcaagcgagcagatctatgggaccccctccagcagcccctatgagtgtctgcgccagtcatgcaacatcctcatcagtaccatgaacaagctggccacagccatgcaggagggggagtatgatgcagagcggccccccagcaagcctccaccggttgaactgcgggctgctgcccttcgtgcagagatcacagatgctgaaggcctgggtttgaagctcgaagatcgagagacagttattaaggagttgaagaagtcactcaagattaagggagaggagctaagtgaggccaatgtgcggctgagcctcctggagaagaagttggacagtgctgccaaggatgcagatgagcgcatcgagaaagtccagactcggctggaggagacccaggcactgctgcgaaagaaggagaaagagtttgaggagacaatggatgcactccaggctgacatcgaccagctggaggcagagaaggcagaactaaagcagcgtctgaacagccagtccaaacgcacgattgagggactccggggccctcctccttcaggcattgctactctggtctctggcattgctggtggagccatccctgggcaggctccagggtctgtgccaggcccagggctggtgaaggactcaccactgctgcttcagcagatctctgccatgaggctgcacatctcccagctccagcatgagaacagcatcctcaagggagcccagatgaaggcatccttggcatccctgccccctctgcatgttgcaaagctatcccatgagggccctggcagtgagttaccagctggagcgctgtatcgtaagaccagccagctgctggagacattgaatcaattgagcacacacacgcacgtagtagacatcactcgcaccagccctgctgccaagagcccgtcggcccaacttatggagcaagtggctcagcttaagtccctgagtgacaccgtcgagaagctcaaggatgaggtcctcaaggagacagtatctcagcgccctggagccacagtacccactgactttgccaccttcccttcatcagccttcctcagggccaaggaggagcagcaggatgacacagtctacatgggcaaagtgaccttctcatgtgcggctggttttggacagcgacaccggctggtgctgacccaggagcagctgcaccagcttcacagtcgcctcatctcctaagcacaccggcagtcccctgcctgtcgagttgacggatcagccctgtgatcagctctggcagatctgcatcgacatgagccacctgccatgtagaaaccagctttatgaactctatgaggcggactgtgtcatcctcggctacccaaagcccggattcagcgtcctgccccttcaccttgacccgggttcccccactcccattccctggcctctgccataatttgttgttcaactgctccctccttcctgaggggcctcagggcttgtggggggtaggctgagaccccaccaccaaaggttaagtgaggtccccttgattgaggacttcaccccttgattaaagcaacttctgcttcagtgcttcctgtgtggtgttgagagtgggacttgggccattaagctcacagcaggagtggaggagaagcgatgctgaggaagctttggctgtatcaaatttgaggtctcctcttcgtagtgaccagaagaatgctgtttctaaaattcatgtgcacaggcatcccaggatttggaattcagctgtgagctcatgagctgatggatgtttccaggagtaccctgaagaccacccaggtgggagtgtaagataaccttccagataaagagttgctgctaccaaaagagtgctgacaccatcacagtatgttcccttctcaaccctggacatggttcagaaacagctaaagcagacaagaatctggggcagccaatattgtaccacctgccaaagcttggcacaaacaatctggaagccaaaaattgcacatactgtggaacagagcaagtggttctggcctccctgggatttggatcctggtttccagagctaagaacacaaagtcatgaaggtgaaggaggagaaggctggggtaggaaagctggaccacactaaccacaggaggagatttccggatcagaaagaatgccctcctatccacattgggcttccagtacccacttaccctcaaagaaaaactgaccagaagggacatctttcaggcctgcaaaaagtccactggggcctgcggccagaccagccacagcaggaactgactggcccagggagtggggcaagcagccaggacagcagcatggatcttatcagcaggactcggtccccagctgctgagcagctccaggacatcctgggggaggaagatgaggctcccaaccccaccctctttacagagatggatactctgcagcatgacggagaccagatggagtggaaggagtcagccaggtggataaagtttgaagaaaaggtagaggaaggcggcgaacgctggagcaagccccacgtgtccacactatccctgcacagcctcttcgagctccgtacctgcctgcagacggggacggtgctgctggatttggacagtggctccttaccacagatcatagatgatgtcattgagaagcagattgaggatggtctcctgcggccagagctccgggagagggtcagttacgtcctcctgaggaggcaccgccaccaaaccaagaagcccatccaccgctccttagctgacattgggaagtcagtctccaccacaaatcgcagtcctgcccggagccctggtgctggcccgagtctacaccactccacggaagacctgcggatgcggcagagtgcaaattacggacgtctgtgtcatgcccagagcagaagcatgaatgacatttctctcaccccaaacacagaccagcggaaaaacaaattcatgaagaagatccccaaggactcagaagcgtccaacgtgctcgtgggcgaggtggacttcctagaccagccattcatcgcgttcgtgcgcctcatccagtcggccatgctgggaggagtgaccgaggtgcctgtccccaccagatttctgtttatactactgggaccttctgggagagcaaaatcctacaatgaaattggccgtgccattgcaaccctcatggtagatgatctcttcagtgacgtggcctacaaagcccgcaatcgggaagatctgatcgcaggaattgatgaatttctggatgaggtcatcgtccttcctcctggagaatgggacccaaatatccggattgagccccccaagaaggtgccctctgctgacaagaggaaatctgtgttctccctagcagagctgggccagatgaatggctctgtgggaggaggcggcggagctcctggaggaggcaatggaggtggtggtggtggtggcagtggcggcggggctggcagtggcggggccggcggaacaagcagcggggatgatggagagatgccagccatgcatgaaatcggggaggaacttatctggacaggaaggttcttcggtggcctgtgtctggatatcaagaggaagttgccctggttcccaagtgacttctatgatggcttccacattcagtccatctctgccatcctattcatctacctcggctgtatcaccaacgcgatcacctttggtgggcttctgggggatgccaccgacaattatcagggagtgatggagagcttcctgggcactgccatggctggctccttgttctgcctcttctcgggacagcctctcatcattctcagcagcacggggcccatcctcatctttgagaagctcctcttcgacttcagcaaaggcaatggcctggactacatggagttccgcctctggattggcctacactcagctgtccagtgccttatcctagtggccacagatgccagctttatcatcaaatatatcacccgcttcaccgaggagggcttctccacccttatcagcttcatcttcatctacgatgccatcaagaagatgatcggtgccttcaagtactaccctatcaatatggacttcaagccaaacttcatcactacctacaagtgcgagtgtgtcgcccctgacacagtgaatacaaccgtgttcaatgcttcagccccattggcaccagacaccaacgcttctctgtacaacctccttaacctcacagcgttggactggtccctgctgagcaagaaggagtgtctgagctacggcgggcgcctgcttgggaattcctgcaagtttatcccagacctggcgctcatgtccttcatccttttctttgggacatactccatgaccctgaccctgaagaagttcaaattcagccgctattttcctaccaaggtccgggccctggtggctgacttttccattgttttctccatcctgatgttctgtggaatcgatgcctgttttggcctagaaactcccaagctgcatgtgcccagtgtcatcaagccaacgcggcctgaccgaggctggttcgtggccccctttgggaagaacccgtggtgggtatacccagcaagcatcctgcccgccctgctggtgaccatcctgatcttcatggaccagcagatcactgccgtcattgtcaaccggaaggagaacaaactgaagaaggctgccggctaccatctggacctgttctgggtgggcatcctcatggctttgtgctcctttatggggctcccctggtacgtggctgccacggtcatctccatcgcccacatcgacagcctcaagatggagacagagaccagtgcccctggggagcagccccagtttctgggagtcagggaacagagagtaaccggcatcatcgtcttcatcctgacgggaatctctgtcttcctggctcccatcctaaagtgtatccccctgccggtgctgtacggagtcttcctctacatgggcgtggcctccctgaatggcatccagatggggaccggagggtcagaattcaaaatccagaagaagctgactccattctgggaacgctgcaagctcttcctgatgccagccaagcaccagccggaccatgccttcctgcggcacgtgccgctgcgccggatccacctcttcaccctggtgcagatcctctgcctggcggtgctctggatcctcaaatccacggtggctgccatcatcttcccggtcatgatcctgggcctcatcatcgttcgaaggcttctggatttcatcttttcccagcacgacctggcctggattgacaacatcctcccagagaaggaaaaaaaggagacagacaagaagaggaagagaaaaaaaggggcccacgaggactgtgatgaggagccccagttccctcctccctcggttataaagattcccatggaaagtgtccaatcagatccccaaaacggtatccactgcattgccagaaaaagatcttccagttggagttactcactctgattcttccttcagtgacacagaacttgaccgaaggtaagcaggcatggattagagacataagctatacgtcacttacaaaaacatctccagcaaactatctaaacttctttaaactccagagaactatcaaaagaataacgccagctggcagaagaacgaggacggaggtaggtcaactcaattgtttcttctctttctgcctcaagctgcctagagcaggagctacttctgctcgcatgaaagccaaaagccaaaacagacaaacctatccctgcctcaagtattttacagattaagctcctagcttggcacaacctgttgtgatataagactgtaggacaggccaggtgcagtggctcacgcctgtaatcctagcattttgggaggccgaggcaggtggatcacttgaggtcaggagtttgagaccagcctggccaatgtgatgaaaccccatctctactaaaaacacaaaaattagccaggcatggtggcatgcacctgtaatcccagctactcaggaggctgaggcacaagaattgtttgaacccgagaggca

SEQ ID NO: 404068 - DNA, 4196 bp, Homo sapiens
tgggcgtcggtcgtcggtggggtcggagctgggcgcggagcccctcacagtgcagacgcccagcggcagcaggatgagtgcggaggcaagcgcccggcctctgcgggtgggctcccgtgtagaggtgattggaaaaggccaccgaggcactgtggcctatgttggagccacactgtttgccactggcaaatgggtaggcgtgattctggatgaagcaaagggcaaaaatgatggaactgttcaaggcaggaagtacttcacttgtgatgaagggcatggcatctttgtgcgccagtcccagatccaggtatttgaagatggagcagatactacttccccagagacacctgattcttctgcttcaaaagtcctcaaaagagagggaactgatacaactgcaaagactagcaaactgcccacgcgcccagccagtactggggtggctggggccagtagctccctgggcccctctggctcagcgtcagcaggtgagctgagcagcagtgagcccagcaccccggctcagactccgctggcagcacccatcatccccacgccggtcctcacctctcctggagcagtccccccgcttccttccccatccaaggaggaggagggactaagggctcaggtgcgggacctggaggagaaactagagaccctgagactgaaacgggcagaagacaaagcaaagctaaaagagctggagaaacacaaaatccagctggagcaggtgcaggaatggaagagcaaaatgcaggagcagcaggccgacctgcagcggcgcctcaaggaggcgagaaaggaagccaaggaggcgctggaggcaaaggaacgctatatggaggagatggctgatactgctgatgccattgagatggccactttggacaaggagatggctgaagagcgggctgagtccctgcagcaggaggtggaggcactgaaggagcgggtggacgagctcactactgacttagagatcctcaaggctgagattgaagagaagggctcagatggcgctgcatccagttatcagctcaagcagcttgaggagcagaatgcccgcctgaaggatgccctggtgaggatgcgggatctttcttcctcagagaagcaggagcatgtgaagctccagaagctcatggaaaagaagaaccaagagctggaagttgtgaggcaacagcgggagcgtctgcaggaggagctaagccaggcagagagcaccattgatgagctcaaggagcaggtggatgctgctctgggtgctgaggagatggtggagatgctgacagatcggaacctgaatctggaagagaaagtgcgcgagttgagggagactgtgggagacttggaagcgatgaatgagatgaacgatgagctgcaggagaatgcacgtgagacagaactggagctgcgggagcagctggacatggcaggcgcgcgggttcgtgaggcccagaagcgtgtggaggcagcccaggagacggttgcagactaccagcagaccatcaagaagtaccgccagctgaccgcccatctacaggatgtgaatcgggaactgacaaaccagcaggaagcatctgtggagaggcaacagcagccacctccagagacctttgacttcaaaatcaagtttgctgagactaaggcccatgccaaggcaattgagatggaattgaggcagatggaggtggcccaggccaatcgacacatgtccctgctgacagccttcatgcctgacagcttccttcggccaggtggggaccatgactgcgttctggtgctgttgctcatgcctcgtctcatttgcaaggcagagctgatccggaagcaggcccaggagaagtttgaactaagtgagaactgttcagagcggcctgggctgcgaggagctgctggggagcaactcagctttgctgctggactggtgtactcgctgagcctgctgcaggccacgctacaccgctatgagcatgccctctctcagtgcagtgtggatgtgtataagaaagtgggcagcctgtaccctgagatgagtgcccatgagcgctccttggatttcctcattgaactgctgcacaaggatcagctggatgagactgtcaatgtggagcctctcaccaaggccatcaagtactatcagcatctgtacagcatccaccttgccgaacagcctgaggactgtactatgcagctggctgaccacattaagttcacgcagagtgctctggactgcatgagtgtggaggtaggacggctgcgtgccttcttgcagggtgggcaggaggctacagatattgccctcctgctccgggatctggaaacttcatgcagtgacatccgccagttctgcaagaagatccgaaggcgaatgccagggacagatgctcctgggatcccagctgcactggcctttggaccacaggtatctgacacgctcctagactgcaggaaacacttgacgtgggtcgtggctgtgctgcaggaggtggcagctgctgctgcccagctcattgccccactggcagagaatgaggggctacttgtggctgctctggaggaactggctttcaaagcaagcgagcagatctatgggaccccctccagcagcccctatgagtgtctgcgccagtcatgcaacatcctcatcagtaccatgaacaagctggccacagccatgcaggagggggagtatgatgcagagcggccccccagcaagcctccaccggttgaactgcgggctgctgcccttcgtgcagagatcacagatgctgaaggcctgggtttgaagctcgaagatcgagagacagttattaaggagttgaagaagtcactcaagattaagggagaggagctaagtgaggccaatgtgcggctgagcctcctggagaagaagttggacagtgctgccaaggatgcagatgagcgcatcgagaaagtccagactcggctggaggagacccaggcactgctgcgaaagaaggagaaagagtttgaggagacaatggatgcactccaggctgacatcgaccagctggaggcagagaaggcagaactaaagcagcgtctgaacagccagtccaaacgcacgattgagggactccggggccctcctccttcaggcattgctactctggtctctggcattgctggtggagccatccctgggcaggctccagggtctgtgccaggcccagggctggtgaaggactcaccactgctgcttcagcagatctctgccatgaggctgcacatctcccagctccagcatgagaacagcatcctcaagggagcccagatgaaggcatccttggcatccctgccccctctgcatgttgcaaagctatcccatgagggccctggcagtgagttaccagctggagcgctgtatcgtaagaccagccagctgctggagacattgaatcaattgagcacacacacgcacgtagtagacatcactcgcaccagccctgctgccaagagcccgtcggcccaacttatggagcaagtggctcagcttaagtccctgagtgacaccgtcgagaagctcaaggatgaggtcctcaaggagacagtatctcagcgccctggagccacagtacccactgactttgccaccttcccttcatcagccttcctcagggccaaggaggagcagcaggatgacacagtctacatgggcaaagtgaccttctcatgtgcggctggttttggacagcgacaccggctggtgctgacccaggagcagctgcaccagcttcacagtcgcctcatctcctaagcactcctttcccctgctgtccccttcgaccctcagccctctggtgccgctctgcccgatgcacagccacctcagccagcccccaggtagaaacgtgggttaagctcttcctgccccgttcagcttcactcccaccctttcagcgtcctgccccttcaccttgacccgggttcccccactcccattccctggcctctgccataatttgttgttcaactgctccctccttcctgaggggcctcagggcttgtggggggtaggctgagaccccaccaccaaaggttaagtgaggtccccttgattgaggacttcaccccttgattaaagcaacttctgcttcagtaaaacacacacacaacacaaaccaaaaaaaacccgaaaaatttctccccacccccccttggcccaaatg

SEQ ID NO: 404069 - DNA, 4923 bp, Homo sapiens
  misc_feature (4130)..(4130): n is a, c, g, or t
  misc_feature (4132)..(4132): n is a, c, g, or t
tgggcgtcggtcgtcggtggggtcggagctgggcgcggagcccctcacagtgcagacgcccagcggcagcaggatgagtgcggaggcaagcgcccggcctctgcgggtgggctcccgtgtagaggtgattggaaaaggccaccgaggcactgtggcctatgttggagccacactgtttgccactggcaaatgggtaggcgtgattctggatgaagcaaagggcaaaaatgatggaactgttcaaggcaggaagtacttcacttgtgatgaagggcatggcatctttgtgcgccagtcccagatccaggtatttgaagatggagcagatactacttccccagagacacctgattcttctgcttcaaaagtcctcaaaagagagggaactgatacaactgcaaagactagcaaactgcccacgcgcccagccagtactggggtggctggggccagtagctccctgggcccctctggctcagcgtcagcaggtgagctgagcagcagtgagcccagcaccccggctcagactccgctggcagcacccatcatccccacgccggtcctcacctctcctggagcagtccccccgcttccttccccatccaaggaggaggagggactaagggctcaggtgcgggacctggaggagaaactagagaccctgagactgaaacgggcagaagacaaagcaaagctaaaagagctggagaaacacaaaatccagctggagcaggtgcaggaatggaagagcaaaatgcaggagcagcaggccgacctgcagcggcgcctcaaggaggcgagaaaggaagccaaggaggcgctggaggcaaaggaacgctatatggaggagatggctgatactgctgatgccattgagatggccactttggacaaggagatggctgaagagcgggctgagtccctgcagcaggaggtggaggcactgaaggagcgggtggacgagctcactactgacttagagatcctcaaggctgagattgaagagaagggctcagatggcgctgcatccagttatcagctcaagcagcttgaggagcagaatgcccgcctgaaggatgccctggtgaggatgcgggatctttcttcctcagagaagcaggagcatgtgaagctccagaagctcatggaaaagaagaaccaagagctggaagttgtgaggcaacagcgggagcgtctgcaggaggagctaagccaggcagagagcaccattgatgagctcaaggagcaggtggatgctgctctgggtgctgaggagatggtggagatgctgacagatcggaacctgaatctggaagagaaagtgcgcgagttgagggagactgtgggagacttggaagcgatgaatgagatgaacgatgagctgcaggagaatgcacgtgagacagaactggagctgcgggagcagctggacatggcaggcgcgcgggttcgtgaggcccagaagcgtgtggaggcagcccaggagacggttgcagactaccagcagaccatcaagaagtaccgccagctgaccgcccatctacaggatgtgaatcgggaactgacaaaccagcaggaagcatctgtggagaggcaacagcagccacctccagagacctttgacttcaaaatcaagtttgctgagactaaggcccatgccaaggcaattgagatggaattgaggcagatggaggtggcccaggccaatcgacacatgtccctgctgacagccttcatgcctgacagcttccttcggccaggtggggaccatgactgcgttctggtgctgttgctcatgcctcgtctcatttgcaaggcagagctgatccggaagcaggcccaggagaagtttgaactaagtgagaactgttcagagcggcctgggctgcgaggagctgctggggagcaactcagctttgctgctggactggtgtactcgctgagcctgctgcaggccacgctacaccgctatgagcatgccctctctcagtgcagtgtggatgtgtataagaaagtgggcagcctgtaccctgagatgagtgcccatgagcgctccttggatttcctcattgaactgctgcacaaggatcagctggatgagactgtcaatgtggagcctctcaccaaggccatcaagtactatcagcatctgtacagcatccaccttgccgaacagcctgaggactgtactatgcagctggctgaccacattaagttcacgcagagtgctctggactgcatgagtgtggaggtaggacggctgcgtgccttcttgcagggtgggcaggaggctacagatattgccctcctgctccgggatctggaaacttcatgcagtgacatccgccagttctgcaagaagatccgaaggcgaatgccagggacagatgctcctgggatcccagctgcactggcctttggaccacaggtatctgacacgctcctagactgcaggaaacacttgacgtgggtcgtggctgtgctgcaggaggtggcagctgctgctgcccagctcattgccccactggcagagaatgaggggctacttgtggctgctctggaggaactggctttcaaagcaagcgagcagatctatgggaccccctccagcagcccctatgagtgtctgcgccagtcatgcaacatcctcatcagtaccatgaacaagctggccacagccatgcaggagggggagtatgatgcagagcggccccccagcaagcctccaccggttgaactgcgggctgctgcccttcgtgcagagatcacagatgctgaaggcctgggtttgaagctcgaagatcgagagacagttattaaggagttgaagaagtcactcaagattaagggagaggagctaagtgaggccaatgtgcggctgagcctcctggagaagaagttggacagtgctgccaaggatgcagatgagcgcatcgagaaagtccagactcggctggaggagacccaggcactgctgcgaaagaaggagaaagagtttgaggagacaatggatgcactccaggctgacatcgaccagctggaggcagagaaggcagaactaaagcagcgtctgaacagccagtccaaacgcacgattgagggactccggggccctcctccttcaggcattgctactctggtctctggcattgctggtggagccatccctgggcaggctccagggtctgtgccaggcccagggctggtgaaggactcaccactgctgcttcagcagatctctgccatgaggctgcacatctcccagctccagcatgagaacagcatcctcaagggagcccagatgaaggcatccttggcatccctgccccctctgcatgttgcaaagctatcccatgagggccctggcagtgagttaccagctggagcgctgtatcgtaagaccagccagctgctggagacattgaatcaattgagcacacacacgcacgtagtagacatcactcgcaccagccctgctgccaagagcccgtcggcccaacttatggagcaagtggctcagcttaagtccctgagtgacaccgtcgagaagctcaaggatgaggtcctcaaggagacagtatctcagcgccctggagccacagtacccactgactttgccaccttcccttcatcagccttcctcagggccaaggaggagcagcaggatgacacagtctacatgggcaaagtgaccttctcatgtgcggctggttttggacagcgacaccggctggtgctgacccaggagcagctgcaccagcttcacagtcgcctcatctcctaagcactcctttcccctgctgtccccttcgaccctcagccctctggtgccgctctgcccgatgcacagccacctcagccagcccccaggtagaaacgtgggttaagctcttcctgccccgttcagcttcactcccaccctccctggcctctgccataatttgttgttcaactgctccctccttcctgaggggcctcagggcttgtggggggtaggctgagaccccaccaccaaaggttaagtgaggtccccttgattgaggacttcaccccttgattaaagcaacttctgcttcagtgaaaaaaaaaaaaaaaaaaaaaaaaaaaaaaaaaaaaaaaaaaaaaaaaananaaaaaaaaaaaaaaaaaaaaaaaaaaaaaaaacaaaacaacaaaaaaaaaaaaaagaaaaacagaaaagaaaagaaagacagacaaaagaataagaagagagatgaagaaaaccgacaacgaaggggggagaccgagagaacaaatgatagggggaggaagcggggcggagaaaggagagacggggggagagcgacgggaggaagaaggcgacagacaatagtcgcgcgggagcgacgacgctgcagggagtaagggcagagaagaaggagggacgaggcgacaaggaatctgcagacaggggaacgcgggacgggcgggagagcagagagaggaagacgacgagacaggggcagacgacgagggggggggcggaggcagggggggagcgcagcgggcagccgcaggggggagcgagggaagacacagagcaaagacgaggacgaaggcgggagggaagggcaggcagacggcgggggaaagagagaaggagaagagcagagggcgggcggggaagcgagagagagaagcagagacaacagaaagacggcggcgacaccgccggcagaacagggagggacacagaagcaagagacaccagacccagcacggagagcagagaacgaaacgggccaagaccagcacaaggcgaaagggagacaagggcacgaaagcaggaggacggaggagggagaagggggaggggacagcagcgggccgggaggagcgggcgggggacgagagagagagagcacgacacggagagcacagaagaacgaaacaaccagagcg

SEQ ID NO: 404070 - DNA, 4050 bp, Homo sapiens
tgggcgtcggtcgtcggtggggtcggagctgggcgcggagcccctcacagtgcagacgcccagcggcagcaggatgagtgcggaggcaagcgcccggcctctgcgggtgggctcccgtgtagaggtgattggaaaaggccaccgaggcactgtggcctatgttggagccacactgtttgccactggcaaatgggtaggcgtgattctggatgaagcaaagggcaaaaatgatggaactgttcaaggcaggaagtacttcacttgtgatgaagggcatggcatctttgtgcgccagtcccagatccaggtatttgaagatggagcagatactacttccccagagacacctgattcttctgcttcaaaagtcctcaaaagagagggaactgatacaactgcaaagactagcaaactgcccacgcgcccagccagtactggggtggctggggccagtagctccctgggcccctctggctcagcgtcagcaggtgagctgagcagcagtgagcccagcaccccggctcagactccgctggcagcacccatcatccccacgccggtcctcacctctcctggagcagtccccccgcttccttccccatccaaggaggaggagggactaagggctcaggtgcgggacctggaggagaaactagagaccctgagactgaaacgggcagaagacaaagcaaagctaaaagagctggagaaacacaaaatccagctggagcaggtgcaggaatggaagagcaaaatgcaggagcagcaggccgacctgcagcggcgcctcaaggaggcgagaaaggaagccaaggaggcgctggaggcaaaggaacgctatatggaggagatggctgatactgctgatgccattgagatggccactttggacaaggagatggctgaagagcgggctgagtccctgcagcaggaggtggaggcactgaaggagcgggtggacgagctcactactgacttagagatcctcaaggctgagattgaagagaagggctcagatggcgctgcatccagttatcagctcaagcagcttgaggagcagaatgcccgcctgaaggatgccctggtgaggatgcgggatctttcttcctcagagaagcaggagcatgtgaagctccagaagctcatggaaaagaagaaccaagagctggaagttgtgaggcaacagcgggagcgtctgcaggaggagctaagccaggcagagagcaccattgatgagctcaaggagcaggtggatgctgctctgggtgctgaggagatggtggagatgctgacagatcggaacctgaatctggaagagaaagtgcgcgagttgagggagactgtgggagacttggaagcgatgaatgagatgaacgatgagctgcaggagaatgcacgtgagacagaactggagctgcgggagcagctggacatggcaggcgcgcgggttcgtgaggcccagaagcgtgtggaggcagcccaggagacggttgcagactaccagcagaccatcaagaagtaccgccagctgaccgcccatctacaggatgtgaatcgggaactgacaaaccagcaggaagcatctgtggagaggcaacagcagccacctccagagacctttgacttcaaaatcaagtttgctgagactaaggcccatgccaaggcaattgagatggaattgaggcagatggaggtggcccaggccaatcgacacatgtccctgctgacagccttcatgcctgacagcttccttcggccaggtggggaccatgactgcgttctggtgctgttgctcatgcctcgtctcatttgcaaggcagagctgatccggaagcaggcccaggagaagtttgaactaagtgagaactgttcagagcggcctgggctgcgaggagctgctggggagcaactcagctttgctgctggactggtgtactcgctgagcctgctgcaggccacgctacaccgctatgagcatgccctctctcagtgcagtgtggatgtgtataagaaagtgggcagcctgtaccctgagatgagtgcccatgagcgctccttggatttcctcattgaactgctgcacaaggatcagctggatgagactgtcaatgtggagcctctcaccaaggccatcaagtactatcagcatctgtacagcatccaccttgccgaacagcctgaggactgtactatgcagctggctgaccacattaagttcacgcagagtgctctggactgcatgagtgtggaggtaggacggctgcgtgccttcttgcagggtgggcaggaggctacagatattgccctcctgctccgggatctggaaacttcatgcagtgacatccgccagttctgcaagaagatccgaaggcgaatgccagggacagatgctcctgggatcccagctgcactggcctttggaccacaggtatctgacacgctcctagactgcaggaaacacttgacgtgggtcgtggctgtgctgcaggaggtggcagctgctgctgcccagctcattgccccactggcagagaatgaggggctacttgtggctgctctggaggaactggctttcaaagcaagcgagcagatctatgggaccccctccagcagcccctatgagtgtctgcgccagtcatgcaacatcctcatcagtaccatgaacaagctggccacagccatgcaggagggggagtatgatgcagagcggccccccagcaagcctccaccggttgaactgcgggctgctgcccttcgtgcagagatcacagatgctgaaggcctgggtttgaagctcgaagatcgagagacagttattaaggagttgaagaagtcactcaagattaagggagaggagctaagtgaggccaatgtgcggctgagcctcctggagaagaagttggacagtgctgccaaggatgcagatgagcgcatcgagaaagtccagactcggctggaggagacccaggcactgctgcgaaagaaggagaaagagtttgaggagacaatggatgcactccaggctgacatcgaccagctggaggcagagaaggcagaactaaagcagcgtctgaacagccagtccaaacgcacgattgagggactccggggccctcctccttcaggcattgctactctggtctctggcattgctggtggagccatccctgggcaggctccagggtctgtgccaggcccagggctggtgaaggactcaccactgctgcttcagcagatctctgccatgaggctgcacatctcccagctccagcatgagaacagcatcctcaagggagcccagatgaaggcatccttggcatccctgccccctctgcatgttgcaaagctatcccatgagggccctggcagtgagttaccagctggagcgctgtatcgtaagaccagccagctgctggagacattgaatcaattgagcacacacacgcacgtagtagacatcactcgcaccagccctgctgccaagagcccgtcggcccaacttatggagcaagtggctcagcttaagtccctgagtgacaccgtcgagaagctcaaggatgaggtcctcaaggagacagtatctcagcgccctggagccacagtacccactgactttgccaccttcccttcatcagccttcctcagggccaaggaggagcagcaggatgacacagtctacatgggcaaagtgaccttctcatgtgcggctggttttggacagcgacaccggctggtgctgacccaggagcagctgcaccagcttcacagtcgcctcatctcctaagcactcctttcccctgctgtccccttcgaccctcagccctctggtgccgctctgcccgatgcacagccacctcagccagcccccaggtagaaacgtgggttaagctcttcccctggcctctgccataatttgttgttcaactgctccctccttcctgaggggcctcagggcttgtggggggtaggctgagaccccaccaccaaaggttaagtgaggtccccttgattgaggacttcaccccttgattaaagcaacttctgcttcag

SEQ ID NO: 404071 - DNA, 7911 bp, Homo sapiens
tgggcgtcggtcgtcggtggggtcggagctgggcgcggagcccctcacagtgcagacgcccagcggcagcaggatgagtgcggaggcaagcgcccggcctctgcgggtgggctcccgtgtagaggtgattggaaaaggccaccgaggcactgtggcctatgttggagccacactgtttgccactggcaaatgggtaggcgtgattctggatgaagcaaagggcaaaaatgatggaactgttcaaggcaggaagtacttcacttgtgatgaagggcatggcatctttgtgcgccagtcccagatccaggtatttgaagatggagcagatactacttccccagagacacctgattcttctgcttcaaaagtcctcaaaagagagggaactgatacaactgcaaagactagcaaactgcccacgcgcccagccagtactggggtggctggggccagtagctccctgggcccctctggctcagcgtcagcaggtgagctgagcagcagtgagcccagcaccccggctcagactccgctggcagcacccatcatccccacgccggtcctcacctctcctggagcagtccccccgcttccttccccatccaaggaggaggagggactaagggctcaggtgcgggacctggaggagaaactagagaccctgagactgaaacgggcagaagacaaagcaaagctaaaagagctggagaaacacaaaatccagctggagcaggtgcaggaatggaagagcaaaatgcaggagcagcaggccgacctgcagcggcgcctcaaggaggcgagaaaggaagccaaggaggcgctggaggcaaaggaacgctatatggaggagatggctgatactgctgatgccattgagatggccactttggacaaggagatggctgaagagcgggctgagtccctgcagcaggaggtggaggcactgaaggagcgggtggacgagctcactactgacttagagatcctcaaggctgagattgaagagaagggctcagatggcgctgcatccagttatcagctcaagcagcttgaggagcagaatgcccgcctgaaggatgccctggtgaggatgcgggatctttcttcctcagagaagcaggagcatgtgaagctccagaagctcatggaaaagaagaaccaagagctggaagttgtgaggcaacagcgggagcgtctgcaggaggagctaagccaggcagagagcaccattgatgagctcaaggagcaggtggatgctgctctgggtgctgaggagatggtggagatgctgacagatcggaacctgaatctggaagagaaagtgcgcgagttgagggagactgtgggagacttggaagcgatgaatgagatgaacgatgagctgcaggagaatgcacgtgagacagaactggagctgcgggagcagctggacatggcaggcgcgcgggttcgtgaggcccagaagcgtgtggaggcagcccaggagacggttgcagactaccagcagaccatcaagaagtaccgccagctgaccgcccatctacaggatgtgaatcgggaactgacaaaccagcaggaagcatctgtggagaggcaacagcagccacctccagagacctttgacttcaaaatcaagtttgctgagactaaggcccatgccaaggcaattgagatggaattgaggcagatggaggtggcccaggccaatcgacacatgtccctgctgacagccttcatgcctgacagcttccttcggccaggtggggaccatgactgcgttctggtgctgttgctcatgcctcgtctcatttgcaaggcagagctgatccggaagcaggcccaggagaagtttgaactaagtgagaactgttcagagcggcctgggctgcgaggagctgctggggagcaactcagctttgctgctggactggtgtactcgctgagcctgctgcaggccacgctacaccgctatgagcatgccctctctcagtgcagtgtggatgtgtataagaaagtgggcagcctgtaccctgagatgagtgcccatgagcgctccttggatttcctcattgaactgctgcacaaggatcagctggatgagactgtcaatgtggagcctctcaccaaggccatcaagtactatcagcatctgtacagcatccaccttgccgaacagcctgaggactgtactatgcagctggctgaccacattaagttcacgcagagtgctctggactgcatgagtgtggaggtaggacggctgcgtgccttcttgcagggtgggcaggaggctacagatattgccctcctgctccgggatctggaaacttcatgcagtgacatccgccagttctgcaagaagatccgaaggcgaatgccagggacagatgctcctgggatcccagctgcactggcctttggaccacaggtatctgacacgctcctagactgcaggaaacacttgacgtgggtcgtggctgtgctgcaggaggtggcagctgctgctgcccagctcattgccccactggcagagaatgaggggctacttgtggctgctctggaggaactggctttcaaagcaagcgagcagatctatgggaccccctccagcagcccctatgagtgtctgcgccagtcatgcaacatcctcatcagtaccatgaacaagctggccacagccatgcaggagggggagtatgatgcagagcggccccccagcaagcctccaccggttgaactgcgggctgctgcccttcgtgcagagatcacagatgctgaaggcctgggtttgaagctcgaagatcgagagacagttattaaggagttgaagaagtcactcaagattaagggagaggagctaagtgaggccaatgtgcggctgagcctcctggagaagaagttggacagtgctgccaaggatgcagatgagcgcatcgagaaagtccagactcggctggaggagacccaggcactgctgcgaaagaaggagaaagagtttgaggagacaatggatgcactccaggctgacatcgaccagctggaggcagagaaggcagaactaaagcagcgtctgaacagccagtccaaacgcacgattgagggactccggggccctcctccttcaggcattgctactctggtctctggcattgctggtggtgaaggactcaccactgctgcttcagcagatctctgccatgaggctgcacatctcccagctccagcatgagaacagcatcctcaagggagcccagatgaaggcatccttggcatccctgccccctctgcatgttgcaaagctatcccatgagggccctggcagtgagttaccagctggagcgctgtatcgtaagaccagccagctgctggagacattgaatcaattgagcacacacacgcacgtagtagacatcactcgcaccagccctgctgccaagagcccgtcggcccaacttatggagcaagtggctcagcttaagtccctgagtgacaccgtcgagaagctcaaggatgaggtcctcaaggagacagtatctcagcgccctggagccacagtacccactgactttgccaccttcccttcatcagccttcctcagggccaaggaggagcagcaggatgacacagtctacatgggcaaagtgaccttctcatgtgcggctggttttggacagcgacaccggctggtgctgacccaggagcagctgcaccagcttcacagtcgcctcatctcctaagcactcctttcccctgctgtccccttcgaccctcagccctctggtgccgctctgcccgatgcacagccacctcagccagcccccagtgcttcctgtgtggtgttgagagtgggacttgggccattaagctcacagcaggagtggaggagaagcgatgctgaggaagctttggctgtatcaaatttgaggtctcctcttcgtagtgaccagaagaatgctgtttctaaaattcatgtgcacaggcatcccaggatttggaattcagctgtgagctcatgagctgatggatgtttccaggagtaccctgaagaccacccaggtgggagtgtaagataaccttccagataaagagttgctgctaccaaaagagtgctgacaccatcacagtatgttcccttctcaaccctggacatggttcagaaacagctaaagcagacaagaatctggggcagccaatattgtaccacctgccaaagcttggcacaaacaatctggaagccaaaaattgcacatactgtggaacagagcaagtggttctggcctccctgggatttggatcctggtttccagagctaagaacacaaagtcatgaaggtgaaggaggagaaggctggggtaggaaagctggaccacactaaccacaggaggagatttccggatcagaaagaatgccctcctatccacattgggcttccagtacccacttaccctcaaagaaaaactgaccagaagggacatctttcaggcctgcaaaaagtccactggggcctgcggccagaccagccacagcaggaactgactggcccagggagtggggcaagcagccaggacagcagcatggatcttatcagcaggactcggtccccagctgctgagcagctccaggacatcctgggggaggaagatgaggctcccaaccccaccctctttacagagatggatactctgcagcatgacggagaccagatggagtggaaggagtcagccaggtggataaagtttgaagaaaaggtagaggaaggcggcgaacgctggagcaagccccacgtgtccacactatccctgcacagcctcttcgagctccgtacctgcctgcagacggggacggtgctgctggatttggacagtggctccttaccacagatcatagatgatgtcattgagaagcagattgaggatggtctcctgcggccagagctccgggagagggtcagttacgtcctcctgaggaggcaccgccaccaaaccaagaagcccatccaccgctccttagctgacattgggaagtcagtctccaccacaaatcgcagtcctgcccggagccctggtgctggcccgagtctacaccactccacggaagacctgcggatgcggcagagtgcaaattacggacgtctgtgtcatgcccagagcagaagcatgaatgacatttctctcaccccaaacacagaccagcggaaaaacaaattcatgaagaagatccccaaggactcagaagcgtccaacgtgctcgtgggcgaggtggacttcctagaccagccattcatcgcgttcgtgcgcctcatccagtcggccatgctgggaggagtgaccgaggtgcctgtccccaccagatttctgtttatactactgggaccttctgggagagcaaaatcctacaatgaaattggccgtgccattgcaaccctcatggtagatgatctcttcagtgacgtggcctacaaagcccgcaatcgggaagatctgatcgcaggaattgatgaatttctggatgaggtcatcgtccttcctcctggagaatgggacccaaatatccggattgagccccccaagaaggtgccctctgctgacaagaggaaatctgtgttctccctagcagagctgggccagatgaatggctctgtgggaggaggcggcggagctcctggaggaggcaatggaggtggtggtggtggtggcagtggcggcggggctggcagtggcggggccggcggaacaagcagcggggatgatggagagatgccagccatgcatgaaatcggggaggaacttatctggacaggaaggttcttcggtggcctgtgtctggatatcaagaggaagttgccctggttcccaagtgacttctatgatggcttccacattcagtccatctctgccatcctattcatctacctcggctgtatcaccaacgcgatcacctttggtgggcttctgggggatgccaccgacaattatcagggagtgatggagagcttcctgggcactgccatggctggctccttgttctgcctcttctcgggacagcctctcatcattctcagcagcacggggcccatcctcatctttgagaagctcctcttcgacttcagcaaaggcaatggcctggactacatggagttccgcctctggattggcctacactcagctgtccagtgccttatcctagtggccacagatgccagctttatcatcaaatatatcacccgcttcaccgaggagggcttctccacccttatcagcttcatcttcatctacgatgccatcaagaagatgatcggtgccttcaagtactaccctatcaatatggacttcaagccaaacttcatcactacctacaagtgcgagtgtgtcgcccctgacacagtgaatacaaccgtgttcaatgcttcagccccattggcaccagacaccaacgcttctctgtacaacctccttaacctcacagcgttggactggtccctgctgagcaagaaggagtgtctgagctacggcgggcgcctgcttgggaattcctgcaagtttatcccagacctggcgctcatgtccttcatccttttctttgggacatactccatgaccctgaccctgaagaagttcaaattcagccgctattttcctaccaaggtccgggccctggtggctgacttttccattgttttctccatcctgatgttctgtggaatcgatgcctgttttggcctagaaactcccaagctgcatgtgcccagtgtcatcaagccaacgcggcctgaccgaggctggttcgtggccccctttgggaagaacccgtggtgggtatacccagcaagcatcctgcccgccctgctggtgaccatcctgatcttcatggaccagcagatcactgccgtcattgtcaaccggaaggagaacaaactgaagaaggctgccggctaccatctggacctgttctgggtgggcatcctcatggctttgtgctcctttatggggctcccctggtacgtggctgccacggtcatctccatcgcccacatcgacagcctcaagatggagacagagaccagtgcccctggggagcagccccagtttctgggagtcagggaacagagagtaaccggcatcatcgtcttcatcctgacgggaatctctgtcttcctggctcccatcctaaagatcctgggcctcatcatcgttcgaaggcttctggatttcatcttttcccagcacgacctggcctggattgacaacatcctcccagagaaggaaaaaaaggagacagacaagaagaggaagagaaaaaaaggggcccacgaggactgtgatgaggagccccagttccctcctccctcggttataaagattcccatggaaagtgtccaatcagatccccaaaacggtatccactgcattgccagaaaaagatcttccagttggagttactcactctgattcttccttcagtgacacagaacttgaccgaaggtaagcaggcatggattagagacataagctatacgtcacttacaaaaacatctccagcaaactatctaaacttctttaaactccagagaactatcaaaagaataacgccagctggcagaagaacgaggacggaggttaatggctgctcctggctagatcacaggaccctgcatgatactggaatgctccctggtgaggtactgcagagttacaggatcgtgaactctatttattcccacatcaatgactgctgctccttccttgatcatatctgctgtgatcagatttggaatacctggaaatggagaaaggaaagatcaacttagtactgaaaacagtctacctgtcagattcttgtctaacttcaatttcaagagaccctgaagaactaatcaacatgttttattaaaacctgttaaaaatattaact

SEQ ID NO: 404072 - DNA, 3341 bp, Homo sapiens
tgggcgtcggtcgtcggtggggtcggagctgggcgcggagcccctcacagtgcagacgcccagcggcagcaggatgagtgcggaggcaagcgcccggcctctgcgggtgggctcccgtgtagaggtgattggaaaaggccaccgaggcactgtggcctatgttggagccacactgtttgccactggcaaatgggtaggcgtgattctggatgaagcaaagggcaaaaatgatggaactgttcaaggcaggaagtacttcacttgtgatgaagggcatggcatctttgtgcgccagtcccagatccaggtatttgaagatggagcagatactacttccccagagacacctgattcttctgcttcaaaagtcctcaaaagagagggaactgatacaactgcaaagactagcaaactgcccacgcgcccagccagtactggggtggctggggccagtagctccctgggcccctctggctcagcgtcagcaggtgagctgagcagcagtgagcccagcaccccggctcagactccgctggcagcacccatcatccccacgccggtcctcacctctcctggagcagtccccccgcttccttccccatccaaggaggaggagggactaagggctcaggtgcgggacctggaggagaaactagagaccctgagactgaaacgggcagaagacaaagcaaagctaaaagagctggagaaacacaaaatccagctggagcaggtgcaggaatggaagagcaaaatgcaggagcagcaggccgacctgcagcggcgcctcaaggaggcgagaaaggaagccaaggaggcgctggaggcaaaggaacgctatatggaggagatggctgatactgctgatgccattgagatggccactttggacaaggagatggctgaagagcgggctgagtccctgcagcaggaggtggaggcactgaaggagcgggtggacgagctcactactgacttagagatcctcaaggctgagattgaagagaagggctcagatggcgctgcatccagttatcagctcaagcagcttgaggagcagaatgcccgcctgaaggatgccctggtgaggatgcgggatctttcttcctcagagaagcaggagcatgtgaagctccagaagctcatggaaaagaagaaccaagagctggaagttgtgaggcaacagcgggagcgtctgcaggaggagctaagccaggcagagagcaccattgatgagctcaaggagcaggtggatgctgctctgggtgctgaggagatggtggagatgctgacagatcggaacctgaatctggaagagaaagtgcgcgagttgagggagactgtgggagacttggaagcgatgaatgagatgaacgatgagctgcaggagaatgcacgtgagacagaactggagctgcgggagcagctggacatggcaggcgcgcgggttcgtgaggcccagaagcgtgtggaggcagcccaggagacggttgcagactaccagcagaccatcaagaagtaccgccagctgaccgcccatctacaggatgtgaatcgggaactgacaaaccagcaggaagcatctgtggagaggcaacagcagccacctccagagacctttgacttcaaaatcaagtttgctgagactaaggcccatgccaaggcaattgagatggaattgaggcagatggaggtggcccaggccaatcgacacatgtccctgctgacagccttcatgcctgacagcttccttcggccaggtggggaccatgactgcgttctggtgctgttgctcatgcctcgtctcatttgcaaggcagagctgatccggaagcaggcccaggagaagtttgaactaagtgagaactgttcagagcggcctgggctgcgaggagctgctggggagcaactcagctttgctgctggactggtgtactcgctgagcctgctgcaggccacgctacaccgctatgagcatgccctctctcagtgcagtgtggatgtgtataagaaagtgggcagcctgtaccctgagatgagtgcccatgagcgctccttggatttcctcattgaactgctgcacaaggatcagctggatgagactgtcaatgtggagcctctcaccaaggccatcaagtactatcagcatctgtacagcatccaccttgccgaacagcctgaggactgtactatgcagctggctgaccacattaagttcacgcagagtgctctggactgcatgagtgtggaggtaggacggctgcgtgccttcttgcagggtgggcaggaggctacagatattgccctcctgctccgggatctggaaacttcatgcagtgacatccgccagttctgcaagaagatccgaaggcgaatgccagggacagatgctcctgggatcccagctgcactggcctttggaccacaggtatctgacacgctcctagactgcaggaaacacttgacgtgggtcgtggctgtgctgcaggaggtggcagctgctgctgcccagctcattgccccactggcagagaatgaggggctacttgtggctgctctggaggaactggctttcaaagcaagcgagcagatctatgggaccccctccagcagcccctatgagtgtctgcgccagtcatgcaacatcctcatcagtaccatgaacaagctggccacagccatgcaggagggggagtatgatgcagagcggccccccagcaagcctccaccggttgaactgcgggctgctgcccttcgtgcagagatcacagatgctgaaggcctgggtttgaagctcgaagatcgagagacagttattaaggagttgaagaagtcactcaagattaagggagaggagctaagtgaggccaatgtgcggctgagcctcctggagaagaagttggacagtgctgccaaggatgcagatgagcgcatcgagaaagtccagactcggctggaggagacccaggcactgctgcgaaagaaggagaaagagtttgaggagacaatggatgcactccaggctgacatcgaccagctggaggcagagaaggcagaactaaagcagcgtctgaacagccagtccaaacgcacgattgagggactccggggccctcctccttcaggcattgctactctggtctctggcattgctggtggagccatccctgggcaggctccagggtctgtgccaggcccagggctggtgaaggactcaccactgctgcttcagcagatctctgccatgaggctgcacatctcccagctccagcatgagaacagcatcctcaagggagcccagatgaaggcatccttttgtgcataccgggatcatctagaac

SEQ ID NO: 404073 - DNA, 5321 bp, Homo sapiens
aatgggccagagtatgtataggtcggctgggttaattcgtacgaggtgggctgtacattaccatctccggcatgagaacacgcatctcaagggagcccagatgaaggcatccttggcatccctgccccctctgcatgttgcaaagctatcccatgagggccctggcagtgagttaccagctggagcgctgtatcgtaagaccagccagctgctggagacattgaatcaattgagcacacacacgcacgtagtagacatcactcgcaccagccctgctgccaagagcccgtcggcccaacttatggagcaagtggctcagcttaagtccctgagtgacaccgtcgagaagctcaaggatgaggtcctcaaggagacagtatctcagcgccctggagccacagtacccactgactttgccaccttcccttcatcagccttcctcagggccaaggaggagcagcaggatgacacagtctacatgggcaaagtgaccttctcatgtgcggctggttttggacagcgacaccggctggtgctgacccaggagcagctgcaccagcttcacagtcgcctcatctcctaagcactcctttcccctgctgtccccttcgaccctcagccctctggtgccgctctgcccgatgcacagccacctcagccagcccccaggtagaaacgtgggttaagctcttcccctggcctctgccataatttgttgttcaactgctccctccttcctgaggggcctcagggcttgtggggggtaggctgagaccccaccaccaaaggttaagtgaggtccccttgattgaggacttcaccccttgattaaagcaacttctgcttcagtgcttcctgtgtggtgttgagagtgggacttgggccattaagctcacagcaggagtggaggagaagcgatgctgaggaagctttggctgtatcaaatttgaggtctcctcttcgtagtgaccagaagaatgctgtttctaaaattcatgtgcacaggcatcccaggatttggaattcagctgtgagctcatgagctgatggatgtttccaggagtaccctgaagaccacccaggtgggagtgtaagataaccttccagataaagagttgctgctaccaaaagagtgctgacaccatcacagtatgttcccttctcaaccctggacatggttcagaaacagctaaagcagacaagaatctggggcagccaatattgtaccacctgccaaagcttggcacaaacaatctggaagccaaaaattgcacatactgtggaacagagcaagtggttctggcctccctgggatttggatcctggtttccagagctaagaacacaaagtcatgaaggtgaaggaggagaaggctggggtaggaaagctggaccacactaaccacaggaggagatttccggatcagaaagaatgccctcctatccacattgggcttccagtacccacttaccctcaaagaaaaactgaccagaagggacatctttcaggcctgcaaaaagtccactggggcctgcggccagaccagccacagcaggaactgactggcccagggagtggggcaagcagccaggacagcagcatggatcttatcagcaggactcggtccccagctgctgagcagctccaggacatcctgggggaggaagatgaggctcccaaccccaccctctttacagagatggatactctgcagcatgacggagaccagatggagtggaaggagtcagccaggtggataaagtttgaagaaaaggtagaggaaggcggcgaacgctggagcaagccccacgtgtccacactatccctgcacagcctcttcgagctccgtacctgcctgcagacggggacggtgctgctggatttggacagtggctccttaccacagatcatagatgatgtcattgagaagcagattgaggatggtctcctgcggccagagctccgggagagggtcagttacgtcctcctgaggaggcaccgccaccaaaccaagaagcccatccaccgctccttagctgacattgggaagtcagtctccaccacaaatcgcagtcctgcccggagccctggtgctggcccgagtctacaccactccacggaagacctgcggatgcggcagagtgcaaattacggacgtctgtgtcatgcccagagcagaagcatgaatgacatttctctcaccccaaacacagaccagcggaaaaacaaattcatgaagaagatccccaaggactcagaagcgtccaacgtgctcgtgggcgaggtggacttcctagaccagccattcatcgcgttcgtgcgcctcatccagtcggccatgctgggaggagtgaccgaggtgcctgtccccaccagatttctgtttatactactgggaccttctgggagagcaaaatcctacaatgaaattggccgtgccattgcaaccctcatggtagatgatctcttcagtgacgtggcctacaaagcccgcaatcgggaagatctgatcgcaggaattgatgaatttctggatgaggtcatcgtccttcctcctggagaatgggacccaaatatccggattgagccccccaagaaggtgccctctgctgacaagaggaaatctgtgttctccctagcagagctgggccagatgaatggctctgtgggaggaggcggcggagctcctggaggaggcaatggaggtggtggtggtggtggcagtggcggcggggctggcagtggcggggccggcggaacaagcagcggggatgatggagagatgccagccatgcatgaaatcggggaggaacttatctggacaggaaggttcttcggtggcctgtgtctggatatcaagaggaagttgccctggttcccaagtgacttctatgatggcttccacattcagtccatctctgccatcctattcatctacctcggctgtatcaccaacgcgatcacctttggtgggcttctgggggatgccaccgacaattatcagggagtgatggagagcttcctgggcactgccatggctggctccttgttctgcctcttctcgggacagcctctcatcattctcagcagcacggggcccatcctcatctttgagaagctcctcttcgacttcagcaaaggcaatggcctggactacatggagttccgcctctggattggcctacactcagctgtccagtgccttatcctagtggccacagatgccagctttatcatcaaatatatcacccgcttcaccgaggagggcttctccacccttatcagcttcatcttcatctacgatgccatcaagaagatgatcggtgccttcaagtactaccctatcaatatggacttcaagccaaacttcatcactacctacaagtgcgagtgtgtcgcccctgacacagtgaatacaaccgtgttcaatgcttcagccccattggcaccagacaccaacgcttctctgtacaacctccttaacctcacagcgttggactggtccctgctgagcaagaaggagtgtctgagctacggcgggcgcctgcttgggaattcctgcaagtttatcccagacctggcgctcatgtccttcatccttttctttgggacatactccatgaccctgaccctgaagaagttcaaattcagccgctattttcctaccaaggtccgggccctggtggctgacttttccattgttttctccatcctgatgttctgtggaatcgatgcctgttttggcctagaaactcccaagctgcatgtgcccagtgtcatcaagccaacgcggcctgaccgaggctggttcgtggccccctttgggaagaacccgtggtgggtatacccagcaagcatcctgcccgccctgctggtgaccatcctgatcttcatggaccagcagatcactgccgtcattgtcaaccggaaggagaacaaactgaagaaggctgccggctaccatctggacctgttctgggtgggcatcctcatggctttgtgctcctttatggggctcccctggtacgtggctgccacggtcatctccatcgcccacatcgacagcctcaagatggagacagagaccagtgcccctggggagcagccccagtttctgggagtcagggaacagagagtaaccggcatcatcgtcttcatcctgacgggaatctctgtcttcctggctcccatcctaaagtgtatccccctgccggtgctgtacggagtcttcctctacatgggcgtggcctccctgaatggcatccagatggggaccggagggtcagaattcaaaatccagaagaagctgactccattctgggaacgctgcaagctcttcctgatgccagccaagcaccagccggaccatgccttcctgcggcacgtgccgctgcgccggatccacctcttcaccctggtgcagatcctctgcctggcggtgctctggatcctcaaatccacggtggctgccatcatcttcccggtcatgatcctgggcctcatcatcgttcgaaggcttctggatttcatcttttcccagcacgacctggcctggattgacaacatcctcccagagaaggaaaaaaaggagacagacaagaagaggaagagaaaaaaaggggcccacgaggactgtgatgaggagccccagttccctcctccctcggttataaagattcccatggaaagtgtccaatcagatccccaaaacggtatccactgcattgccagaaaaagatcttccagttggagttactcactctgattcttccttcagtgacacagaacttgaccgaaggtaagcaggcatggattagagacataagctatacgtcacttacaaaaacatctccagcaaactatctaaacttctttaaactccagagaactatcaaaagaataacgccagctggcagaagaacgaggacggaggtaggtcaactcaattgtttcttctctttctgcctcaagctgcctagagcaggagctacttctgctcgcatgaaagccaaaagccaaaacagacaaacctatccctgcctcaagtattttacagattaagctcctagcttggcacaacctgttgtgatataagactgtaggacaggccaggtgcagtggctcacgcctgtaatcctagcattttgggaggccgaggcaggtggatcacttgaggtcaggagtttgagaccagcctggccaatgtgatgaaaccccatctctactaaaaacacaaaaattagccaggcatggtggcatgcacctgtaatcccagctactcaggaggctgaggcacaagaattgtttgaacccgagaggca

SEQ ID NO: 404074 - DNA, 5368 bp, Homo sapiens
agattggtactggtggtcgttcttacaagcgtcgatgactggaacaaccctgtgcggtggttcccccaccacagaagctcttcccagcagtgttctttggcttcactgttcagtttgtttgattcacccactctctctcaagtacttgttctgttagagagtcttatacctgcacccctaacccttaatccagtagaactgcctgcctgcgccttggtgggcctcaccagctttctctccccacagctgccaagagcccgtcggcccaacttatggagcaagtggctcagcttaagtccctgagtgacaccgtcgagaagctcaaggatgaggtcctcaaggagacagtatctcagcgccctggagccacagtacccactgactttgccaccttcccttcatcagccttcctcagggccaaggaggagcagcaggatgacacagtctacatgggcaaagtgaccttctcatgtgcggctggttttggacagcgacaccggctggtgctgacccaggagcagctgcaccagcttcacagtcgcctcatctcctaagcactcctttcccctgctgtccccttcgaccctcagccctctggtgccgctctgcccgatgcacagccacctcagccagcccccaggtagaaacgtgggttaagctcttcctgccccgttcagcttcactcccaccctttcagcgtcctgccccttcaccttgacccgggttcccccactcccattccctggcctctgccataatttgttgttcaactgctccctccttcctgaggggcctcagggcttgtggggggtaggctgagaccccaccaccaaaggttaagtgaggtccccttgattgaggacttcaccccttgattaaagcaacttctgcttcagtgcttcctgtgtggtgttgagagtgggacttgggccattaagctcacagcaggagtggaggagaagcgatgctgaggaagctttggctgtatcaaatttgaggtctcctcttcgtagtgaccagaagaatgctgtttctaaaattcatgtgcacaggcatcccaggatttggaattcagctgtgagctcatgagctgatggatgtttccaggagtaccctgaagaccacccaggtgggagtgtaagataaccttccagataaagagttgctgctaccaaaagagtgctgacaccatcacagtatgttcccttctcaaccctggacatggttcagaaacagctaaagcagacaagaatctggggcagccaatattgtaccacctgccaaagcttggcacaaacaatctggaagccaaaaattgcacatactgtggaacagagcaagtggttctggcctccctgggatttggatcctggtttccagagctaagaacacaaagtcatgaaggtgaaggaggagaaggctggggtaggaaagctggaccacactaaccacaggaggagatttccggatcagaaagaatgccctcctatccacattgggcttccagtacccacttaccctcaaagaaaaactgaccagaagggacatctttcaggcctgcaaaaagtccactggggcctgcggccagaccagccacagcaggaactgactggcccagggagtggggcaagcagccaggacagcagcatggatcttatcagcaggactcggtccccagctgctgagcagctccaggacatcctgggggaggaagatgaggctcccaaccccaccctctttacagagatggatactctgcagcatgacggagaccagatggagtggaaggagtcagccaggtggataaagtttgaagaaaaggtagaggaaggcggcgaacgctggagcaagccccacgtgtccacactatccctgcacagcctcttcgagctccgtacctgcctgcagacggggacggtgctgctggatttggacagtggctccttaccacagatcatagatgatgtcattgagaagcagattgaggatggtctcctgcggccagagctccgggagagggtcagttacgtcctcctgaggaggcaccgccaccaaaccaagaagcccatccaccgctccttagctgacattgggaagtcagtctccaccacaaatcgcagtcctgcccggagccctggtgctggcccgagtctacaccactccacggaagacctgcggatgcggcagagtgcaaattacggacgtctgtgtcatgcccagagcagaagcatgaatgacatttctctcaccccaaacacagaccagcggaaaaacaaattcatgaagaagatccccaaggactcagaagcgtccaacgtgctcgtgggcgaggtggacttcctagaccagccattcatcgcgttcgtgcgcctcatccagtcggccatgctgggaggagtgaccgaggtgcctgtccccaccagatttctgtttatactactgggaccttctgggagagcaaaatcctacaatgaaattggccgtgccattgcaaccctcatggtagatgatctcttcagtgacgtggcctacaaagcccgcaatcgggaagatctgatcgcaggaattgatgaatttctggatgaggtcatcgtccttcctcctggagaatgggacccaaatatccggattgagccccccaagaaggtgccctctgctgacaagaggaaatctgtgttctccctagcagagctgggccagatgaatggctctgtgggaggaggcggcggagctcctggaggaggcaatggaggtggtggtggtggtggcagtggcggcggggctggcagtggcggggccggcggaacaagcagcggggatgatggagagatgccagccatgcatgaaatcggggaggaacttatctggacaggaaggttcttcggtggcctgtgtctggatatcaagaggaagttgccctggttcccaagtgacttctatgatggcttccacattcagtccatctctgccatcctattcatctacctcggctgtatcaccaacgcgatcacctttggtgggcttctgggggatgccaccgacaattatcagggagtgatggagagcttcctgggcactgccatggctggctccttgttctgcctcttctcgggacagcctctcatcattctcagcagcacggggcccatcctcatctttgagaagctcctcttcgacttcagcaaaggcaatggcctggactacatggagttccgcctctggattggcctacactcagctgtccagtgccttatcctagtggccacagatgccagctttatcatcaaatatatcacccgcttcaccgaggagggcttctccacccttatcagcttcatcttcatctacgatgccatcaagaagatgatcggtgccttcaagtactaccctatcaatatggacttcaagccaaacttcatcactacctacaagtgcgagtgtgtcgcccctgacacagtgaatacaaccgtgttcaatgcttcagccccattggcaccagacaccaacgcttctctgtacaacctccttaacctcacagcgttggactggtccctgctgagcaagaaggagtgtctgagctacggcgggcgcctgcttgggaattcctgcaagtttatcccagacctggcgctcatgtccttcatccttttctttgggacatactccatgaccctgaccctgaagaagttcaaattcagccgctattttcctaccaaggtccgggccctggtggctgacttttccattgttttctccatcctgatgttctgtggaatcgatgcctgttttggcctagaaactcccaagctgcatgtgcccagtgtcatcaagccaacgcggcctgaccgaggctggttcgtggccccctttgggaagaacccgtggtgggtatacccagcaagcatcctgcccgccctgctggtgaccatcctgatcttcatggaccagcagatcactgccgtcattgtcaaccggaaggagaacaaactgaagaaggctgccggctaccatctggacctgttctgggtgggcatcctcatggctttgtgctcctttatggggctcccctggtacgtggctgccacggtcatctccatcgcccacatcgacagcctcaagatggagacagagaccagtgcccctggggagcagccccagtttctgggagtcagggaacagagagtaaccggcatcatcgtcttcatcctgacgggaatctctgtcttcctggctcccatcctaaagtgtatccccctgccggtgctgtacggagtcttcctctacatgggcgtggcctccctgaatggcatccagatggggaccggagggtcagaattcaaaatccagaagaagctgactccattctgggaacgctgcaagctcttcctgatgccagccaagcaccagccggaccatgccttcctgcggcacgtgccgctgcgccggatccacctcttcaccctggtgcagatcctctgcctggcggtgctctggatcctcaaatccacggtggctgccatcatcttcccggtcatgatcctgggcctcatcatcgttcgaaggcttctggatttcatcttttcccagcacgacctggcctggattgacaacatcctcccagagaaggaaaaaaaggagacagacaagaagaggaagagaaaaaaaggggcccacgaggactgtgatgaggagccccagttccctcctccctcggttataaagattcccatggaaagtgtccaatcagatccccaaaacggtatccactgcattgccagaaaaagatcttccagttggagttactcactctgattcttccttcagtgacacagaacttgaccgaaggtaagcaggcatggattagagacataagctatacgtcacttacaaaaacatctccagcaaactatctaaacttctttaaactccagagaactatcaaaagaataacgccagctggcagaagaacgaggacggaggtaggtcaactcaattgtttcttctctttctgcctcaagctgcctagagcaggagctacttctgctcgcatgaaagccaaaagccaaaacagacaaacctatccctgcctcaagtattttacagattaagctcctagcttggcacaacctgttgtgatataagactgtaggacaggccaggtgcagtggctcacgcctgtaatcctagcattttgggaggccgaggcaggtggatcacttgaggtcaggagtttgagaccagcctggccaatgtgatgaaaccccatctctactaaaaacacaaaaattagccaggcatggtggcatgcacctgtaatcccagctactcaggaggctgaggcacaagaattgtttgaacccgagaggca

SEQ ID NO: 404075 - DNA, 5174 bp, Homo sapiens
  misc_feature (1)..(1): n is a, c, g, or t
  misc_feature (48)..(49): n is a, c, g, or t
ntctagaccatcgctttatggttgtgggtagacatcacccgcaccagnnctgctgccaagagcccgtcggcccaacttatggagcaagtggctcagcttaagtccctgagtgacaccgtcgagaagctcaaggatgaggtcctcaaggagacagtatctcagcgccctggagccacagtacccactgactttgccaccttcccttcatcagccttcctcagggccaaggaggagcagcaggatgacacagtctacatgggcaaagtgaccttctcatgtgcggctggttttggacagcgacaccggctggtgctgacccaggagcagctgcaccagcttcacagtcgcctcatctcctaagcactcctttcccctgctgtccccttcgaccctcagccctctggtgccgctctgcccgatgcacagccacctcagccagcccccaggtagaaacgtgggttaagctcttcctgccccgttcagcttcactcccaccctttcagcgtcctgccccttcaccttgacccgggttcccccactcccattccctggcctctgccataatttgttgttcaactgctccctccttcctgaggggcctcagggcttgtggggggtaggctgagaccccaccaccaaaggttaagtgaggtccccttgattgaggacttcaccccttgattaaagcaacttctgcttcagtgcttcctgtgtggtgttgagagtgggacttgggccattaagctcacagcaggagtggaggagaagcgatgctgaggaagctttggctgtatcaaatttgaggtctcctcttcgtagtgaccagaagaatgctgtttctaaaattcatgtgcacaggcatcccaggatttggaattcagctgtgagctcatgagctgatggatgtttccaggagtaccctgaagaccacccaggtgggagtgtaagataaccttccagataaagagttgctgctaccaaaagagtgctgacaccatcacagtatgttcccttctcaaccctggacatggttcagaaacagctaaagcagacaagaatctggggcagccaatattgtaccacctgccaaagcttggcacaaacaatctggaagccaaaaattgcacatactgtggaacagagcaagtggttctggcctccctgggatttggatcctggtttccagagctaagaacacaaagtcatgaaggtgaaggaggagaaggctggggtaggaaagctggaccacactaaccacaggaggagatttccggatcagaaagaatgccctcctatccacattgggcttccagtacccacttaccctcaaagaaaaactgaccagaagggacatctttcaggcctgcaaaaagtccactggggcctgcggccagaccagccacagcaggaactgactggcccagggagtggggcaagcagccaggacagcagcatggatcttatcagcaggactcggtccccagctgctgagcagctccaggacatcctgggggaggaagatgaggctcccaaccccaccctctttacagagatggatactctgcagcatgacggagaccagatggagtggaaggagtcagccaggtggataaagtttgaagaaaaggtagaggaaggcggcgaacgctggagcaagccccacgtgtccacactatccctgcacagcctcttcgagctccgtacctgcctgcagacggggacggtgctgctggatttggacagtggctccttaccacagatcatagatgatgtcattgagaagcagattgaggatggtctcctgcggccagagctccgggagagggtcagttacgtcctcctgaggaggcaccgccaccaaaccaagaagcccatccaccgctccttagctgacattgggaagtcagtctccaccacaaatcgcagtcctgcccggagccctggtgctggcccgagtctacaccactccacggaagacctgcggatgcggcagagtgcaaattacggacgtctgtgtcatgcccagagcagaagcatgaatgacatttctctcaccccaaacacagaccagcggaaaaacaaattcatgaagaagatccccaaggactcagaagcgtccaacgtgctcgtgggcgaggtggacttcctagaccagccattcatcgcgttcgtgcgcctcatccagtcggccatgctgggaggagtgaccgaggtgcctgtccccaccagatttctgtttatactactgggaccttctgggagagcaaaatcctacaatgaaattggccgtgccattgcaaccctcatggtagatgatctcttcagtgacgtggcctacaaagcccgcaatcgggaagatctgatcgcaggaattgatgaatttctggatgaggtcatcgtccttcctcctggagaatgggacccaaatatccggattgagccccccaagaaggtgccctctgctgacaagaggaaatctgtgttctccctagcagagctgggccagatgaatggctctgtgggaggaggcggcggagctcctggaggaggcaatggaggtggtggtggtggtggcagtggcggcggggctggcagtggcggggccggcggaacaagcagcggggatgatggagagatgccagccatgcatgaaatcggggaggaacttatctggacaggaaggttcttcggtggcctgtgtctggatatcaagaggaagttgccctggttcccaagtgacttctatgatggcttccacattcagtccatctctgccatcctattcatctacctcggctgtatcaccaacgcgatcacctttggtgggcttctgggggatgccaccgacaattatcagggagtgatggagagcttcctgggcactgccatggctggctccttgttctgcctcttctcgggacagcctctcatcattctcagcagcacggggcccatcctcatctttgagaagctcctcttcgacttcagcaaaggcaatggcctggactacatggagttccgcctctggattggcctacactcagctgtccagtgccttatcctagtggccacagatgccagctttatcatcaaatatatcacccgcttcaccgaggagggcttctccacccttatcagcttcatcttcatctacgatgccatcaagaagatgatcggtgccttcaagtactaccctatcaatatggacttcaagccaaacttcatcactacctacaagtgcgagtgtgtcgcccctgacacagtgaatacaaccgtgttcaatgcttcagccccattggcaccagacaccaacgcttctctgtacaacctccttaacctcacagcgttggactggtccctgctgagcaagaaggagtgtctgagctacggcgggcgcctgcttgggaattcctgcaagtttatcccagacctggcgctcatgtccttcatccttttctttgggacatactccatgaccctgaccctgaagaagttcaaattcagccgctattttcctaccaaggtccgggccctggtggctgacttttccattgttttctccatcctgatgttctgtggaatcgatgcctgttttggcctagaaactcccaagctgcatgtgcccagtgtcatcaagccaacgcggcctgaccgaggctggttcgtggccccctttgggaagaacccgtggtgggtatacccagcaagcatcctgcccgccctgctggtgaccatcctgatcttcatggaccagcagatcactgccgtcattgtcaaccggaaggagaacaaactgaagaaggctgccggctaccatctggacctgttctgggtgggcatcctcatggctttgtgctcctttatggggctcccctggtacgtggctgccacggtcatctccatcgcccacatcgacagcctcaagatggagacagagaccagtgcccctggggagcagccccagtttctgggagtcagggaacagagagtaaccggcatcatcgtcttcatcctgacgggaatctctgtcttcctggctcccatcctaaagtgtatccccctgccggtgctgtacggagtcttcctctacatgggcgtggcctccctgaatggcatccagatggggaccggagggtcagaattcaaaatccagaagaagctgactccattctgggaacgctgcaagctcttcctgatgccagccaagcaccagccggaccatgccttcctgcggcacgtgccgctgcgccggatccacctcttcaccctggtgcagatcctctgcctggcggtgctctggatcctcaaatccacggtggctgccatcatcttcccggtcatgatcctgggcctcatcatcgttcgaaggcttctggatttcatcttttcccagcacgacctggcctggattgacaacatcctcccagagaaggaaaaaaaggagacagacaagaagaggaagagaaaaaaaggggcccacgaggactgtgatgaggagccccagttccctcctccctcggttataaagattcccatggaaagtgtccaatcagatccccaaaacggtatccactgcattgccagaaaaagatcttccagttggagttactcactctgattcttccttcagtgacacagaacttgaccgaaggtaagcaggcatggattagagacataagctatacgtcacttacaaaaacatctccagcaaactatctaaacttctttaaactccagagaactatcaaaagaataacgccagctggcagaagaacgaggacggaggtaggtcaactcaattgtttcttctctttctgcctcaagctgcctagagcaggagctacttctgctcgcatgaaagccaaaagccaaaacagacaaacctatccctgcctcaagtattttacagattaagctcctagcttggcacaacctgttgtgatataagactgtaggacaggccaggtgcagtggctcacgcctgtaatcctagcattttgggaggccgaggcaggtggatcacttgaggtcaggagtttgagaccagcctggccaatgtgatgaaaccccatctctactaaaaacacaaaaattagccaggcatggtggcatgcacctgtaatcccagctactcaggaggctgaggcacaagaattgtttgaacccgagaggca

SEQ ID NO: 404076 - DNA, 2422 bp, Homo sapiens
tgggcgtcggtcgtcggtggggtcggagctgggcgcggagcccctcacagtgcagacgcccagcggcagcaggatgagtgcggaggcaagcgcccggcctctgcgggtgggctcccgtgtagaggtgattggaaaaggccaccgaggcactgtggcctatgttggagccacactgtttgccactggcaaatgggtaggcgtgattctggatgaagcaaagggcaaaaatgatggaactgttcaaggcaggaagtacttcacttgtgatgaagggcatggcatctttgtgcgccagtcccagatccaggtatttgaagatggagcagatactacttccccagagacacctgattcttctgcttcaaaagtcctcaaaagagagggaactgatacaactgcaaagactagcaaactgcccacgcgcccagccagtactggggtggctggggccagtagctccctgggcccctctggctcagcgtcagcaggtgagctgagcagcagtgagcccagcaccccggctcagactccgctggcagcacccatcatccccacgccggtcctcacctctcctggagcagtccccccgcttccttccccatccaaggaggaggagggactaagggctcaggtgcgggacctggaggagaaactagagaccctgagactgaaacgggcagaagacaaagcaaagctaaaagagctggagaaacacaaaatccagctggagcaggtgcaggaatggaagagcaaaatgcaggagcagcaggccgacctgcagcggcgcctcaaggaggcgagaaaggaagccaaggaggcgctggaggcaaaggaacgctatatggaggagatggctgatactgctgatgccattgagatggccactttggacaaggagatggctgaagagcgggctgagtccctgcagcaggaggtggaggcactgaaggagcgggtggacgagctcactactgacttagagatcctcaaggctgagattgaagagaagggctcagatggcgctgcatccagttatcagctcaagcagcttgaggagcagaatgcccgcctgaaggatgccctggtgaggatgcgggatctttcttcctcagagaagcaggagcatgtgaagctccagaagctcatggaaaagaagaaccaagagctggaagttgtgaggcaacagcgggagcgtctgcaggaggagctaagccaggcagagagcaccattgatgagctcaaggagcaggtggatgctgctctgggtgctgaggagatggtggagatgctgacagatcggaacctgaatctggaagagaaagtgcgcgagttgagggagactgtgggagacttggaagcgatgaatgagatgaacgatgagctgcaggagaatgcacgtgagacagaactggagctgcgggagcagctggacatggcaggcgcgcgggttcgtgaggcccagaagcgtgtggaggcagcccaggagacggttgcagactaccagcagaccatcaagaagtaccgccagctgaccgcccatctacaggatgtgaatcgggaactgacaaaccagcaggaagcatctgtggagaggcaacagcagccacctccagagacctttgacttcaaaatcaagtttgctgagactaaggcccatgccaaggcaattgagatggaattgaggcagatggaggtggcccaggccaatcgacacatgtccctgctgacagccttcatgcctgacagcttccttcggccaggtggggaccatgactgcgttctggtgctgttgctcatgcctcgtctcatttgcaaggcagagctgatccggaagcaggcccaggagaagtttgaactaagtgagaactgttcagagcggcctgggctgcgaggagctgctggggagcaactcagctttgctgctggactggtgtactcgctgagcctgctgcaggccacgctacaccgctatgagcatgccctctctcagtgcagtgtggatgtgtataagaaagtgggcagcctgtaccctgagatgagtgcccatgagcgctccttggatttcctcattgaactgctgcacaaggatcagctggatgagactgtcaatgtggagcctctcaccaaggccatcaagtactatcagccacctcagccagcccccaggtagaaacgtgggttaagctcttcctgccccgttcagcttcactcccaccctttcagcgtcctgccccttcaccttgacccgggttcccccactcccattccctggcctctgccataatttgttgttcaactgctccctccttcctgaggggcctcagggcttgtggggggtaggctgagaccccaccaccaaaggttaagtgaggtccccttgattgaggacttcaccccttgattaaagcaacttctgcttcag

SEQ ID NO: 404077 - DNA, 1497 bp, Homo sapiens
tgggcgtcggtcgtcggtggggtcggagctgggcgcggagcccctcacagtgcagacgcccagcggcagcaggatgagtgcggaggcaagcgcccggcctctgcgggtgggctcccgtgtagaggtgattggaaaaggccaccgaggcactgtggcctatgttggagccacactgtttgccactggcaaatgggtaggcgtgattctggatgaagcaaagggcaaaaatgatggaactgttcaaggcaggaagtacttcacttgtgatgaagggcatggcatctttgtgcgccagtcccagatccaggtatttgaagatggagcagatactacttccccagagacacctgattcttctgcttcaaaagtcctcaaaagagagggaactgatacaactgcaaagactagcaaactgcccacgcgcccagccagtactggggtggctggggccagtagctccctgggcccctctggctcagcgtcagcaggtgagctgagcagcagtgagcccagcaccccggctcagactccgctggcagcacccatcatccccacgccggtcctcacctctcctggagcagtccccccgcttccttccccatccaaggaggaggagggactaagggctcaggtgcgggacctggaggagaaactagagaccctgagactgaaacgggcagaagacaaagcaaagctaaaagagctggagaaacacaaaatccagctggagcaggtgcaggaatggaagagcaaaatgcaggagcagcaggccgacctgcagcggcgcctcaaggaggcgagaaaggaagccaaggaggcgctggaggcaaaggaacgctatatggaggagatggctgatactgctgatgccattgagatggccactttggacaaggagatggctgaagagcgggctgagtccctgcagcaggaggtggaggcactgaaggagcgggtggacgagctcactactgacttagagatcctcaaggctgagattgaagagaagggctcagatggcgctgcatccagttatcagctcaagcagcttgaggagcagaatgcccgcctgaaggatgccctggtgaggatgcgggatctttcttcctcagagaagcaggagcatgtgaagctccagaagctcatggaaaagaagaaccaagagctggaagttgtgaggcaacagcgggagcgtctgcaggaggagctaagccaggcagagagcaccattgatgagctcaaggagcaggtggatgctgctctgggtgctgaggagatggtggagatgctgacagatcggaacctgaatctggaagagaaagtgcgcgagttgagggagactgtgggagacttggaagcgatgaatgagatgaacgatgagctgtttggtttgaaccgtgaacaaaactgtgttttgagtttagctgacattaaagaaaaaagttcatcacgtgactgttaatgtaaacctggttattaaaataactatgaaattac

SEQ ID NO: 404078 - DNA, 619 bp, Homo sapiens
agattggtactggtggtcgttcttacaagcgtcgatgactggaacaaccctgtgcggtggttcccccaccacagaagctcttcccagcagtgttctttggcttcactgttcagtttgtttgattcacccactctctctcaagtacttgttctgttagagagtcttatacctgcacccctaacccttaatccagtagaactgcctgcctgcgccttggtgggcctcaccagctttctctccccacagctgccaagagcccgtcggcccaacttatggagcaagtggctcagcttaagtccctgagtgacaccgtcgagaagctcaaggatgaggtcctcaaggagacagtatctcagcgccctggagccacagtacccactgactttgccaccttcccttcatcagccttcctcagggccaaggaggagcagcaggatgacacagtctacatgggcaaagtgaccttctcatgtgcggctggttttggacagcgacaccggctggtgctgacccaggagcagcgttatcagacaggaaatagccacgtctacgatgaacgacttcgagctcggatcccttgagcttcgtccgtataagctctaatgggatctctagagtc

SEQ ID NO: 404079 - DNA, 501 bp, Homo sapiens
ggaacaggactcgaaactaggtctgctccaagcccagtctgtaacaccacccaatgctggtgctctttccatgctgggtgagaaccctggagggacctgaaccaaggcgagggcacagggccagtggaaagaaggtcccaaacacgtgggaccttcttttccgctgatgcaacatggatccagctgaaggaggcttttaataagaagttcccattttccacctatcagatgagcaaatatccaaaagttcactaataccatcagttggcaaggctaagaaacaaggacattcctggtggagtgtaaatgggcaataatctgtgaacattccatattagtctatccttttgctcggcaattttgcttctgggagtttatggaacagagatagctacgcagaactaaaagaccacatacacaaggttatttatgaaaacacaggccccagcacccattaaatactgggctgattaagtaaactaaggtacattgatacactag

SEQ ID NO: 404080 - DNA, 365 bp, Homo sapiens
gtgccctgagcggtttattagcaactaaatctgtgtgaaaggagccaggcagagctaacgaccacttccacttgtgaaccactcaattttgtgcatttagtctgtctggtgtttagaaatgaggaatctagcagcaatcagagtgggacaggggccatgctgggacacagaaaggggctggcaaatatcgcggaatcaaaacaagagcgagagaatggagtacctacttcacacctgatctcagttaatttgcacctcaagcctatcaggccagcattacttccattttacagaaaaaaaccaaggctcagagagatcaagtaatttgttaaggtcatgcaagccagtgtgggaaagtcacgaaa

SEQ ID NO: 404081 - DNA, 506 bp, Homo sapiens
tagattaatattattctagttctcaatactggcaacttattacctgggagcattctcagaagtatcaatcctttaccaatgcccccacctcttcactccaatcccccaactcccttattttgatcccattagtctgggggtgagataacaacacctgtgtttttttaatgccccagatgacgacacctgggaagagagaggcggatttgtaggtaacaatgcaacagggatcagggaatggcaggaattccctgcatgggtacacaccaaggctgtcacaggtggtggaacaaatgagagagcagaggccacagctaaatcacctcccaggcaggactggcatccaaaccctcttccaacattcagacatctataccaagagcaaagatcctgtcgttcaaagtgtcacctctcatctgccatcacccagtgtcccacccataacatcagccccgtgaactattgccagaagcaggagatggcagtttctttgctggcatttgtag

SEQ ID NO: 404082 - DNA, 328 bp, Homo sapiens
atgttgcaacttcactcctcacagtgtggcccacagacgagcatcatcagcatcacccgggagcttgttaaactgcagcatcaggccacatccagggcctgagtcagaatctgtattttgacaagatcccaagtgattcgtgtgcatactagtttgagaagctttggggaccacagtttcactaatggttttttttttttaatttcttttgagacggagtttcattcttgttgcccagggtagagtgcaatggcgcagtcttggctcactgcaacctccacctcccgggttgtagagattctcctgcctcagcctcctaagtagctgg

SEQ ID NO: 404083 - DNA, 1136 bp, Homo sapiens
atgcagggccgcgtggcagggagctgcgctcctctgggcctgctcctggtctgtcttcatctcccaggcctctttgcccggagcatcggtgttgtggaggagaaagtttcccaaaacttggggaccaacttgcctcagctcggacaaccttcctccactggcccctctaactctgaacatccgcagcccgctctggaccctaggtctaatgacttggcaagggttcctctgaagctcagcgtgcctgcatcagatggcttcccacctgcaggaggttctgcagtgcagaggtggcctccatcgtgggggctgcctgccatggattcctggccccctgaggatccttggcagatgatggctgctgcggctgaggaccgcctgggggaagcgctgcctgaagaactctcttacctctccagtgctgcggccctcgctccgggcagtggccctttgcctggggagtcttctcccgatgccacaggcctctcacccgaggcttcactcctccaccaggactcggagtccagacgactgccccgttctaattcactgggagccgggggaaaaatcctttcccaacgccctccctggtctctcatccacagggttctgcctgatcacccctggggtaccctgaatcccagtgtgtcctggggaggtggaggccctgggactggttggggaacgaggcccatgccacaccctgagggaatctggggtatcaataatcaacccccaggtaccagctggggaaatattaatcggtatccaggaggcagctggggaaatattaatcggtatccaggaggcagctgggggaatattaatcggtatccaggaggcagctgggggaatattcatctatacccaggtatcaataacccatttcctcctggagttctccgccctcctggctcttcttggaacatcccagctggcttccctaatcctccaagccctaggttgcagtggggctagagcacgatagagggaaacccaacattgggagttagagtcctgctcccgccccttgctgtgtgggctcaatccaggccctgttaacatgtttccagcactatccccacttttcagtgcctcccctgctcatctccaataaaataaaagcacttatggaa

SEQ ID NO: 404084 - DNA, 538 bp, Homo sapiens
gccccttttattcctgacacctcagcattctgtagagcggtacgcagaggcgacttaagattccccaaacatgtagatgtgggttgcctagagtggccatcaattaaaccctcctcagcaatagaccgcaaatgggtaagtaagaggttccagggactccctatttttacttttaggaagggactacgagacggcgtgaagacaaaatactgcccaacagagatgggtcagagaggtctccagacagcaagacttagttggtctccacttttcccggggcttaaagtgagttagatgtaagtcatcctaccttctggtacattttaaagtaaaaaatgagatgggtgggccaggacaacatcacttcaggacaggaagcattaagatccttccattcaagccccccacatatggactccttgctcaccaagtgaccatctcattctcctacacagaacacctgggtaaggacaggtatttgggcagaatgtccagtgggagccttggagcaagcggcagcaggaaagtagacaggagt

SEQ ID NO: 404085 - DNA, 352 bp, Homo sapiens
gtggagggagcctggaggggttggtctgccacaccaaatgctagggaggactcggaagcaaagaaacttctgatctggtcatttggaggtcaaagatgctatgcatggagtcaattaagcaggcaattgattggccctgtttctccatctgagaattgaagggcttggataagaccagaaaaggcacaaggtgcatcttgaaagagcagccatgcatcacaccgcctgcctgagtactgtgcctaaagccatacctcagctcactgggaaaggaccccacagtggatcagcaacgtctgccttgggcaagtcgggcaagagtatctcatccccggagcacattgtttctaca

SEQ ID NO: 404086 - DNA, 1042 bp, Homo sapiens
gggtggaagtcagtacatcccccacccccagattgatgtctcaggggctttggccccccttctaggtctagagccagattggggctgaggtggaagtaacatggagcttggttccctgagaggggctgggagctttttggaggggatatgagggtccatgaagctggtggctgggtcacctgggttccaaaggaccctgggccttgcaggagaccttgtgatctggattctctagaagggtgaggataatgggttgaacacctagattcccaagagagcgatggtgctctggggtctctggaaggggttgtcaaaggctgtcacttttaaatggaacaggggctgttggtgctggtctgtgaacagctggaggtcatatccctggcaccctgaggggctggtggaaggctgggatatatctgaatggggcagggactccgggggctatgtggtactgcagcccagtctgggcaggagttgggggcctacagtgagctctggatttggagggggtggtccctgtgggagcaggaactactgattccctggattcccaaggggaaggatcccttgttggattccagacttgggtggagtctttgagggtggatgtgttgcctggaggccttgttggtacctgtttgagctggggccaagggaggcggattgacccctgcagcctgactggatttgggagccgcccatctttagctggccaccttggccttctctctctagtggcaccagggaccctgctctgcctccccactccttcccttcctcccctttccctcctcccacccctccattaccggctgcctggtgctgaattattgatggcccctgttgttgggaaatgacaacaaccgcagtcctcttcctctcttcatctgtctgctcctcctgttgctcgtcttccaacactgctctcttgtgttctatatctctcttttttatctcctctcctatacttcaccttttcgcttaacgcatattattatcactcttcgacgcattgtcatacctccatttccttatcccg

SEQ ID NO: 404087 - DNA, 676 bp, Homo sapiens
gggtggaagtcagtacatcccccacccccagattgatgtctcaggggctttggccccccttctaggtctagagccagattggggctgaggtggaagtaacatggagcttggttccctgagaggggctgggagctttttggaggggatatgagggtccatgaagctggtggctgggtcacctgggttccaaaggaccctgggccttgcaggagaccttgtgatctggattctctagaagggtgaggataatgggttgaacacctagattcccaagagagcgatggtgctctggggtctctggaaggggttgtcaaaggctgtcacttttaaatggaacaggggctgttggtgctggtctgtgaacagctggaggtcatatccctggcactccttcccttcctcccctttccctcctcaccgactaccgcgccccccgacgcagccaacgcagaactctccaccccaaacgcgttgatagccatcggggcgtagggcacgtcagcgtgaggagggcacgcgagctgacagcagcgagcacacggcagacgactatggcaccaacgcgtatgcaccagcccccccacccacagacccgcactacacaccctcccccgcgccctcccacaccacccccccccaccacacgagaccccacccaccaaccaacaccactcac

SEQ ID NO: 404088 - DNA, 378 bp, Homo sapiens
tgaaggcaggggtcatgtttggcgtctgtcaccctttgcgagttgcaacctggagaccctggaggatgttatgatgagtgaaataacctaatcacaaaaggactaatactccacaaattcacttatatgaggagtctaggagtcaaattcctagagactgaaagaacggtggttgtcaggggctggggagaatggggagttcatatttaatgggggcagagtttcagttttgccagacaagaataacctggaaatggatggtgtgatgtttgcacaatgtgaacgtactttactccactatacacttgaaagtgggtgcaatgggaaagtttatttgatgagttttttaccacaattaaaaatataacaaaataagca

SEQ ID NO: 404089 - DNA, 274 bp, Homo sapiens
aaaggaaatgaagaacacatggcctagagcaccatgctgctcatcctggttagacacaactgcaagcacatcagctttgctctccacactgagtccccaacgttctcactgcaaagaactctcaggcttgcttctctgaaaaatacaattgctggcaactcaagatgcacaaagcaggaccatttattgcatctcttatcaaggcatatctgatgacaagtcagccttactcagcaaaatctcattacagaacattcatctcacacaattttat

SEQ ID NO: 404090 - DNA, 438 bp, Homo sapiens
attttatcatattaaaaagctctgtgcagcaaagggaacaatgaacagagtgaaaatacaatatcaaaaagggaagaaaatatttgcaagctatccaacaggggattaatatccaggttatataaggtgctcaagcaactcaacagcaaaaaaattaataaataaataatccaactgaaagatgggcaaacgatctgaacaggtgtctcacaaaacacacacacacacacacacacacatcaacatcactaatcatcagggaaatgtaaatcaaaaccactgtggagtatcatctccagatagaatggctattatcaaaaatagaaatattagcaaatgctggtggggatatggagaaggggaactcttctacactcatatatggaagctaaaaatagtgattttacagtggtaaacagtagaatagaggatactaga

SEQ ID NO: 404091 - DNA, 206 bp, Homo sapiens
aaagcaccaagcaatttgcttttgctggtgaaggaggtataaaaggtagagttgcaaaggctggggatggagctttaggctgggatcagcgcccaatgggctgggatgacaagtgcttggggcacattggcagctgcgaaaagctcgctctgatgcctgtgtggggacagatttgggggcaagaggactctccagcaatctgtgat

SEQ ID NO: 404092 - DNA, 366 bp, Homo sapiens
gaaaatgacttgggaagaggcagggcgctcaggggtttttgtccttccagctatcaagtgataacctctgcttttaaatttccatagtgtgcagccctgtgtaggtctcctgcgtggctctctggtgtgagtgtgtgcgcgcgtgcaaacgctgcgagcgaattttaaagggcattccgaggatttcatttttcagcggagggtatttgtgactcagcactgagggctgcagactcgagggctggtggctctgcccactttatgcttgcacacacgtgcttgccggggcaccctgagcccaacggcacgaagtcaactaacacagtcccaattgggtggactcttgagttttttccttacttaaaa

SEQ ID NO: 404093 - DNA, 980 bp, Homo sapiens
gataaattcacctttagttttgaggcacagcaacccttattatattatagctcttacttatattcacagttctccaaggaaaaatcaaagctaattcttaaagaaaaatgtttagcagtcctttgaataaattttaagaaaataataggtaaaaccgatctctggacatagtttatgtgagttttcagaggtctttgcaagtgtcttagtaaaagtttaaagaaaataaccatagtgtaagtaggaaagtcttgacatgaggttgtcagcttggccataggaaataatcaatttactgcctttcagaattcactgtttatttggctttttgctgttcttgtgtgtcgaattccttggtgggctgaagcactttcttaatgtttggagaaaatggcagaaaatagtcttttgaacaaattccatctagtagcagtttggtggggatgagtaggtgaggtaagatgttagagggctgggtaatagttgtgaataaaccatcaaaggactttacataccccacctttcaccccagattggtttggcttaaagctgacaatgacagcaggatcttgaattagaaggtccaaagctcatagggtggtttattttcactgtttattcatataagtgatgttattgggtgactccaaacacatggttctcctacagatgatatcacctaaatgccaaacactgtaaagtattcacaggtacaaaatctttttattctagtaagtgataagttaaagagaaaattacattgcactgaagacgtatgatggtagagggaaataaaaagtactactaaagtgcataggagttgcacctaggctagacctggggtaagtttgtgtttgtaggcactggggacacttgatatcctagctgaatccaaaagaacttagatgatgtggcaataaggataggatcagtggagttcagtgaagagagaatgctatgtgcaattaattgtctgtatc

SEQ ID NO: 404094 - DNA, 436 bp, Homo sapiens
attgatttaattgacatttacagaatatttctcctacaacagtgggatatataatatattctgttcaagtatacatggaacgttaatcaaggcagaccatatccagggtcataaaattctttcaatatcaaagaactgaaatcctacaacatatattttctaactataataaaattaaactagaaatcagtagtaaaggtaacaagaaaatcttagaaattaaattacatacttctaaataatccatagttcaaaggaagtctcaaggaaaatttaaaaatattctaaacaaaaataagaatatagcatatcaaaatctgtgtgatacagctaaagtagtccttagagtgaaacttacagcatgaaatgctcatattaaaatagaacaatgatctcaaatctacaagttaagcttccaccacaagaaacaagaaaa

SEQ ID NO: 404095 - DNA, 434 bp, Homo sapiens
gtgactctatcatggagcaactgtaaggacccattgagataatgttcatgtagtgctaaaatggagcatcacgcacatggaaatcctttaccatacatgttagtatgattgttgcccttgcaattcatataaggttaattggtaatcagcagtacatgagttttgaagttgtaatcaggttgtacttccttaaaatcagttgtatgattccttaaaagccaagaatgaatcatgatcggttaacatttctgttatctttctgtgtgtctaaattctttataatatttacctcacaagtgtcccagcaaagtgggattggtttagctttgctcactgagaggatgagacaaaaacatttcttaaatttagaataggatgattttatgatgttttacccaaatgatcaatccaagtaaacaaaccaatttcttatg

SEQ ID NO: 404096 - DNA, 516 bp, Homo sapiens
ctgctgtttttaaaccatggagcagctgggttctctatggaccacggagcattagtgagagattggcttccaatgtgttagcacgaggtaatgtaaacaaacagtccaagttttaattcctcttttatgttgttttgcactatccttaagggcaagagagggcaaggtggaggggctaagtttgacttcatgtggctcaagaatcagtccctctacttgttctcaaggttgctagaaactggttgcttagattttctctttctttcttagcatgataaagtatcaaacaatatttttttgtgaatttttaaaaccgatacataatgcttgtggatatttctgggatgcatgtgatattttgatacatgcatacaatgtgtgatgatcagcaccacctcaaacacttatcatttttttgggaacattccaaatctttcttctagctattttgaaatatataattatgggtttttttttttaggcctaaggaattccacagaaaaagataatgggaaa

SEQ ID NO: 404097 - DNA, 91 bp, Homo sapiens
ctgggctggaggaaacctgcctctccagggacatgggaaaagaactcatcatgggaaaaagaaccatcttctgcctcaaagacagcatggt

SEQ ID NO: 404098 - DNA, 360 bp, Homo sapiens
agagtgggtagttgagtaggatgagacttctttggaggcgaggctaactacattaaactctgggaagggagggcttccgtcggaccctgggagaaaggcaggtctggagaggaaagactggcttggggggcctgcgcgtccggctctggaaggcaactcctactgggggcggcgcgcagccggcctggcgggcgagcctcgtgcggcccgggggtgcggccggcccgcgcgagctcaacaggagctcacctgggatgcgtgcggccctgtgggaggaaacttcctgggtaggtgaaagctgccccgcgggagccggcccggcaccggcagagcgcgaacgggtcacagtccactcggcag

SEQ ID NO: 404099 - DNA, 368 bp, Homo sapiens
gacccccccatcgttgctcctaagatccttaggacccacctggaggactgtgggtgttaggtgtccaagtagaaagttcaaatcttccgaccttacgtgggatttacgatccgacgggtccgaacgcagctcgggaacagaaagaaagcaggttatttgcaatctaccggagcttaagggcagaaggcaggtgagagaattcttaggagctgtggggttttgtaggctgtggatcccaaactgcagtattagccaagcctttgtatgaggtcacaaatggggcggggacccggaacttttgaaatggggatcccaacaacagcaagtttttcatgagttacaagaaaatcttctggcagcccacccga

SEQ ID NO: 404100 - DNA, 497 bp, Homo sapiens
catataatggaatactatacaaccttaaaaataaaggaaaacctgttacaacctacagcatgaaagaaccctgagaatattatgctaagtgaaataagctattcacaaaaggacagatgcagcatttttctatttatataaggtatctaatgatcatagatatacaaagtagaatggtggtcaccaggggccgggagaagggagaaaggggagtttcagttctgcaaggtgagaatgttttgaagatctgtttcataacaatgttaatatacttacattactgaactgtacacttaaaatggttgatagtaaattttatttttttaaccacaattaaaaaaaaaaacccaaatggacattgtaaaagtggaaaatacctaaaattaagaaatcaccagagggactagcaggagactcaggtatagcagaagggatcagtgacaaagacaggttgataaaatataccctaaatgaagcaaagagttaaaaaaaaaaga

SEQ ID NO: 404101 - DNA, 418 bp, Homo sapiens
ctcgctcaaggtcaggagctcaagttcagcctgggcaacatagcaagaccccatttctaaacaaataaacaaaaaaccaggcatccaaggacttcatatgggcttcgtgactgtagtctggagtggtatctgatttacagtatatagtgcatatctttttatgagagtttggagaattttccagtctgaagctagaagtatagtggcagagttgaattttcttcttgaggaaaaggataggtagaacagttaaaagtattttgtaggatgatgttttggattatatattgtaactgattttattacaagagcataactaaacagaacactaatagcagaagaaaaaagtatggtagcttaagttgaatggaaaaaagtagaacctgtttgaaatttctggatggtgttttggtcaaaa

SEQ ID NO: 404102 - DNA, 514 bp, Homo sapiens
  misc_feature (183)..(183): n is a, c, g, or t
  misc_feature (245)..(245): n is a, c, g, or t
cagagaattttagatccagcaaaactatccttcaaaactataagaaaggatgagcatggtggctcacgcctgtaatcccagtactttgggaggctgaggcaggaggattgcctgagcccgggagtttgagaccagcctgggcaacatggcaaaaagccatctctacaaaaaatacaacaaacngctgggtgtggtggcatgtgcctgtggtcccagctactcgggaggctgaggcaggaggatcncttgagtctggcaggttgaggccttgattgtgtcactgcactcctacttgggtgacacagtgagacaccctcaaaaaaaaaaaaaagtggaaattaaaacatacccagataaaaactaagagaattcactgctagcagacctgccttaaaagaaatgctaaaagacatccttcagactgaaatgaaaggacactagacaataactccaatccacatgaggaaataaaaaacatcattaaaggtaactacataggtaaatatgaaatata

SEQ ID NO: 404103 - DNA, 404 bp, Homo sapiens
ggtttatggtggtgatttaaggccaagagacagactccaggctcatctagtaacactcaggctactccagttcaaaggcagccacgtgacagttcctgaacatatggttgttgaataaatgaatgaaaaatgagaaaaccaggagctctgatacttaaccacaatgatgctgctgaatttgaattgggatcgtatgtagttcctcatctaggaactagtgatgagtcaaatataaattaagatatagtttggaaatattaagaaatatgtattgattttaaccagaaatatatgatctgaaagacagtagaatgtaattattggtctgtttacctgacattttgcttcccattatgtatatgacgtgaaaatctttattaaaggaaagtatttttgtatcatgc

SEQ ID NO: 404104 - DNA, 676 bp, Homo sapiens
tgtcttccatgtacacatacatgcacatatgcatgcacacacacacacacacacacacacatactcttacataactgaaatgacgatatgcttctggtaaatactacataattattttgtaagttaatatttattattctttaacagctcatggtaaatgaccatatcatatggcattccattgatgtgccataatctatttaactctctgttgtttcatctttatgttgcttccagttttccacttttactaataacacatttttacagaaatatttattcaactttctaaatagattctttgaataaatcctaaaagggaaaacaatgggttcaaggggttcttggtacatgttgctaaattatttttcataaagattctaacaatttttaccctggaagcagtaagtattactatcatttttaaaaatacatgttactttggtgtttatcaatgatattggtgataaattggtattaccttgatggctagtgagctttgacacaatcccacatgtatgctcacatatacttattcttctataaatgttttgttcatgttcatttctcagtttttggaaatttgctctttcatgtttgtcttttctctatttattgacatttatctttcccacggctttaaggtggaaaaagaaacatgacatgtccgttatgt

SEQ ID NO: 404105 - DNA, 455 bp, Homo sapiens
ggtcataagtgtaacagataaatacattagggaaatggaaaacattcagcaaccacaaggctggcaggttgagagggctgggggctgctgattcaagagctcttcctcctgctagtttatcatccacacttcagagatctttatggaaatgaccaataagccagactagtgcaaataagtccactgaggtagttcttaatacccattcttatcaaattgaatcacgatggaactaatcttctacaaattatttcagagagttgacattttatgtgcacattaaacctacctggaaaggggccatcaaactggagaggagcacagctgatttctgtcaggcttcaacttggtatttattaagctaagtctgtatatcctttagcactgagtgaaacatgaccatccttaacttacccaaggtagaggcagcaggagaaaacaaagcagctaggaaa

SEQ ID NO: 404106 - DNA, 362 bp, Homo sapiens
atgtatagttatgattaaatacggaaatctctcctattttttcaaccgatcagacaatgaggcagtttaggaattgagtgtggtatgatttgattactagtaaattgatgttgaaaacgtaaataatctttgctaaattgatgggaacaaggacgtatttttattttattagttatcctggtaatgagatataatgggaacatttaaacttattgccattcttctaaagaaatgttttttgtttggaaatattgagtattctgatacatggagaattataaagggaagctgaaagagttactgacattttcctggaagtagctgtgtaagagtacagaaaagtctttttgcattaaatccaa

SEQ ID NO: 404107 - DNA, 247 bp, Homo sapiens
atggggccttttggaggggatggagtcaggagggcgagtgggattgtgggattagcgctgccatgaaagggcttgagggagcctgttagtcccgcttgcctgtccgccatgtgaggatgcagtaacaaagtgccatccttaaagccgagaccaacccctcatcagacactgactctgctggcaccttgatcttggccttcccagaccccgaaactgtaagcaataaattcctgttgcttataaatta

SEQ ID NO: 404108 - DNA, 276 bp, Homo sapiens
ctcgtttgactgtcaaagtgtaccgtttgcattcccaccagcaattaatgagttcctgttgctccacaccctcaccagcatttggtggtgtaagcgttctgggttttggctatgctaatggttatgtggtggtacctgattgattgacatttgcagtcccctcatgacatatgttgaacatcttttcatatgcttgcttcttggtaagttgtcttttcaggtcttttgcctgttgtttaattgggtatttctgattattgaattttaagtgttgtc

SEQ ID NO: 404109 - DNA, 336 bp, Homo sapiens
aatatttcataactaggtatgccttatgtctttttgtgaacaacggcttttctgttcttaatactgttgtccatttattaaaaatatatatttaatatttattacatgcaaatgttatctgtaggtaagactatgaagatgttctgtagcttaatttgaatgaattgtatattcaaacatgtttagtatgactagttacaagatgactaataatttaaaaatgcctgtgtgggtcaaaggaatcatctatgctaatgtatttgagccaaattatattatgttaatgacatagtgtgttattttacttagaattaaacaaacatataatgaaagata

SEQ ID NO: 404110 - DNA, 711 bp, Homo sapiens
taggtggaaagcacgtgagtgtgttcatggagtagtgtacaaggccccaggtgggatgacgtgagaaggccccaggtgggatgacgtgagtgtgttcatggagtagtgtacaaggccccaggtgggatgaattgagcatgttcagggagcagagagaatgctgctctgtccagtacctgtgagcaggggaggtgggggcgggaggaagtgagaggtaggatctggtaccatctcgagaggctgcagcagggacacttgaagatctagtgacacctaagagctccctgttgctgctgctgggggagcaggaagggggatcaccctgacaagactggtggcagctgggacaagagtcgtggctgaggaggagggaaggaggtcagcttcccgatgtgtctgtgggccggcaggactcaccgccgcaggcagcaggctcaggcacctttggtaactaggcccacaacagatcctgaactccctgtacgtcgcatgcacatctacagactaaataccaaggagttttctaaaaaggccaatgacaggtcaggtggacctgaattgttaccactaattaggataaaagaggtttacagatgccttgggccagggcagtttcccggaaagtctgaaaccagctctcaggtgtgttttgtggaagacacggctcctctggcacagggctgtgaaactagctctcagacatcggtgaaa

SEQ ID NO: 404111 - DNA, 417 bp, Homo sapiens
cgagggtctatgatgtgcctacagtttggtgagggtctatgattttcctgtgctttgtccacacccttcatcttcagaaccacgtgaggtcggaattgatagtctcactttgcaaatgagaaaacgttggctcagagagttgcacatggcaagactcagcttcaacctgagtgtttcccaagctcagacatgaaccttcccctacacaaatgggccttatgggaagagaagagttatttaattctgggagaaatgcatatcccaggaaagtacagttgacccttgaacagcatgtgtttgaactgtgcaggtccattttatatgctgatttctttcaataaacatattagaaacatttttggagatttgtgacaatgttttaaaacttgcaaatgaaccatgtagcctagaaatatc

SEQ ID NO: 404112 - DNA, 623 bp, Homo sapiens
acttttcaggggaagagagattccagcaaagatcctgggatggagaaggtaacattttgagagaaaggtgagtaagaagttggcagaagcccagggggtcctgttgaagagtcagagttggacgccttctagctcagcttggttgccagcgcagggaacagagggctgtagctctttgcatcttatactcaaggctgtctgcaaagtgattcagaatggtttgagcccctgatcatttcaatgcggggtagctagggcatatgcctacgggagccaggaaattacccaagtgctggaatggccggggggctaattggagaggaccctgtgtttcccactctcctccctcagtattgccagaaggtcagatttttttctgagaagccagaaatgtgaatttttattgaaagttcccaacttctacaagtttttttaaatactaattacagaaataaaacttagaaccttttgggggccaattttgggggtgatggacatgtcctggagttagatagtggtaatagttgcacaacattgtgaatatagtaaaaaccactgaattgtagatttttaaaatgcttacagtggtgaattttatgtgatatgaattttatcttaattag

SEQ ID NO: 404113 - DNA, 449 bp, Homo sapiens
  misc_feature (13)..(13): n is a, c, g, or t
  misc_feature (53)..(53): n is a, c, g, or t
agaagagaggggnaaagagaggaagtaaattaaaaatataaatagtttagctncgtgcaccgaactaacctggaaaacctccattctactctctgcttctatgagtctattaacagatgaatggatatagaaaatacggtgtacatatgcaatggaatattattcaggcataaaaaaagaaggaaaccctgccatttgcagcaagatggatgaacctgcaggacattgtgctaagtgaaataagccaaacactgaagcttctctagattgatgttcctcccactgtgtttccctgacctgactcctcaccttccatcctcagatgaagcaccacttcacataagctttgcctgattcgtcgtttctgcctacaccacatatttccctcaggctttactgaacactacgcacatatgcatttattaaatcacttttaacacttttctcac

SEQ ID NO: 404114 - DNA, 436 bp, Homo sapiens
  misc_feature (38)..(40): n is a, c, g, or t
acttgtcaccacagacaacatccaaaccaccaccgcgnnngtctacgctgaccgacctggaaaacctccattctactctctgcttctatgagtctattaacagatgaatggatatagaaaatacggtgtacatatgcaatggaatattattcaggcataaaaaaagaaggaaaccctgccatttgcagcaagatggatgaacctgcaggacattgtgctaagtgaaataagccaaacactgaagcttctctagattgatgttcctcccactgtgtttccctgacctgactcctcaccttccatcctcagatgaagcaccacttcacataagctttgcctgattcgtcgtttctgcctacaccacatatttccctcaggctttactgaacactacgcacatatgcatttattaaatcacttttaacacttttctcac

SEQ ID NO: 404115 - DNA, 957 bp, Homo sapiens
  misc_feature (38)..(40): n is a, c, g, or t
acttgtcaccacagacaacatccaaaccaccaccgcgnnngtctacgctgaccgacctggaaaacctccattctactctctgcttctatgagtctattaacagatgaatggatatagaaaatacggtgtacatatgcaatggaatattattcaggcataaaaaaagaaggaaaccctgccatttgcagcaagatggatgaacctgcaggacattgtgctaagtgaaataagccaaacactgaagcttctctagattgatgttcctcccactgtgtttccctgacctgactcctcaccttccatcctcagatgaagcaccacttcacataagctttgcctgattcgtcgtttctgcctacaccacatatttccctcaggctttactgaacactacgcacatatgcatttattaaatcacttttaacacttttctcacattcctcatgttgcattaaaattattgctttgattgttttttaattcgactgcaagctccactccttgtacctggcttctctcactgaacttgacccacaatagagcaaaacaaaacaaacaacctcatgaaacctatgagagtttagatagtgctcaggctggttgtacaaatgaggaaacaaatactcagagaggtggactcacttccataaggttacacagcaagtaagatggtcgaagcttgcattaaaaactgggttttctggagccaaatcctatacgtccagctaattaaggtaaaagaagggaatctgggcctgcaataccacagcactggcagcctctgcacaggtgtcactttgagcctctgcagatctctgcatgagccccttcccctctggccagaaaccgaagcttatctgtggtttcaaagggccaagaactggacagagtttatcataggaatggagaatgttgtctgcttctgtcaaatttcaaaattttgcagttttgtctcat

SEQ ID NO: 404116 - DNA, 530 bp, Homo sapiens
  misc_feature (38)..(40): n is a, c, g, or t
acttgtcaccacagacaacatccaaaccaccaccgcgnnngtctacgctgaccgacctggaaaacctccattctactctctgcttctatgagtctattaacagatgaatggatatagaaaatacggtgtacatatgcaatggaatattattcaggcataaaaaaagaaggaaaccctgccatttgcagcaagatggatgaacctgcaggacattgtgctaagtgaaataagccaaacactgaagcttctctagattgatgttcctcccactgtgtttccctgacctgactcctcaccttccatcctcagatgaagcaccacttcacataagctttgcctgattcgtcgtttctgcctacaccacatatttccctcaggctttactgaacactacgcacatatgcatttattaaatcacttttaacacttttctcacattcctcatgttgcattaaaattattgctttgattgtttttcctcaacaaaaacaaaaaaatggccttcgttggcctcacagggggacccctgc

SEQ ID NO: 404117 - DNA, 423 bp, Homo sapiens
tctgtcttcccatcaagtctgatcatagagacaacagagaagctactgaaataaagccattcaaagtgttttcaccctttgctgaggaaatgtggaaccaaatatacagaaggaggccttgagcccccacatagacaactgccatgttataataataacaagtcttagcttctctttccactggctcagcaggatggatcaaagccacccgccatggccactgcaggtagaatagatggtcacctatgggggatgacctcaagagctccaggtgtctgccgtgaggcatgacagtgcctcagattcctcacttagaatcctcatgtttgcaatcccaccacttttagaagctgaggtgagaggatcacttgaggctaggcattcaagactagcctgggcaacacagtgagactttatctctac

SEQ ID NO: 404118 - DNA, 841 bp, Homo sapiens
aaataattctttaaagctggaagacgcaagtttctatcattctctacgaagttctaacctagatcttgagagaagctggaagacggggatgatttttctagaaggatcccctgcccccagtccctacccccgcttctgattcagaagctcctctggggcctccctggcaccctgcatgtgtctacaattcaaccccgaccacactttgctgcaatgtcactggttcacactcgggatccccaagagactatgagcttcttgaaggcagagctatgtcccattcatttctgcaccccaagcacccagaaaaggccatggcagggaatttgacccaaaaaagcactttgatgactgagcaatgaagtgactgggtgggcagagcttaggctgaaggaggcgggctgagctgcacctggggtggagagagcctgagtccactcctagttaaggtctgtcaaacccatctgcaccgctcatctgccgcaggggaggctgtgagggggcagaagcagctcctctccctgagggctagccatctggagggagacctacagacctaatgtttatgctgcatgctggaatagaaggaatcgtgtggtgctgagggaacctgtcccctaacccagaccagaggaggtccttccataagagttccctagagaaggtggcaccagagccaattcattcattcattcactcgagagatatttactaagcactcactgagtgccagcactattgtcagtcctggggatccaagagtgaaccaaataaagagggccagtgccttcgtgaaggttacatcctagtgtaagaaacaagtaataaacaagtgtgaaac

SEQ ID NO: 404119 - DNA, 731 bp, Homo sapiens
cttgctcacatatgtaacatttggctggctgttagctgaggtaacagggctgcctggactgcctgtctctcatcatctatgaggctagcctgttcttgttcacatggtggatttgcagggttccaggaagacagtgggaatgtcgaagagcttgccaccttctactggccccagcatgtaactggcaaggccagacttaaggggtagagacatagattctacttttgaaggaaagggtctcaaaattacattacaagagtgtggatacaggcagggaaagaatttgtgaccacttttccaaagtaccacacttggaaattttaaattatgaatggaccgagttaaccaacaaggcttttttatttgtccattggttttttgccctaatgaaaaaaggttttgccttgctttttgactgagtaataataatgacattcttggatttcactggatccccacaacccactatgtgagaatattattgtttccacagttttaaaggtgaagaaattgacattctggcagattaataataaccagcacatagtatacagtcaacactgacgttggagcatctagaaggttaggcatattgatgccttattgaataaatgaataaatagtaggtggcagttttgaaattcaaacttaggtttgccaattccggaggtgattctgggatgcttcgttttattcattaatgctcaaatggatgctctggtagattttta

SEQ ID NO: 404120 - DNA, 537 bp, Homo sapiens
atgccaggccatggacagaacaagcccagtgggcccaagtaaaactcaggcaaaggcgccatcagccacagacgtttctggctggaaaagtgacaccccaaagatctcataacaccaggcccaactgtccagactaaaaattataaaggagtcactcatgctcaccaaaccgaaattgagctgtcaagaaatcgagagaatgaatttcccaaagaggccagtttcaactgacgtcgtatgaagctctctctgttttaatctttcatctgaagtaacctgatgttaaccaatcagcttatttttccattattctatctccctgtccccaccctaaaatgaccaatccactttttttctggagcaaccctattaactgagaccaatccactttttgttctttttttcttctttatccaaccccttttctgtctataaagccaatctcctctgcttcactcattagaacacttattctattttatagaaggaagtgttgcccaatgctagaatcacaataaacccaattgagatctttaa

SEQ ID NO: 404121 - DNA, 580 bp, Homo sapiens
acccctctggttctggaagaaattccaagtgaggcactgtgctagatcctgaccatgggttccagtggaaggtagaatctgtgtgggctcaggagcctgggatgggaggcttccccaactgatggattcagaggactctgacacatctgtggcagccagttctttttctaccctgttgaagatactcatatgtgagggcagtgtgtgccttctatgggactgctttgatcactgccaagatgtcacagaagtctttaattctacaaatgattggtttcaggttcttagacaaacaagctacattttgcttctggatggcagctctctgtgtggaacaatgaatgagggttcaaagtagtcttcccttcagatacctgagtctgcatggactaagacgtagccataaatctaagagcccacgaattcacatttcactgcctcatgactagtgctgatatgggaacagctggatcaaggctttctctcctgaaaacaaatttgccagccaatcagtagtgtgaaaaatatttcaagaaaatactctatctacccaagagaacaaattgtgtgcacagatctt

SEQ ID NO: 404122 - DNA, 262 bp, Homo sapiens
gctgacagaagccagattacttgcagcctaagggccacagtaaggagtttctattttcatttaaggggattgggaaactattagaagggagtttttaaaagcaagacagcgacatgatctgattaatttttttagaaagctcactttggtttctgggaggaaaacagagggtcaggacagaatcaggaaggaaagttaggagacaatccatttgtccagatgagaaatggtgacatgaatgtggtggtggtggtggtagtga

SEQ ID NO: 404123 - DNA, 626 bp, Homo sapiens
gcaaattacagcctctttggcttctgaggatactagtctttctccccttaactcagggaaactgctggactcagttttgattcttcctcctgtgctacagccctgggcaacagagcaagaccctccctcaaaaaaacaaacaaaaaataagtaaaaaatacaaaaaaattaaaaatgttctgttttcatacgcacatgtctgcctcactcatagttttatttttataaattcaagcacacagtagagactctctttctgactttatttgcagctacttttagaaaaaagaatctgactggctcagcacagccaatggttttgcttccctagtgccaagtgttcattcctgatccaagtagctgtggtcaagggagcaggatcacaggggatgagcatgtctccagggccacactgctgggtccaagtgggggaagttttcagaagagaggggtgtagattggacagtatcataaaatgaatgtagtacagagggaagccagaagtgaaagtaagagagagggtgtttctagaaaagaaaagtagttaacattgttattctgctaagagaacaagcaagataagtactgaaatttatagaagacttagaaaataaattaaaaaaaga

SEQ ID NO: 404124 - DNA, 571 bp, Homo sapiens
ggtggttgaggctgcagtgaactgtaacggtgccattgtactccagcctgggcaacagagcaagaccctccctcaaaaaaacaaacaaaaaataagtaaaaaatacaaaaaaattaaaaatgttctgttttcatacgcacatgtctgcctcactcatagttttatttttataaattcaagcacacagtagagactctctttctgactttatttgcagctacttttagaaaaaagaatctgactggctcagcacagccaatggttttgcttccctagtgccaagtgttcattcctgatccaagtagctgtggtcaagggagcaggatcacaggggatgagcatgtctccagggccacactgctgggtccaagtgggggaagttttcagaagagaggggtgtagattggacagtatcataaaatgaatgtagtacagagggaagccagaagtgaaagtaagagagagggtgtttctagaaaagaaaagtagttaacattgttattctgctaagagaacaagcaagataagtactgaaatttatagaagacttagaaaataaattaaaaaaaga

SEQ ID NO: 404125 - DNA, 817 bp, Homo sapiens
aaatagcaaataatgaaagtgggtcagatttggggaaagtggcaacggcatggagatgacttcagttttaggtatttcgagtttgaagtgtctataagtcatctggagctgtccaggagatggttctatacatgaagatcaggaccagtttcttgtcatcagcatataggtgcaaaatgagtacacacagaagaagagagggtctgctgggcacagtggtgcaggtctgtaatcccagaactttgggaggctgagaatggtggattgcttgagcccaggagctcgaaaccagcctgggcaacagagcaagaccctccctcaaaaaaacaaacaaaaaataagtaaaaaatacaaaaaaattaaaaatgttctgttttcatacgcacatgtctgcctcactcatagttttatttttataaattcaagcacacagtagagactctctttctgactttatttgcagctacttttagaaaaaagaatctgactggctcagcacagccaatggttttgcttccctagtgccaagtgttcattcctgatccaagtagctgtggtcaagggagcaggatcacaggggatgagcatgtctccagggccacactgctgggtccaagtgggggaagttttcagaagagaggggtgtagattggacagtatcataaaatgaatgtagtacagagggaagccagaagtgaaagtaagagagagggtgtttctagaaaagaaaagtagttaacattgttattctgctaagagaacaagcaagataagtactgaaatttatagaagacttagaaaataaattaaaaaaaga

SEQ ID NO: 404126 - DNA, 327 bp, Homo sapiens
aaatagcaaataatgaaagtgggtcagatttggggaaagtggcaacggcatggagatgacttcagttttaggtatttcgagtttgaagtgtctataagtcatctggagctgtccaggagatggttctatacatgaagatcaggaccagtttcttgtcatcagcatataggtgcaaaatgagtacacacagaagaagagagggtctgctgggcacagtggtgcaggtctgtaatcccagaactttgggaggctgagaatggtggattgcttgagcccaggagctcgaaaccagcttgggcaacatggtgaaatgccattttttttttt

SEQ ID NO: 404127 - DNA, 1139 bp, Homo sapiens
gaatcaaagaatattaatacagagaagtcaacaaaactcaaaggaaggcaagcagagaggaaaagagggaaaaaataactacaagacagacagaaaaataataaaatggcagtagtaagtccttccctatcaataattacttcaaatataaatggattaaacttaccaatcaaaagacatagagggctgaacatattaaattttaaaaagcccagattcaactatatgctgtctcaagagtctcactttagatttaagtacatacataaactgaaggtgaagagatgaaaaaagatattccaagcaaatggcagccaaaagagagtatgggtaactatatcagacaaaatagactttaagtcaaaaactgtcataagagacaaagaaggacattatataataaaaggatcaactcaccaagaaaatacgatatctacacacccaacattagagaacctaaatatataaagcaaacactgacagaactgaagggggaaatagaagacatagacagcaataaaataataagagactgtagtatttcatgttcaataatggataggacatttagacagaaaatcaataaggaaacagcaggcttgaatggcactagagagtaaatggacctaacacagaacattctgcccaactgcagtagaatatacatctttcttaaatgcacatagaacattcttcaggatagaccacacattaggtcacaaaacaaagagtaacaaatttaagattattgaaatcatactaattatctttttcctaccataatggaataaaactagaaatgtatagcagaaggaaaacggaaatattcacaaatatgtgagaattaaacaacagactcctgaacaacaaataggtcaatgaagaaataaagaaaattagacttgagacaaatgaaaacaaaagcacataccaaaatctttgggatgtagaaaaagcagtactcctaagagggcattttatagtgataaacacttatactaaaaaagaaaataaatttcagataaacctaactttttacacttcaatgaactagaaaaagaacaacttaagcccaaagttccttcccaagagaaaggaaataataaaaattagagcaaaaagttgtttaaaatagaaaa

SEQ ID NO: 404128 - DNA, 355 bp, Homo sapiens
aaagaaaacatcctaactccttagcatttaggccttccaaattgggatcttaattttttaaaaaataattttaattctttttagagtagattttatagtcacatggctcaaaaaagcacctaggtatatggtgaaaagtcttcctttccatttttatttcagttcccctatttgtttcctgtgtgcccttccaggagggcttctaaatatgtctttttaatgtttcccgcaccacctgcacagttttcccatcggatcatcctgtctttgaatgtgcctttgctgttcttctttctgcctgtaaaatactccttctacccggctatgaatctattaaaccaagaaatatccaaga

SEQ ID NO: 404129 - DNA, 337 bp, Homo sapiens
aaaatatttaattttcccgatgtttttaagagctatccgctgagagatttgtaccctgtgaagagagcaggttcaagagatgacagattagaccatcttctctaagaagaaatgatgtcatggttgtttagggagttaagcctatttgtgtgcataccccacctataattagcattctctgagggatgggcataagcattgctgggataggattacccctgctgttccacagtatcactgctattgtgaggctggttacataattctgtcaaatgtcctgaggcacaagggcacaaagagcattggccctaccagaaggctcatttttcgtcacaca

SEQ ID NO: 404130 - DNA, 806 bp, Homo sapiens
tttagataaaactagactccgttcagacagtcacaggcctcaggagccccatcctgtgctggggggaaggggtgctgataaaggagacgccttgctctgcagaacaaaaataattccaccactgccaccgctcacagcatctacagcaggccctgtgctgctgtcacaacctcaccctggtcccctgaggcggatatcaccatcccatttcagagacaaggaaaatgaggcccaggtgcgtgaagaaactggcctatcaaggcagagctagcgggtagcatgctggacttctaagccttcctgagaaagtgaactgcttcctctgagatgggcataggcatggctgtgtgtgcatcttgtcctgaccattccacagtggctgttatcacactccatttacaagttggctcagaaaaccggaggtgaagctgaagcagcccagctggccctaagaagccctggacgctccctcccatcctcacatcgttgagtcaatgctattatttgaatgtctgtgtcccctccaaaattcatgttggaacttaatccttaaggagcagttttaagagatggggcctttaggtcatgagggctctgctctatgaatggattagtgtcttataaaagggcttgagggggccagttcccccctcttcagtcccatatgccatgtgaagacacagttcatggtgccatcttggaagcagagagcaacccttaacagacactgaacaagcccgtgccttgatcttggacttcacagcgtccagaacagtgagaaataaatttctgttgtttacaaatta

SEQ ID NO: 404131 - DNA, 603 bp, Homo sapiens
agagttgaatgtggcaggtgctttctgcacttcattgaacacaccaggagaagacatatctggttgggtggtctcatgctcacaaacctgcatcagggcttcggcagctgccctggggctgaggtctggttctgcaggggcacctgaaaagccattggcattcttacacaggagagctggtcgatgccgaggtgaggcagcctgtggctctcctagatcgtcttcttttccggaagctgcaatcagggaagttttagctgatctcagagggtcaggtacagtccccatggaatttctcttcaggagcactccagagctctcttgagtactggtcccactggtgggggaggggagcgcagtcagagctcagagtgatgacacagtcagggatgattcctctgaagaaccagcctgtgaatcaaggaaacagcatcattaatacagtacgtcgcttaaggattgaaaaataaaccaaactgtcgtttttataagagcacattaaaagcttttcttcccatacctgttgatacaaaaatagaccttgtggggagggagaagaaaaataaataaataaaaatagacttgagaaaaagattttgaaaa

SEQ ID NO: 404132 - DNA, 235 bp, Homo sapiens
gaccagggtgttagctgtggtatttgctgaaaagtgggcaggttccagatattgtggcatgaatgtacctgtttctgccccttacagccacagtgcgtgagtgcttcaccattactgtggtgaagctctggggaaacaggcacatttatatgttactaatgggaatgcaaactgatacaactctttggaagggaatttggcagtatctaacaaaacttcatatgcacttacgatc

SEQ ID NO: 404133 - DNA, 350 bp, Homo sapiens
ttctggcgctgtactaaactcaattataattcctctctcttgagacagaggtctccaggctgagttcactgtttctgatacctcctattagcttgttcccgatacctcctattagcttgttccctctcactttacaagggcttaattagccattataggagactctttccaaatgcaggctttgcaaaatgattagtgctatgggccgtacttcaaaaataaaattgcatttaggataattttctcatattttaaaatgttactttcatgataaaaaataatacaggaaaacattcttattgcttcaaaaaatccaaactgtactacacagtgaaattactgcttgactc

SEQ ID NO: 404134 - DNA, 343 bp, Homo sapiens
tactacaattactttactattaactgcctaagtggttattaaatggctaagtctggctttaaagcatcagagttctaaaggtttgtggaatgactcaccagctgtgtattttaactgggatatggttttaatttcaagcatatatacccataacacaacattcctctctagcagatcaccctctcctacaaaattttaatgactttttgcccaggtacaacactgctgccttctacctgtgaaatgcccccaagccttgctggagccagaccaccgcccctgctcacatcctgtgcacagccacccttggctccctcttggtgctcaatgtatgtgatgaaga

SEQ ID NO: 404135 - DNA, 539 bp, Homo sapiens
acctctagatgcaaagtgtcaggaaggcttgtgggttcagtctttctgtgctaacaccaggccacatccaggcctgatgtactaactgatctccagttcattccttttgcaatttttggccttgattcatagttcctgattcttgattggctctgaaatcctccccattttcaaaagggatgcagtcaagcaggccaaagcgctccatgttagctaacaaatgtttgcaaatcataataatgtaggaagagaaccataaactaaatgaacaacaggcattagccctcatgctgtcacataagcattcctcaaaatataatcatgcttctaaacatgggctggcaattcaggaaagggccactgaaaatattagcctcgttcttttctctgtagagtgagcacagactattcctaaaccacattgcagtatgccaacattgtaaattaatgcctgattggttacctaaaagtaagacaatcttacttttaggcatctagaacactgagaaatccaggatggacacttaacattaccaaag

SEQ ID NO: 404136 - DNA, 322 bp, Homo sapiens
tcacactggcccatcagcatctggacttttatgtccagaagcactaagattctggacatttatgctggccctttggaatcccagtacattactgatctaggaaaaggcagaaaagatctatgtgtaggtcagttggagagcaaaagtagctgggcatggtggctcatgctcgaaatctcaacacttcaagtgatcctcccaccacggcctcccaaagtgctggcattacagggatgaatcaccacacccggctgctaatttttaatttttttgtagagaggggggtcttgctgtgttccccaggctagtctcaaactcctgg

SEQ ID NO: 404137 - DNA, 882 bp, Homo sapiens
actaatatcttacaagcacagccaaccaaagcaaaaatggacaaatgcaatcacatcaagttaaaatgcttctgagagcaaagaaaagtcttctgtgtgggaacacaagatagtaaacttatttaaaaacctattagtagaattagtggaaacacttaggttaaagtgaatcttgtccatataaattatattcatggccgggcgcggtggctcacgcttgtaatcccagcatgctgggattacaggtgtaagccaccgtgcccagcctacacccttaaaagttattgaggaccccaaataacttgctcattgtggattgtatctatccatatttattgtattagaaattaagactgagaaaaagttataaaacacaagaatacagatgcacacgttccattagccatcaaggtgatctttctcccatgccagtagtctctggaaaattcctgagaggatgaaaataaaaaaatcacccatacaaaaaaaaaaagtgtcaatattattatgaaaatagttttgaccttgaggaccccctgaaaggtctcagggaccctcgggggccctggaatcttgctttgagaacagctgatctgggctaatgagcccttttccagcccctctgtgtgagacctcccagaaaccactaagggccttggaagagcttggcaaagaaagaggtgacaggatgattgaggagagccaccctagggaaagccttcagagaaggctttggggacagccccggtcagtggaggaagtcccagagaggcagtcggaagggctagggaccagctgaggcctgtgacctgaaaatcctttccaaagaggacgcctggaagcctggggaaggcacagtgggtggggtagaagactggggct

SEQ ID NO: 404138 - DNA, 720 bp, Homo sapiens
ctcacctctcaccatctgctctgtggctcccagtgctgactctggaagctttatcttgggtaaaagatgtgtgatcagacctttctcgttaatgtatttggctcatgtgacaaatgtttcaaacaacgagctctgagaccagttttcaagaagtctcaacaactcagctactgttcaacatgtgcagaaattatggcaaccgaggggctgcacgagaacgagacgctggcgtcgctgaagagcgaggccgagagcctcaagggcaagctggaggaggagcgagccaagctgcacgatgtggagctgcaccaggtggcggagcgggtggaggccctggggcagtttgtcatgaagaccagaaggaccctcaaaggccacgggaacaaagtcctgtgcatggactggtgcaaagataagaggaggatcgtgagctcgtcacaggatgggaaggtgatcgtgtgggattccttcaccacaaacaaggagcacgcggtcaccatgccctgcacgtgggtgatggcatgtgcttatgccccatcgggatgtgccattgcttgtgggtaagttggagctacagcagcttttcagaatttgtgttaaccatagaatactgttctcttggcaaaaacaaacaaacaagaactcacagtttttgttgtttaattgtttagcagtatgctaaatccttccctgaacttgatcaaagaagaaaccataagc

SEQ ID NO: 404139 - DNA, 2996 bp, Homo sapiens
ccgcgggtccaagctcgaattccggggacggctgctggagcggcgcccgccgcggctcagcgcattcccgctctccgcttccctctccgctgcgtccccgcgcgaagatggcaaccgaggggctgcacgagaacgagacgctggcgtcgctgaagagcgaggccgagagcctcaagggcaagctggaggaggagcgagccaagctgcacgatgtggagctgcaccaggtggcggagcgggtggaggccctggggcagtttgtcatgaagaccagaaggaccctcaaaggccacgggaacaaagtcctgtgcatggactggtgcaaagataagaggaggatcgtgagctcgtcacaggatgggaaggtgatcgtgtgggattccttcaccacaaacaaggagcacgcggtcaccatgccctgcacgtgggtgatggcatgtgcttatgccccatcgggatgtgccattgcttgtggtggtttggataataagtgttctgtgtaccccttgacgtttgacaaaaatgaaaacatggctgccaaaaagaagtctgttgctatgcacaccaactacctgtcggcctgcagcttcaccaactctgacatgcagatcctgacagcgagcggcgatggcacatgtgccctgtgggacgtggagagcgggcagctgctgcagagcttccacggacatggggctgacgtcctctgcttggacctggccccctcagaaactggaaacaccttcgtgtctgggggatgtgacaagaaagccatggtgtgggacatgcgctccggccagtgcgtgcaggcctttgaaacacatgaatctgacatcaacagtgtccggtactaccccagtggagatgcctttgcttcagggtcagatgacgctacgtgtcgcctctatgacctgcgggcagatagggaggttgccatctattccaaagaaagcatcatatttggagcatccagcgtggacttctccctcagtggtcgcctgctgtttgctggatacaatgattacactatcaacgtctgggatgttctcaaagggtcccgggtctccatcctgtttggacatgaaaaccgcgttagcactctacgagtttcccccgatgggactgctttctgctctggatcatgggatcataccctcagagtctgggcctaatcatcttctgacagtgcactcatgtatacctgagaatttgaaatcttcacatgtaaatagatattacttctagaggagcttagagtttattgcagtgtagcttaggggagcaacccatggctcacaggtcactaagcgtctccaatatgactattaaaactgtcacctctggaaatacactagtgtgagccttcagcactgcgagaataccttcaagtacagtatttttcttttggaacactttttaaaatgtatctgtttttaaggttattctaaattatagtagcctcaactcattctgtcaccagtagaattcagcagttaatatattccatattatttctttgaatcaattcattttcagagcactttaaagtctgatatttctcgatgtgcactgtgatgcctggaaccttcctctggaagtgctgattttatggactgaggactggtgactggtctgtgatagaagcaaattccaattccaaatgtaattagacaaaaatcatttttttagaatgtgtttttattgtaaaagtatctttttcagcttcctgttctattgtcttttttcagatacaacatttttgtctatggtgaactgctgtaaatgacgcagagaaatgcctaaaaaggacaggtggtttgactcatggatgatgatgatgtcactgtgccacttggacagggcgttttctctgaattgaagggaaagccaatggtgtttgtaaacaaatgcttctgagagcaaagaaaagtcttctgtgtgggaacacaagatagtaaacttatttaaaaacctattagtagaattagtggaaacacttaggttaaagtgaatcttgtccatataaattatattcatggccgggcgcggtggctcacgcttgtaatcccagcactttgggaggccgaggcgggcggatcacgaggtcaggagttcgagaccacggtgaaaccctgtctctactaaaaaatacaaaaaattagccgggcgtggtggcgggcgcctgtagtcccagctactcggagaggctgaggcaggagaatggcgtgaacccgggaggtggagcttgcagtgagccgaggtcgagccactgcagcctgggtgacaaagcgagactccgtctcaaaaaaaaaaaaaaattatattcatatgtattgcattgcaattataattacatatgcagattgattgatagtcatgaataataacgtctgctcctcttacatagaaagaaaaacgatattaaaagaagatcttctctttatttgagactcagaattccttctagaagaaggaagtgctttttgttataggatcccttcttttcctttttttgtttttttgtaagatgtagatgcttattctttgctttagaaaacttctcacttaaaaagatggcatgcacctaggggaataaaaggtcacctcagacaccaggtgtcattcctggtgaggcctgcctcgtcggtggcctggggtctgccggcaggttctggctgcacctgaaggctgcgtgcaccttgtcccctggacaggtctcctttcctggccctgctccagcccagcccttcttctagtggtagctctggctttgcaggcccagctccaggccctgctcctcagagagactcttccagagctggagctgggcacagccataagacaggactggaccagatgctcctgtaaacatccaggggtgtgccaggcccaccctcacaactgcttgttcaggtatcgtgatgggccactcggtccaaaatcagccaggccatcttttccatcatctcacttcaaataaacataataattatatttga

SEQ ID NO: 404140 - DNA, 2830 bp, Homo sapiens
ccgcgggtccaagctcgaattccggggacggctgctggagcggcgcccgccgcggctcagcgcattcccgctctccgcttccctctccgctgcgtccccgcgcgaagatggcaaccgaggggctgcacgagaacgagacgctggcgtcgctgaagagcgaggccgagagcctcaagggcaagctggaggaggagcgagccaagctgcacgatgtggagctgcaccaggtggcggagcgggtggaggccctggggcagtttgtcatgaagaccagaaggaccctcaaaggccacgggaacaaagtcctgtgcatggactggtgcaaagataagaggaggatcgtgagctcgtcacaggatgggaaggtgatcgtgtgggattccttcaccacaaacaaggagcacgcggtcaccatgccctgcacgtgggtgatggcatgtgcttatgccccatcgggatgtgccattgcttgtggtggtttggataataagtgttctgtgtaccccttgacgtttgacaaaaatgaaaacatggctgccaaaaagaagtctgttgctatgcacaccaactacctgtcggcctgcagcttcaccaactctgacatgcagatcctgacagcgagcggcgatggcacatgtgccctgtgggacgtggagagcgggcagctgctgcagagcttccacggacatggggctgacgtcctctgcttggacctggccccctcagaaactggaaacaccttcgtgtctgggggatgtgacaagaaagccatggtgtgggacatgcgctccggccagtgcgtgcaggcctttgaaacacatgaatctgacatcaacagtgtccggtactaccccagtggagatgcctttgcttcagggtcagatgacgctacgtgtcgcctctatgacctgcgggcagatagggaggttgccatctattccaaagaaagcatcatatttggagcatccagcgtggacttctccctcagtggtcgcctgctgtttgctggatacaatgattacactatcaacgtctgggatgttctcaaagggtcccgggtctccatcctgtttggacatgaaaaccgcgttagcactctacgagtttcccccgatgggactgctttctgctctggatcatgggatcataccctcagagtctgggcctaatcatcttctgacagtgcactcatgtatacctgagaatttgaaatcttcacatgtaaatagatattacttctagaggagcttagagtttattgcagtgtagcttaggggagcaacccatggctcacaggtcactaagcgtctccaatatgactattaaaactgtcacctctggaaatacactagtgtgagccttcagcactgcgagaataccttcaagtacagtatttttcttttggaacactttttaaaatgtatctgtttttaaggttattctaaattatagtagcctcaagtctgtgatagaagcaaattccaattccaaatgtaattagacaaaaatcatttttttagaatgtgtttttattgtaaaagtatctttttcagcttcctgttctattgtcttttttcagatacaacatttttgtctatggtgaactgctgtaaatgacgcagagaaatgcctaaaaaggacaggtggtttgactcatggatgatgatgatgtcactgtgccacttggacagggcgttttctctgaattgaagggaaagccaatggtgtttgtaaacaaatgcttctgagagcaaagaaaagtcttctgtgtgggaacacaagatagtaaacttatttaaaaacctattagtagaattagtggaaacacttaggttaaagtgaatcttgtccatataaattatattcatggccgggcgcggtggctcacgcttgtaatcccagcactttgggaggccgaggcgggcggatcacgaggtcaggagttcgagaccacggtgaaaccctgtctctactaaaaaatacaaaaaattagccgggcgtggtggcgggcgcctgtagtcccagctactcggagaggctgaggcaggagaatggcgtgaacccgggaggtggagcttgcagtgagccgaggtcgagccactgcagcctgggtgacaaagcgagactccgtctcaaaaaaaaaaaaaaattatattcatatgtattgcattgcaattataattacatatgcagattgattgatagtcatgaataataacgtctgctcctcttacatagaaagaaaaacgatattaaaagaagatcttctctttatttgagactcagaattccttctagaagaaggaagtgctttttgttataggatcccttcttttcctttttttgtttttttgtaagatgtagatgcttattctttgctttagaaaacttctcacttaaaaagatggcatgcacctaggggaataaaaggtcacctcagacaccaggtgtcattcctggtgaggcctgcctcgtcggtggcctggggtctgccggcaggttctggctgcacctgaaggctgcgtgcaccttgtcccctggacaggtctcctttcctggccctgctccagcccagcccttcttctagtggtagctctggctttgcaggcccagctccaggccctgctcctcagagagactcttccagagctggagctgggcacagccataagacaggactggaccagatgctcctgtaaacatccaggggtgtgccaggcccaccctcacaactgcttgttcaggtatcgtgatgggccactcggtccaaaatcagccaggccatcttttccatcatctcacttcaaataaacataataattatatttga

SEQ ID NO: 404141 - DNA, 2761 bp, Homo sapiens
ccgcgggtccaagctcgaattccggggacggctgctggagcggcgcccgccgcggctcagcgcattcccgctctccgcttccctctccgctgcgtccccgcgcgaagatggcaaccgaggggctgcacgagaacgagacgctggcgtcgctgaagagcgaggccgagagcctcaagggcaagctggaggaggagcgagccaagctgcacgatgtggagctgcaccaggtggcggagcgggtggaggccctggggcagtttgtcatgaagaccagaaggaccctcaaaggccacgggaacaaagtcctgtgcatggactggtgcaaagataagaggaggatcgtgagctcgtcacaggatgggaaggtgatcgtgtgggattccttcaccacaaacaaggagcacgcggtcaccatgccctgcacgtgggtgatggcatgtgcttatgccccatcgggatgtgccattgcttgtggtggtttggataataagtgttctgtgtaccccttgacgtttgacaaaaatgaaaacatggctgccaaaaagaagtctgttgctatgcacaccaactacctgtcggcctgcagcttcaccaactctgacatgcagatcctgacagcgagcggcgatggcacatgtgccctgtgggacgtggagagcgggcagctgctgcagagcttccacggacatggggctgacgtcctctgcttggacctggccccctcagaaactggaaacaccttcgtgtctgggggatgtgacaagaaagccatggtgtgggacatgcgctccggccagtgcgtgcaggcctttgaaacacatgaatctgacatcaacagtgtccggaaaaccgcgttagcactctacgagtttcccccgatgggactgctttctgctctggatcatgggatcataccctcagagtctgggcctaatcatcttctgacagtgcactcatgtatacctgagaatttgaaatcttcacatgtaaatagatattacttctagaggagcttagagtttattgcagtgtagcttaggggagcaacccatggctcacaggtcactaagcgtctccaatatgactattaaaactgtcacctctggaaatacactagtgtgagccttcagcactgcgagaataccttcaagtacagtatttttcttttggaacactttttaaaatgtatctgtttttaaggttattctaaattatagtagcctcaactcattctgtcaccagtagaattcagcagttaatatattccatattatttctttgaatcaattcattttcagagcactttaaagtctgatatttctcgatgtgcactgtgatgcctggaaccttcctctggaagtgctgattttatggactgaggactggtgactggtctgtgatagaagcaaattccaattccaaatgtaattagacaaaaatcatttttttagaatgtgtttttattgtaaaagtatctttttcagcttcctgttctattgtcttttttcagatacaacatttttgtctatggtgaactgctgtaaatgacgcagagaaatgcctaaaaaggacaggtggtttgactcatggatgatgatgatgtcactgtgccacttggacagggcgttttctctgaattgaagggaaagccaatggtgtttgtaaacaaatgcttctgagagcaaagaaaagtcttctgtgtgggaacacaagatagtaaacttatttaaaaacctattagtagaattagtggaaacacttaggttaaagtgaatcttgtccatataaattatattcatggccgggcgcggtggctcacgcttgtaatcccagcactttgggaggccgaggcgggcggatcacgaggtcaggagttcgagaccacggtgaaaccctgtctctactaaaaaatacaaaaaattagccgggcgtggtggcgggcgcctgtagtcccagctactcggagaggctgaggcaggagaatggcgtgaacccgggaggtggagcttgcagtgagccgaggtcgagccactgcagcctgggtgacaaagcgagactccgtctcaaaaaaaaaaaaaaattatattcatatgtattgcattgcaattataattacatatgcagattgattgatagtcatgaataataacgtctgctcctcttacatagaaagaaaaacgatattaaaagaagatcttctctttatttgagactcagaattccttctagaagaaggaagtgctttttgttataggatcccttcttttcctttttttgtttttttgtaagatgtagatgcttattctttgctttagaaaacttctcacttaaaaagatggcatgcacctaggggaataaaaggtcacctcagacaccaggtgtcattcctggtgaggcctgcctcgtcggtggcctggggtctgccggcaggttctggctgcacctgaaggctgcgtgcaccttgtcccctggacaggtctcctttcctggccctgctccagcccagcccttcttctagtggtagctctggctttgcaggcccagctccaggccctgctcctcagagagactcttccagagctggagctgggcacagccataagacaggactggaccagatgctcctgtaaacatccaggggtgtgccaggcccaccctcacaactgcttgttcaggtatcgtgatgggccactcggtccaaaatcagccaggccatcttttccatcatctcacttcaaataaacataataattatatttga

SEQ ID NO: 404142 - DNA, 694 bp, Homo sapiens
aatatcgtttttctttctatgtagaggagcagacgttattattcatgactatcaatcaatctgcatatgtcatgaataataacgtctgctcctcttacatagaaagaaaaacgatattaaaagaagatcttctctttatttgagactcagaattccttctagaagaaggaagtgctttttgttataggatcccttcttttcctttttttgtttttttgtaagatgtagatgcttattctttgctttagaaaacttctcacttaaaaagatggcatgcacctaggggaataaaaggtcacctcagacaccaggtgtcattcctggtgaggcctgcctcgtcggtggcctggggtctgccggcaggttctggctgcacctgaaggctgcgtgcaccttgtcccctggacaggtctcctttcctggccctgctccagcccagcccttcttctagtggtagctctggctttgcaggcccagctccaggccctgctcctcagagagactcttccagagctggagctgggcacagccataagacaggactggaccagatgctcctgtaaacatccaggggtgtgccaggcccaccctcacaactgcttgttcaggtatcgtgatgggccactcggtccaaaatcagccaggccatcttttccatcatctcacttcaaataaacataataattatatttga

SEQ ID NO: 404143 - DNA, 1404 bp, Homo sapiens
  misc_feature (1375)..(1375): n is a, c, g, or t
  misc_feature (1377)..(1377): n is a, c, g, or t
ccgcgggtccaagctcgaattccggggacggctgctggagcggcgcccgccgcggctcagcgcattcccgctctccgcttccctctccgctgcgtccccgcgcgaagatggcaaccgaggggctgcacgagaacgagacgctggcgtcgctgaagagcgaggccgagagcctcaagggcaagctggaggaggagcgagccaagctgcacgatgtggagctgcaccaggtggcggagcgggtggaggccctggggcagtttgtcatgaagaccagaaggaccctcaaaggccacgggaacaaagtcctgtgcatggactggtgcaaagataagaggaggatcgtgagctcgtcacaggatgggaaggtgatcgtgtgggattccttcaccacaaacaaggagcacgcggtcaccatgccctgcacgtgggtgatggcatgtgcttatgccccatcgggatgtgccattgcttgtggtggtttggataataagtgttctgtgtaccccttgacgtttgacaaaaatgaaaacatggctgccaaaaagaagtctgttgctatgcacaccaactacctgtcggcctgcagcttcaccaactctgacatgcagatcctgacagcgagcggcgatggcacatgtgccctgtgggacgtggagagcgggcagctgctgcagagcttccacggacatggggctgacgtcctctgcttggacctggccccctcagaaactggaaacaccttcgtgtctgggggatgtgacaagaaagccatggtgtgggacatgcgctccggccagtgcgtgcaggcctttgaaacacatgaatctgacatcaacagtgtccggaaaaccgcgttagcactctacgagtttcccccgatgggactgctttctgctctggatcatgggatcataccctcagagtctgggcctaatcatcttctgacagtgcactcatgtatacctgagaatttgaaatcttcacatgtaaatagatattacttctagaggagcttagagtttattgcagtgtagcttaggggagcaacccatggctcacaggtcactaagcgtctccaatatgactattaaaactgtcacctctggaaatacactagtgtgagccttcagcactgcgagaataccttcaagtacagtatttttcttttggaacactttttaccgtatcggtccaaggttatctaaatatgtgcctcaccatctgccccgggataccgtaaattcccacctctggacagcactcagcctaggcggaatccaggccggacggactccggaggatagacggagccgccgtaaacactccgcagcaactgggtgagccgcgagtgcacggggcaggagggaggtgctcncncggcgacggcaccagacacccgagccc

SEQ ID NO: 404144 - DNA, 1399 bp, Homo sapiens
ccgcgggtccaagctcgaattccggggacggctgctggagcggcgcccgccgcggctcagcgcattcccgctctccgcttccctctccgctgcgtccccgcgcgaagatggcaaccgaggggctgcacgagaacgagacgctggcgtcgctgaagagcgaggccgagagcctcaagggcaagctggaggaggagcgagccaagctgcacgatgtggagctgcaccaggtggcggagcgggtggaggccctggggcagtttgtcatgaagaccagaaggaccctcaaaggccacgggaacaaagtcctgtgcatggactggtgcaaagataagaggaggatcgtgagctcgtcacaggatgggaaggtgatcgtgtgggattccttcaccacaaacaaggagcacgcggtcaccatgccctgcacgtgggtgatggcatgtgcttatgccccatcgggatgtgccattgcttgtggtggtttggataataagtgttctgtgtaccccttgacgtttgacaaaaatgaaaacatggctgccaaaaagaagtctgttgctatgcacaccaactacctgtcggcctgcagcttcaccaactctgacatgcagatcctgacagcgagcggcgatggcacatgtgccctgtgggacgtggagagcgggcagctgctgcagagcttccacggacatggggctgacgtcctctgcttggacctggccccctcagaaactggaaacaccttcgtgtctgggggatgtgacaagaaagccatggtgtgggacatgcgctccggccagtgcgtgcaggcctttgaaacacatgaatctgacatcaacagtgtccggaaaaccgcgttagcactctacgagtttcccccgatgggactgctttctgctctggatcatgggatcataccctcagagtctgggcctaatcatcttctgacagtgcactcatgtatacctgagaatttgaaatcttcacatgtaaatagatattacttctagaggagcttagagtttattgcagtgtagcttaggggagcaacccatggctcacaggtcactaagcgtctccaatatgactattaaaactgtcacctctggaaatacactagtgtgagccttcagcactgcgagaataccttcaagtacagtatttttcttttggaacactttttacactgttcctggtcaacggtttctacatttagtagcccaaatcatcggtcccgtgaatcagagtaattatccaatatcttgaatattctttaagcattagcggaattgagtcgtgagctgactttgggagtggattgagggagggatgggtaaacatcttcaggttgacctttaaagtagaggaatgcggatttgtcggggggagggcggtgttttgg

SEQ ID NO: 404145 - DNA, 306 bp, Homo sapiens
ggaatgtaaggttgagaactgatcctttggctctgctggaacatccagcccctcctgcactcaccccactttttttcatggatagattagggggtcttgattatccagatcctcattctggctttctacttcacactgccctgctggacacagcttttatgaggaattctcagcagtaatctgtaagaacttgacaacccctaaactgtttgctcttctccctccaggatgggaaggtgatcgtgtgggattccttcaccacaaacaaggtgaggcattgttcccagccacgttatagaggcttca

SEQ ID NO: 404146 - DNA, 2786 bp, Homo sapiens
ccgcgggtccaagctcgaattccggggacggctgctggagcggcgcccgccgcggctcagcgcattcccgctctccgcttccctctccgctgcgtccccgcgcgaagatggcaaccgaggggctgcacgagaacgagacgctggcgtcgctgaagagcgaggccgagagcctcaagggcaagctggaggaggagcgagccaagctgcacgatgtggagctgcaccaggtggcggagcgggtggaggccctggggcagtttgtcatgaagaccagaaggaccctcaaaggccacgggaacaaagtcctgtgcatggactggtgcaaagataagaggaggatcgtgagctcgtcacaggatgggaaggtgatcgtgtgggattccttcaccacaaacaagatcctgacagcgagcggcgatggcacatgtgccctgtgggacgtggagagcgggcagctgctgcagagcttccacggacatggggctgacgtcctctgcttggacctggccccctcagaaactggaaacaccttcgtgtctgggggatgtgacaagaaagccatggtgtgggacatgcgctccggccagtgcgtgcaggcctttgaaacacatgaatctgacatcaacagtgtccggtactaccccagtggagatgcctttgcttcagggtcagatgacgctacgtgtcgcctctatgacctgcgggcagatagggaggttgccatctattccaaagaaagcatcatatttggagcatccagcgtggacttctccctcagtggtcgcctgctgtttgctggatacaatgattacactatcaacgtctgggatgttctcaaagggtcccgggtctccatcctgtttggacatgaaaaccgcgttagcactctacgagtttcccccgatgggactgctttctgctctggatcatgggatcataccctcagagtctgggcctaatcatcttctgacagtgcactcatgtatacctgagaatttgaaatcttcacatgtaaatagatattacttctagaggagcttagagtttattgcagtgtagcttaggggagcaacccatggctcacaggtcactaagcgtctccaatatgactattaaaactgtcacctctggaaatacactagtgtgagccttcagcactgcgagaataccttcaagtacagtatttttcttttggaacactttttaaaatgtatctgtttttaaggttattctaaattatagtagcctcaactcattctgtcaccagtagaattcagcagttaatatattccatattatttctttgaatcaattcattttcagagcactttaaagtctgatatttctcgatgtgcactgtgatgcctggaaccttcctctggaagtgctgattttatggactgaggactggtgactggtctgtgatagaagcaaattccaattccaaatgtaattagacaaaaatcatttttttagaatgtgtttttattgtaaaagtatctttttcagcttcctgttctattgtcttttttcagatacaacatttttgtctatggtgaactgctgtaaatgacgcagagaaatgcctaaaaaggacaggtggtttgactcatggatgatgatgatgtcactgtgccacttggacagggcgttttctctgaattgaagggaaagccaatggtgtttgtaaacaaatgcttctgagagcaaagaaaagtcttctgtgtgggaacacaagatagtaaacttatttaaaaacctattagtagaattagtggaaacacttaggttaaagtgaatcttgtccatataaattatattcatggccgggcgcggtggctcacgcttgtaatcccagcactttgggaggccgaggcgggcggatcacgaggtcaggagttcgagaccacggtgaaaccctgtctctactaaaaaatacaaaaaattagccgggcgtggtggcgggcgcctgtagtcccagctactcggagaggctgaggcaggagaatggcgtgaacccgggaggtggagcttgcagtgagccgaggtcgagccactgcagcctgggtgacaaagcgagactccgtctcaaaaaaaaaaaaaaattatattcatatgtattgcattgcaattataattacatatgcagattgattgatagtcatgaataataacgtctgctcctcttacatagaaagaaaaacgatattaaaagaagatcttctctttatttgagactcagaattccttctagaagaaggaagtgctttttgttataggatcccttcttttcctttttttgtttttttgtaagatgtagatgcttattctttgctttagaaaacttctcacttaaaaagatggcatgcacctaggggaataaaaggtcacctcagacaccaggtgtcattcctggtgaggcctgcctcgtcggtggcctggggtctgccggcaggttctggctgcacctgaaggctgcgtgcaccttgtcccctggacaggtctcctttcctggccctgctccagcccagcccttcttctagtggtagctctggctttgcaggcccagctccaggccctgctcctcagagagactcttccagagctggagctgggcacagccataagacaggactggaccagatgctcctgtaaacatccaggggtgtgccaggcccaccctcacaactgcttgttcaggtatcgtgatgggccactcggtccaaaatcagccaggccatcttttccatcatctcacttcaaataaacataataattatatttga

SEQ ID NO: 404147 - DNA, 1001 bp, Homo sapiens
  misc_feature (961)..(961): n is a, c, g, or t
ccgcgggtccaagctcgaattccggggacggctgctggagcggcgcccgccgcggctcagcgcattcccgctctccgcttccctctccgctgcgtccccgcgcgaagatggcaaccgaggggctgcacgagaacgagacgctggcgtcgctgaagagcgaggccgagagcctcaagggcaagctggaggaggagcgagccaagctgcacgatgtggagctgcaccaggtggcggagcgggtggaggccctggggcagtttgtcatgaagaccagaaggaccctcaaaggccacgggaacaaagtcctgtgcatggactggtgcaaagataagaggaggatcgtgagctcgtcacaggatgggaaggtgatcgtgtgggattccttcaccacaaacaaggtgaggcattgttcccagccacgttatagaggcttcagaatcccagcctacttaaaggtgctctggtccagctgcccggccctgtcctgatttctctccatgtatccctgcaagcagttgcctctacggatggaaaccccaagaaggcctatccgtgtttgaacagctcagccagcccattgcagcatttattcccctctcgccccaagaggacaattagagccaccataggggctgccaataccaacatggaaatgggcaaagcatggaaaacttgcatccacatgtgcaactgcatgtactatttgtcttctgagtgataagaggcaccaaaattctccattctctctcccctctctttgaccagactccatagccctgtgggaatgaacacgtggagggtggggaagatgaggctgcagtgggactgggcagagctaccctgtgatgcagtctgatccccttgcaagtctggcttgggcatgcacagctcaacttagatttaaattttagctcttaatgaaaataagaccaaaacctatgtgcaggtatgctggaacacntgcattgcattggcatttacaataaagagtattgtgtatt

SEQ ID NO: 404148 - DNA, 2951 bp, Homo sapiens
ccgcgggtccaagctcgaattccggggacggctgctggagcggcgcccgccgcggctcagcgcattcccgctctccgcttccctctccgctgcgtccccgcgcgaagatggcaaccgaggggctgcacgagaacgagacgctggcgtcgctgaagagcgaggccgagagcctcaagggcaagctggaggaggagcgagccaagctgcacgatgtggagctgcaccaggtggcggagcgggtggaggccctggggcagtttgtcatgaagaccagaaggaccctcaaaggccacgggaacaaagtcctgtgcatggactggtgcaaagataagaggaggatcgtgagctcgtcacaggatgggaaggtgatcgtgtgggattccttcaccacaaacaaggagcacgcggtcaccatgccctgcacgtgggtgatggcatgtgcttatgccccatcgggatgtgccattgcttgtggtggtttggataataagtgttctgtgtaccccttgacgtttgacaaaaatgaaaacatggctgccaaaaagaagtctgttgctatgcacaccaactacctgtcggcctgcagcttcaccaactctgacatgcagatcctgacagcgagcggcgatggcacatgtgccctgtgggacgtggagagcgggcagctgctgcagagcttccacggacatggggctgacgtcctctgcttggacctggccccctcagaaactggaaacaccttcgtgtctgggggatgtgacaagaaagccatggtgtgggacatgcgctccggccagtgcgtgcaggcctttgaaacacatgaatctgacatcaacagtgtccggtactaccccagtggagatgcctttgcttcagggtcagatgacgctacgtgtcgcctctatgacctgcgggcagatagggaggttgccatctattccaaagaaagcatcatatttggagcatccagcgtggacttctccctcagtggtcgcctgctgtttgctggatacaatgattacactatcaacgtctgggatgttctcaaagggtcccgggtctccatcctgtttggacatgaaaaccgcgttagcactctacgagtttcccccgatgggactgctttctgctctggatcatgggatcataccctcagagtctgggcctaatcatcttctgacagtgcactcatgtatacctgagaatttgaaatcttcacatgtaaatagatattacttctagaggagcttagagtttattgcagtgtagcttaggggagcaacccatggctcacaggtcactaagcgtctccaatatgactattaaaactgtcacctctggaaatacactagtgtgagccttcagcactgcgagaataccttcaagtacagtatttttcttttggaacactttttaaaatgtatctgtttttaaggttattctaaattatagtagcctcaactcattctgtcaccagtagaattcagcagttaatatattccatattatttctttgaatcaattcattttcagagcactttaaagtctgatatttctcgatgtgcactgtgatgcctggaaccttcctctggaagtgctgattttatggactgaggactggtgactggtctgtgatagaagcaaattccaattccaaatgtaattagacaaaaatcatttttttagaatgtgtttttattgtaaaagtatctttttcagcttcctgttctattgtcttttttcagatacaacatttttgtctatggtgaactgctgtaaatgacgcagagaaatgcctaaaaaggacaggtggtttgactcatggatgatgatgatgtcactgtgccacttggacagggcgttttctctgaattgaagggaaagccaatggtgtttgtaaacaaatgcttctgagagcaaagaaaagtcttctgtgtgggaacacaagatagtaaacttatttaaaaacctattagtagaattagtggaaacacttaggttaaagtgaatcttgtccatataaattatattcatggccgggcgcggtggctcacgcttgtaatcccagcactttgggaggccgaggcgggcggatcacgaggtcaggagttcgagaccacggtgaaaccctgtctctactaaaaaatacaaaaaattagccgggcgtggtggcgggcgcctgtagtcccagctactcggagaggctgaggcaggagaatggcgtgaacccgggaggtggagcttgcagtgagccgaggtcgagccactgcagcctgggtgacaaagcgagactccgtctcaaaaaaaaaaaaaaattatattcatatgtattgcattgcaattataattacatatgcagattgattgatagtcatgaataataacgtctgctcctcttacatagaaagaaaaacgatattaaaagaagatcttctctttatttgagactcagaattccttctagaagaaggaagtgctttttgttataggatcccttcttttcctttttttgtttttttgtaagatgtagatgcttattctttgctttagaaaacttctcacttaaaaagatggcatgcacctaggggaataaaaggtcacctcagacaccaggtgtcattcctggtgaggcctgcctcgtcggtggcctggggtctgccggcaggttctggctgcacctgaaggctgcgtgcaccttgtcccctggacaggtctcctttcctggccctgctccagcccagccctgctcctcagagagactcttccagagctggagctgggcacagccataagacaggactggaccagatgctcctgtaaacatccaggggtgtgccaggcccaccctcacaactgcttgttcaggtatcgtgatgggccactcggtccaaaatcagccaggccatcttttccatcatctcacttcaaataaacataataattatatttga

SEQ ID NO: 404149 - DNA, 2721 bp, Homo sapiens
ccgcgggtccaagctcgaattccggggacggctgctggagcggcgcccgccgcggctcagcgcattcccgctctccgcttccctctccgctgcgtccccgcgcgaagatggcaaccgaggggctgcacgagaacgagacgctggcgtcgctgaagagcgaggccgagagcctcaagggcaagctggaggaggagcgagccaagctgcacgatgtggagctgcaccaggtggcggagcgggtggaggccctggggcagtttgtcatgaagaccagaaggaccctcaaaggccacgggaacaaagtcctgtgcatggactggtgcaaagataagaggaggatcgtgagctcgtcacaggatgggaaggtgatcgtgtgggattccttcaccacaaacaaggagcacgcggtcaccatgccctgcacgtgggtgatggcatgtgcttatgccccatcgggatgtgccattgcttgtggtggtttggataataagtgttctgtgtaccccttgacgtttgacaaaaatgaaaacatggctgccaaaaagaagtctgttgctatgcacaccaactacctgtcggcctgcagcttcaccaactctgacatgcagatcctgacagcgagcggcgatggcacatgtgccctgtgggacgtggagagcgggcagctgctgcagagcttccacggacatggggctgacgtcctctgcttggacctggccccctcagaaactggaaacaccttcgtgtctgggggatgtgacaagaaagccatggtgtgggacatgcgctccggccagtgcgtgcaggcctttgaaacacatgaatctgacatcaacagtgtccggtactaccccagtggagatgcctttgcttcagggtcagatgacgctacgtgtcgcctctatgacctgcgggcagatagggaggttgccatctattccaaagaaagcatcatatttggagcatccagcgtggacttctccctcagtggtcgcctgctgtttgctggatacaatgattacactatcaacgtctgggatgttctcaaagggtcccgggtctccatcctgtttggacatgaaaaccgcgttagcactctacgagtttcccccgatgggactgctttctgctctggatcatgggatcataccctcagagtctgggcctaatcatcttctgacagtgcactcatgtatacctgagaatttgaaatcttcacatgtaaatagatattacttctagaggagcttagagtttattgcagtgtagcttaggggagcaacccatggctcacaggtcactaagcgtctccaatatgactattaaaactgtcacctctggaaatacactagtgtgagccttcagcactgcgagaataccttcaagtacagtatttttcttttggaacactttttaaaatgtatctgtttttaaggttattctaaattatagtagcctcaactcattctgtcaccagtagaattcagcagttaatatattccatattatttctttgaatcaattcattttcagagcactttaaagtctgatatttctcgatgtgcactgtgatgcctggaaccttcctctggaagtgctgattttatggactgaggactggtgactggtctgtgatagaagcaaattccaattccaaatgtaattagacaaaaatcatttttttagaatgtgtttttattgtaaaagtatctttttcagcttcctgttctattgtcttttttcagatacaacatttttgtctatggtgaactgctgtaaatgacgcagagaaatgcctaaaaaggacaggtggtttgactcatggatgatgatgatgtcactgtgccacttggacagggcgttttctctgaattgaagggaaagccaatggtgtttgtaaacaaatgcttctgagagcaaagaaaagtcttctgtgtgggaacacaagatagtaaacttatttaaaaacctattagtagaattagtggaaacacttaggttaaagtgaatcttgtccatataaattatattcatggccgggcgcggtggctcacgcttgtaatcccagcatgctgggattacaggtgtaagccaccgtgcccagcctacacccttaaaagttattgaggaccccaaataacttgctcattgtggattgtatctatccatatttattgtattagaaattaagactgagaaaaagttataaaacacaagaatacagatgcacacgttccattagccatcaaggtgatctttctcccatgccagtagtctctggaaaattcctgagaggatgaaaataaaaaaatcacccatacaaaaaaaaaaagtgtcaatattattatgaaaatagttttgaccttgaggaccccctgaaaggtctcagggaccctcgggggccctggaatcttgctttgagaacagctgatctgggctaatgagcccttttccagcccctctgtgtgagacctcccagaaaccactaagggccttggaagagcttggcaaagaaagaggtgacaggatgattgaggagagccaccctagggaaagccttcagagaaggctttggggacagccccggtcagtggaggaagtcccagagaggcagtcggaagggctagggaccagctgaggcctgtgacctgaaaatcctttccaaagaggacgcctggaagcctggggaaggcacagtgggtggggtagaagactggggct

SEQ ID NO: 404150 - DNA, 3081 bp, Homo sapiens
ctcacctctcaccatctgctctgtggctcccagtgctgactctggaagctttatcttgggtaaaagatgtgtgatcagacctttctcgttaatgtatttggctcatgtgacaaatgtttcaaacaacgagctctgagaccagttttcaagaagtctcaacaactcagctactgttcaacatgtgcagaaattatggcaaccgaggggctgcacgagaacgagacgctggcgtcgctgaagagcgaggccgagagcctcaagggcaagctggaggaggagcgagccaagctgcacgatgtggagctgcaccaggtggcggagcgggtggaggccctggggcagtttgtcatgaagaccagaaggaccctcaaaggccacgggaacaaagtcctgtgcatggactggtgcaaagataagaggaggatcgtgagctcgtcacaggatgggaaggtgatcgtgtgggattccttcaccacaaacaaggagcacgcggtcaccatgccctgcacgtgggtgatggcatgtgcttatgccccatcgggatgtgccattgcttgtggtggtttggataataagtgttctgtgtaccccttgacgtttgacaaaaatgaaaacatggctgccaaaaagaagtctgttgctatgcacaccaactacctgtcggcctgcagcttcaccaactctgacatgcagatcctgacagcgagcggcgatggcacatgtgccctgtgggacgtggagagcgggcagctgctgcagagcttccacggacatggggctgacgtcctctgcttggacctggccccctcagaaactggaaacaccttcgtgtctgggggatgtgacaagaaagccatggtgtgggacatgcgctccggccagtgcgtgcaggcctttgaaacacatgaatctgacatcaacagtgtccggtactaccccagtggagatgcctttgcttcagggtcagatgacgctacgtgtcgcctctatgacctgcgggcagatagggaggttgccatctattccaaagaaagcatcatatttggagcatccagcgtggacttctccctcagtggtcgcctgctgtttgctggatacaatgattacactatcaacgtctgggatgttctcaaagggtcccgggtctccatcctgtttggacatgaaaaccgcgttagcactctacgagtttcccccgatgggactgctttctgctctggatcatgggatcataccctcagagtctgggcctaatcatcttctgacagtgcactcatgtatacctgagaatttgaaatcttcacatgtaaatagatattacttctagaggagcttagagtttattgcagtgtagcttaggggagcaacccatggctcacaggtcactaagcgtctccaatatgactattaaaactgtcacctctggaaatacactagtgtgagccttcagcactgcgagaataccttcaagtacagtatttttcttttggaacactttttaaaatgtatctgtttttaaggttattctaaattatagtagcctcaactcattctgtcaccagtagaattcagcagttaatatattccatattatttctttgaatcaattcattttcagagcactttaaagtctgatatttctcgatgtgcactgtgatgcctggaaccttcctctggaagtgctgattttatggactgaggactggtgactggtctgtgatagaagcaaattccaattccaaatgtaattagacaaaaatcatttttttagaatgtgtttttattgtaaaagtatctttttcagcttcctgttctattgtcttttttcagatacaacatttttgtctatggtgaactgctgtaaatgacgcagagaaatgcctaaaaaggacaggtggtttgactcatggatgatgatgatgtcactgtgccacttggacagggcgttttctctgaattgaagggaaagccaatggtgtttgtaaacaaatgcttctgagagcaaagaaaagtcttctgtgtgggaacacaagatagtaaacttatttaaaaacctattagtagaattagtggaaacacttaggttaaagtgaatcttgtccatataaattatattcatggccgggcgcggtggctcacgcttgtaatcccagcactttgggaggccgaggcgggcggatcacgaggtcaggagttcgagaccacggtgaaaccctgtctctactaaaaaatacaaaaaattagccgggcgtggtggcgggcgcctgtagtcccagctactcggagaggctgaggcaggagaatggcgtgaacccgggaggtggagcttgcagtgagccgaggtcgagccactgcagcctgggtgacaaagcgagactccgtctcaaaaaaaaaaaaaaattatattcatatgtattgcattgcaattataattacatatgcagattgattgatagtcatgaataataacgtctgctcctcttacatagaaagaaaaacgatattaaaagaagatcttctctttatttgagactcagaattccttctagaagaaggaagtgctttttgttataggatcccttcttttcctttttttgtttttttgtaagatgtagatgcttattctttgctttagaaaacttctcacttaaaaagatggcatgcacctaggggaataaaaggtcacctcagacaccaggtgtcattcctggtgaggcctgcctcgtcggtggcctggggtctgccggcaggttctggctgcacctgaaggctgcgtgcaccttgtcccctggacaggtctcctttcctggccctgctccagcccagcccttcttctagtggtagctctggctttgcaggcccagctccaggccctgctcctcagagagactcttccagagctggagctgggcacagccataagacaggactggaccagatgctcctgtaaacatccaggggtgtgccaggcccaccctcacaactgcttgttcaggtatcgtgatgggccactcggtccaaaatcagccaggccatcttttccatcatctcacttcaaataaacataataattatatttga

SEQ ID NO: 404151 - DNA, 2852 bp, Homo sapiens
ccgcgggtccaagctcgaattccggggacggctgctggagcggcgcccgccgcggctcagcgcattcccgctctccgcttccctctccgctgcgtccccgcgcgaagatggcaaccgaggggctgcacgagaacgagacgctggcgtcgctgaagagcgaggccgagagcctcaagggcaagctggaggaggagcgagccaagctgcacgatgtggagctgcaccaggtggcggagcgggtggaggccctggggcagtttgtcatgaagaccagaaggaccctcaaaggccacgggaacaaagtcctgtgcatggactggtgcaaagataagaggaggatcgtgagctcgtcacaggatgggaaggtgatcgtgtgggattccttcaccacaaacaaggagcacgcggtcaccatgccctgcacgtgggtgatggcatgtgcttatgccccatcgggatgtgccattgcttgtggtggtttggataataagtgttctgtgtaccccttgacgtttgacaaaaatgaaaacatggctgccaaaaagaagtctgttgctatgcacaccaactacctgtcggcctgcagcttcaccaactctgacatgcagggatgtgacaagaaagccatggtgtgggacatgcgctccggccagtgcgtgcaggcctttgaaacacatgaatctgacatcaacagtgtccggtactaccccagtggagatgcctttgcttcagggtcagatgacgctacgtgtcgcctctatgacctgcgggcagatagggaggttgccatctattccaaagaaagcatcatatttggagcatccagcgtggacttctccctcagtggtcgcctgctgtttgctggatacaatgattacactatcaacgtctgggatgttctcaaagggtcccgggtctccatcctgtttggacatgaaaaccgcgttagcactctacgagtttcccccgatgggactgctttctgctctggatcatgggatcataccctcagagtctgggcctaatcatcttctgacagtgcactcatgtatacctgagaatttgaaatcttcacatgtaaatagatattacttctagaggagcttagagtttattgcagtgtagcttaggggagcaacccatggctcacaggtcactaagcgtctccaatatgactattaaaactgtcacctctggaaatacactagtgtgagccttcagcactgcgagaataccttcaagtacagtatttttcttttggaacactttttaaaatgtatctgtttttaaggttattctaaattatagtagcctcaactcattctgtcaccagtagaattcagcagttaatatattccatattatttctttgaatcaattcattttcagagcactttaaagtctgatatttctcgatgtgcactgtgatgcctggaaccttcctctggaagtgctgattttatggactgaggactggtgactggtctgtgatagaagcaaattccaattccaaatgtaattagacaaaaatcatttttttagaatgtgtttttattgtaaaagtatctttttcagcttcctgttctattgtcttttttcagatacaacatttttgtctatggtgaactgctgtaaatgacgcagagaaatgcctaaaaaggacaggtggtttgactcatggatgatgatgatgtcactgtgccacttggacagggcgttttctctgaattgaagggaaagccaatggtgtttgtaaacaaatgcttctgagagcaaagaaaagtcttctgtgtgggaacacaagatagtaaacttatttaaaaacctattagtagaattagtggaaacacttaggttaaagtgaatcttgtccatataaattatattcatggccgggcgcggtggctcacgcttgtaatcccagcactttgggaggccgaggcgggcggatcacgaggtcaggagttcgagaccacggtgaaaccctgtctctactaaaaaatacaaaaaattagccgggcgtggtggcgggcgcctgtagtcccagctactcggagaggctgaggcaggagaatggcgtgaacccgggaggtggagcttgcagtgagccgaggtcgagccactgcagcctgggtgacaaagcgagactccgtctcaaaaaaaaaaaaaaattatattcatatgtattgcattgcaattataattacatatgcagattgattgatagtcatgaataataacgtctgctcctcttacatagaaagaaaaacgatattaaaagaagatcttctctttatttgagactcagaattccttctagaagaaggaagtgctttttgttataggatcccttcttttcctttttttgtttttttgtaagatgtagatgcttattctttgctttagaaaacttctcacttaaaaagatggcatgcacctaggggaataaaaggtcacctcagacaccaggtgtcattcctggtgaggcctgcctcgtcggtggcctggggtctgccggcaggttctggctgcacctgaaggctgcgtgcaccttgtcccctggacaggtctcctttcctggccctgctccagcccagcccttcttctagtggtagctctggctttgcaggcccagctccaggccctgctcctcagagagactcttccagagctggagctgggcacagccataagacaggactggaccagatgctcctgtaaacatccaggggtgtgccaggcccaccctcacaactgcttgttcaggtatcgtgatgggccactcggtccaaaatcagccaggccatcttttccatcatctcacttcaaataaacataataattatatttga

SEQ ID NO: 404152 - DNA, 732 bp, Homo sapiens
aattaaaaacaaacataaaaataaacttattagaaaaatgaaataaaagagaaatgaaataagaataattttattattagatttaacagatcaaatattatttcaatactcagatcaaatgtgcaataagacagggttgcaaaaaatgcacactttttttattaaaatcatttatataagtaatttatataaaaataatattacagttgcaactttctgttgtttctcaactatgaccaaacagaggttacaagtaaagtagcaatcccaatactaaactgctatatgtgcattttgaatcaatcatgtgtatgtcaatgaagtttttaatgtgacagatttgcattttggttgttaatttatataatctaggttggataaatgacaatgccaatcataggggataatgttgatcctaaatgttagtgtgttgatttcataacactcaatggagaagccagtctcagagaggcatggtgctagactggaagacaagaatttgaaataattacagtaagctgatggaattcacttttatctatttttataaagcaagtgattttgtatttttaaaatttatcttcaattcttcatcgatagctacttttaatcattaaccttataaatttaattatatttcaattatattttaatagaaagaatggatttcatgttttttctggtgtggatctttgataagaaaataaaattcaaaatattctgttaaaaaaa

SEQ ID NO: 404153 - DNA, 645 bp, Homo sapiens
cggcagatcgctgttatgaaaaggaggggtggaagtatttaaggaattgtggcaaacaaagtcacagaagaatggatataagcaaaagtagcacactgaaaaaaatggggaaaagtggagtctagatcacaaactggtaagcttggtgatgttctctagccaaattcgaaggtaataacattgtattatggctttctgtttaaaagcagtttcgcttatttgattattcaacaaatctttattaacacgcattacgtgtaccagaaactgtggtacacttaactgtggagctggggaagcaaaagtgaacatgccgccttaagtgagttcagatggcttatcttccggttggggaggcatcaagtacacaggtccgttgtaaaccagtgtcttaagtgctaaccttatcacatttgctattagaggatattaaacatgtcagacttcttggagaaagttgatattttcatgttccaagtttgggaacatcattgaattcagacagatctggattgaaacagattaaagtgcctacactttaatagctgtgttcctctcagttaattgcttcatttctctgtgccttgtctgtacacctggattaagaatagtacctacttcataaagtataactaataatgtata

SEQ ID NO: 404154 - DNA, 434 bp, Homo sapiens
tccaacatggggtcacacctagcacctgggccctgtgcacctgagcttggaggtttgtgaggcagaagaagggcttgtgacctggaaaatgccatctcttgtgggtcacctgaacctgattggtgtcatctgtgtctgcttccagccagaaatatgtttgcgggagggagggagagagagcccctcctctagtgtctgatttgcactctgcccccaacctgtgccagctgggcacacggtgttcctcttcacatggtggtgactcccacagcccatgggaaggagtcggtgggagggtggagaggagcagaagttccagaagctccaagtgcagtgttcgcaagagaacattgtgactgtttatttccttcttcaaatgatactgatatttgataaataaactcaggaattttaaatttcatggattgagaaaa

SEQ ID NO: 404155 - DNA, 410 bp, Homo sapiens
aaatcattaaccctcgtgttctgagtgatagggggaaatgctaaggggagtcagagcctggttatcagcattttggatgaccatatattttctccccgtttcactatctttaagatgggaaaagtaattccagtgggatttattgtgaccagttaaacacagaattcctggagaagtaattagatgacagttttaaattgttatttgtaattctgttttggtagtaaaggctgcagaggtgatggtgaatagggtgggtagtttctgataatgggcttgcctttgacctaaatgtaggtaggctgggtgaggtggcttgcacctgtaatcccagcactttgggaggctgaggtgagaggattgcttgagctcgagaccagctgggcaacccagtgagatcccgtctctat

SEQ ID NO: 404156 - DNA, 450 bp, Homo sapiens
catacactccagaatttaaaacaatcagaatttttttaaaaatatgcctaagattctgatttttagggagaaaaataaatgatattcctccttcctcaaatatattaaaagattaaaagcacaaaacaacagagaggaaaaaaatggacatccgtggcacatcattgtcataacatgctacagatgtccatttctatcacatgttggcatattatgacaatgaagcagacagaaagctgattcctttttttttgctcctctaagtgccagtaaaggcatatcgatcaacaaaataggaagttatgaagagaaaatacttcaaacagaagcagacaggtttatagttcaacgcagagcatatgtaacaaaactaatatatttttataagtaaacattatttccaatgaattacagaaaacaggactgatagcaaaagcttaaagatactat

SEQ ID NO: 404157 - DNA, 745 bp, Homo sapiens
gatcaagggtttaagctgcaagtactcaatatttggctttacatttcagctactggccttcaacaccacggagagaggtgttttcctggtttttcagagctgagaagtgagctgtcttccaactcacctgcataggtggaagtcttcccagatgctgtgcttgaatctctaatttgatatatttacaagacttgcagaggctgtgagctgtgtgaatacattgcacataagaactacagatgttttaaagccttctgtgaaagtgattctgaaggtgtggtccctgggccagcagcatcaacatcacctggaacttgtgagaaatgaagattctcaggctcttctctatacctactgaatcagacattgggtgcaaaggggaacactacagtctgtctttaaggagccctcaagaattaggagcctcccaagctgagacagatctcagctactggctgtatggagttggatgagcttcttacctgacccctgggcttcagtttttcatctgcaagatgaagtttaccagagaatgggacaaacaggagagaagttcctctgcttttatgccagataatcttagatgaatgtgtgatgattttacaaggtgcacggaaaggactgtattgaattacatcatgagaaagttattcccttctgatcaactctctttccccagtttctacattgaggcaaagtctcagtttaatgctggaatattataacacttgctaatctttcttta

SEQ ID NO: 404158 - DNA, 615 bp, Homo sapiens
gatcaagggtttaagctgcaagtactcaatatttggctttacatttcagctactggccttcaacaccacggagagagctattgtgagtaatactgctatgatcacggctatgcaaatatctcttcaagagcccatttttcattctgttggaagaagtggaattgctgaccatatgccttctgtgaaagtgattctgaaggtgtggtccctgggccagcagcatcaacatcacctggaacttgtgagaaatgaagattctcaggctcttctctatacctactgaatcagacattgggtgcaaaggggaacactacagtctgtctttaaggagccctcaagccaggaacagtaattgcacagaagaaatccgatctctgatgggatgattagacactaaatatcatcctgcagataattacttggtacttctcaatcagaggtaaaatttgtcctgatgactctaaactttagccagcttctgtgtcgtatcccatgacttccaactcgcagcatcccaacagactttactcctctgctgttccatctcaagccagagaagactggggctctatgtcagtcctcgacttgataccactgaacgattttccatgagga

SEQ ID NO: 404159 - DNA, 777 bp, Homo sapiens
aggggaggcggccttcaagtaaattaaacctagtcttggcattttctcattaaatgcctgagcagctcaatcccaccggcctatataaggaccacggtagacagagcagatgattagcagtttcagaaccatcaaaaagatgcccacagtacctgacttttaattaataactattctgcatctagccatttatctcaagcatctgggggaacttgaaaggtatttctctccacatagctccagtatatcaaggttggggctgagcaaagctgatattaaagttaattatgacctgcaggaaattactgaaaaaccctcacctcattttctacttcttaaacttcaaatcacaattgtaagtttgactttcagaaccttctggaattataaacaaatatcttaaagagaaaactacatttaagtatttctatttttccaagggacagaattaggagcctcccaagctgagacagatctcagctactggctgtatggagttggatgagcttcttacctgacccctgggcttcagtttttcatctgcaagatgaagtttaccagagaatgggacaaacaggagagaagttcctctgcttttatgccagataatcttagatgaatgtgtgatgattttacaaggtgcacggaaaggactgtattgaattacatcatgagaaagttattcccttctgatcaactctctttccccagtttctacattgaggcaaagtctcagtttaatgctggaatattataacacttgctaatctttcttta

SEQ ID NO: 404160 - DNA, 356 bp, Homo sapiens
cagctacgtgggaggctaaagtgagagaattgcttgagcccaggaggtcgagggtgcagtgagctgtgggcacaccactgcactccagcctggacaatagaacaagaccctgtcaaaaaaaaaaaaaagatggatcttgacatgggcgttaaataaacctttgctaaggtgagccactgagattttgagatttattggctactgaagcgtagtatatcccatcttaacagaaatactgtaataatatttataaagtcttaaattatttatcaatggtttataagtaacaaaaaggtaaacattagtcaaatgcctgtcagattttttcagatctccaggttgaccatgcttcacta

SEQ ID NO: 404161 - DNA, 479 bp, Homo sapiens
gaaacagtctctctcactctcccatattagggctttactcacagttctcagtcagttgttggcatgcaggctgtctacccatcctctcttcactgggatctttccttttccagtgaattcctctgttctttcttgaataaaagattatagtgtgaatctctgtgcactattttgctttttccatgtgaaatatttaaaaatatttttaggagaaattagatgcagaccctgttcttttaccagtttcaaccaaaattatcttcactcttatctgttttataaattgaatttctataaaagattgtgtctggaaaaagatagattccactgctaaaaattgaaatagcactgattgaatagttaatatccaaattcctttctaggctgggtgttttttttttccttaaagaaatgagcattagaatcatggagtaaaaatacacatttatctctgcttgaagtcccactaacatgacaaa

SEQ ID NO: 404162 - DNA, 505 bp, Homo sapiens
taacataagcttatacggggttaaaaataccattctgaagatgtgtcttgtggaattgggtgtatgctctcagtatacaggctgattgttcctgtcatatttgatggcccttaatatggagaaaactgttctgttgatttattctcacactaacagctctcctttttggtcactgcattaattttagtcagttactttcttgcttctaaagaatctttttatcttaatggcagatcatttttagttagaagtaacacatatcctctcccatctgggtactgacagagtttggaaaagccattatctttatagtttaagagacagcttgatgttattgttacactttgaaagttaaagtttttaaggttgggtgcggtggctcacacctgtaatcccagcactttgggagaatcacttgagcctgggaggcagaggttgcagtgagctgagatcgcaccattgcactccagccttggtgacagagcaagactccatctcaaaaaaa

SEQ ID NO: 404163 - DNA, 360 bp, Homo sapiens
gtcgagactgcagtgagccatgatcttgccactgcatgccagcccaggtgacagagtgaaaccctgtctcaaaaaaaaataaacggtattgataatgatgatgattaatgatagtacaggtgatgataaggaagccttattggttgttgctcatgtgaaacactagggtaagcactttgcctgtagtatcttttcaaatcttcacatagtctccttttctatataacagttcgagaagttatgtaaacagagggctgtagattgttttcaaacagctcactgagaaaatagacaatttatatcactaactatattgtatgacaagtaacttctttatatagaatggcagaccagaaaagg

SEQ ID NO: 404164 - DNA, 497 bp, Homo sapiens
tcaggctccaaaagcataatacaaaatggaataaataccagttttatatggaatctgtcatatacaaattatcccaaagagctttacaaacaatgaatttgacactgatacttcagggatggtgtaaacaaatgcagcagccattgagtgctcagcgataactcacacaaagtcctccttgaaatgtcagaatgcatataccttcaccaggattctttcccaaaacatagtgtctgcttatgagcttgctgtcaatcacagaactccactcacacttagtagaagggaagtgaaaattccttaaagaactgataataatttgcacaggaatttcccaaggggaaacagtttaccaaagttaaatcagtttacttggtgccaggttactagacccatttcaacaagaaatgagatcactactgggtaggtttaaatatgactcttcatacctaccccatccccagtgtccccatgttgcttcatccccacacacacct

SEQ ID NO: 404165 - DNA, 346 bp, Homo sapiens
gcattttccagcccctgtcttctcagtatgtatgagatccacatgctaagacagtcatgctggtgatcaaattactttttgaacaagtgatcaaaagagaagaagtcctaatgaaatcctaatgaattgtatctcaggctacttacctctgacagtgcttactttattaagtcggctgtcaggaagcagcagggcctctcaccagtgtgcccagctcagggctcagcccactccaaatacagtgacaagaaagcttgagaaatgctgtcaacctcaggagggaggatgagaggtggggctacagaacccagacagctgagcccacagagagcatttggggatccac

SEQ ID NO: 404166 - DNA, 294 bp, Homo sapiens
aggcttatagctggtgagtacctgcagagtcctgagggagcacaggacatcacatggtaaggggctcacaaggatggctaaactgtcttttataacagacccactcttgccatcactaacccactcccttgataacccattaagccatgaatcgatgaatgagccctcataaccgaatcacctcctaaaggtcttttcaacactgctgcattggagatcaacttttcaatacatgaacttttgggggacacattcaagctatagcaccccatgatctagtacagggttgaagga

SEQ ID NO: 404167 - DNA, 342 bp, Homo sapiens
ttttttttttcatatctcaacatgacaaatctgtaagactggcaaggcaggcaatattatttctatttcacaaataaaaaatgagtccaaagttcatttttaaattaaaaatgtttaaattgggctatttattctgccttgggccaacatttaacctactcatactggcctttaccttttattatttttagtttttttaagacagtgtcttactctgttgccaaggctgcagtgcagttagggtaatcacggctcactgaagtttccatacttctgggctcaagcgatcctcctgcctcagtttctcaaggagctgggaccacaggtgtgtaccaccacacc

SEQ ID NO: 404168 - DNA, 185 bp, Homo sapiens
acatccatgatctgttctagaagttccaggttccgcccaccaggaagagcagccacaggaaggcaacaatgtaaccctacacagacacaccacaaaaacagcaccaggaacagtatctgtggcactaactggactctaaacccggtacttcctttaagcctcacagaaaccctaggagggaggtg

SEQ ID NO: 404169 - DNA, 482 bp, Homo sapiens
gagatgtgttctcaatgccaagcatcaacccttgctcctgcatccctgggcccttcctggtgatgtgacgcaaacatggagagctgaagcatggacagggcgtggcagggaggatccccgctgccctcctgcatgtggtcagcactcctgcttgcccctttctgggctagaaacttctagcccagttcctcatcttcctgtctcctccagagctcctccctccctaatttactcattatccatcagatggttccagactctgtgccaggctctgttttcagtacccaggatacaaacttgaccctgacttagaccccactcccaggagctcagcatctcagaggcggctaggataatcttttcttcctctcagcttcttaaggtctcagctacttgggggaaagacagttgtccattagtcattctattaaaatttcctaaggtttttttttttttcaagaacaataaaatgttttaatgtc

SEQ ID NO: 404170 - DNA, 505 bp, Homo sapiens
ctcaaattttctttctctgtaagaatgggaattaatgcccacctacgggttgcaagtgcttacaggagctgggcaagcaacgaaggtaagagttgtagagacttcggtaaactggagcacatgattcctgggaagcaggcctagtgtaaacaatttatttttctagaaaagacagaagtttagagtatatgaaatctaatttttaagtattggttggcaactaattgactatcgtctaccataaggttatatgataattattagggcaggagagtgaatgcatcttaatatgcatggcagaactgtgtgtttccttccatctggattttcataaagctttctgatttatcagtaacgatctgaaaaatgtactgtggcatgtaacatcttttattcattttattaggcattagaggaagaatattctgtagtcctgctttattctgccatctttacctggaaatccatttttataaaatttttgtaataaaaattcacttgatca

SEQ ID NO: 404171 - DNA, 658 bp, Homo sapiens
gatgttaaagagtcaattatatagttaatgtcttaattactcttatgataatgacaaggtaagggaatttcaaaccactcttcctttctacctcaaagcaagcccttggggaactcatctgtcactgctctatttgtaaagtttttcctgggaatcccagtgggaaaggagatgagggccacagaaataatagaggagggaagtgacaagggcaccagaagctttatgaccaagttctagggttcttgggtcatacctattgttgacctaaaggaaaaaactgaggcaaacttaacattaagtaaagtatatttggtcaggttttgaggacagcctttaggagcaaagattcaagttgccgtgaaaatacactctgattagcagcagttataagtaggggtttttttgtttgttttgttttgtttttgaagacagtttcactatgttgcccaggctggtctcaaactgctgggcttcagcaatcttcctgccttgacctcgcaaagtgctgggattacaggtgcaagccaccacaaccagcccacaagtaggtttttaaaggaaaagaagattggatgacgtgaagatattgaaaaaaaacaggctgactctgggcacactgcgtaggagttagccctgctctggaaggagccgcaaa

SEQ ID NO: 404172 - DNA, 345 bp, Homo sapiens
gatgttaaagagtcaattatatagttaatgtcttaattactcttatgataatgacaaggtaagggaatttcaaaccactcttcctttctacctcaaagcaagcccttggggaactcatctgtcactgctctatttgtaaagtttttcctgggaatcccagtgggaaaggagatgagggccacagaaataatagaggagggaagtgacaagggcaccagaagctttatgaccaagttctagggttcttgggtcatacctattgttgacctaaaggctgtcctcaaaacctgaccaaatatactttacttaatgttaagtttgcctcagttttttcctttaggtgtc

SEQ ID NO: 404173 - DNA, 151 bp, Homo sapiens
ggaggcccctgctggcccaggctgggcaactgggagctggcagaggcatgggttggcctgggcagcaggtgggcagcgtcatcctgactggaaggacgagcagtgggtcttggggtgatggactgggttgtgactgtggcgagtttagggg

SEQ ID NO: 404174 - DNA, 432 bp, Homo sapiens
aggaagcagtgggcccaatctggggagaaacaataggaaccttgagaaaaggagaggggcagttaagtagagaggaagacaaacaaggatataggggaggggagaggtagcgagagaaacagctccagcatgggctgaggagtaagtccagtagggtctagactccagtgtaagagtattatgtgagggcatagctatctggagtgaatctagcttatcaatgggaagcatagcatctgggaggcctaggtgtgggccgtgtatatttggcattttggccatggctcaggaactgaatagtaatagctactacttgctgagcatgtgctttgtgccaggtactgtgctaggcactctgcacacatttcctcatttaatctttatgaccctatgaagtaggtgagcctccctgtttgaccgatgaggaaactg

SEQ ID NO: 404175 - DNA, 1113 bp, Homo sapiens
tttttagaatgagctctttattgaatcaggatttgaggtgattatacgctaagcacaacactggatcctatctttgtctagcgcgtgtcttctcaaaaataaaagtgcaaaataaaaaacaaaacaaaagaaataaaagtgcaaattctgctctcagccgggtgcagtggctcacgcgtgtaaagacgttctcccctggtgaatgacttgtttttgtgtattttctttgtctctcgtgatgcatctgcactgacctgcagattttattttgtcctttttgcagactggaagtgtctccagaggcgcaacccacagccaggcttccttcccctactgactccccttcctctcttcctcctcttccttctagctctggccaggcatctgtcccctctgaattgggacatggtgcagacacacagtcctctgagagtccttctgtcttctcctctctctcatctcccatagcagctcccatttccacatccactccaattgaaagctggcctctcgtagacaggggccaggccaagtctgaaggaccacccttgctccctaaggcagagttgcaaactgagagtttaacaccggttccaaattctggttcttctgccctgggatcacttttcaaacagccatcctttccagcaaataaagggacagaagattctctgatgggcaggacccgtgagacaggcacagagaagaacaccagcagccttgagttggaggagtctctcccagagcagcctgaaacagggcgacaagaggaagaacttccgagattcccctgcaaaaaacaagactacagcccatcatctggagaagcccaggaagtaccgtttgccctttcactcagcagtgatggagctgtgagccctgttggggagcttgcagcaggaggagacagagacttggagagtcaggctgggtctcttgtggagagcaaagccagggatgcagctgaagaagtggcgccccctcttcccatgggagcatcagtcccttccattgattccatgatgcggaagctggaagagatgggtctgaacctccgcaaggaccagaagaaaaccaagaagcgtgtgtcattttctgagcagctcttcacgg

SEQ ID NO: 404176 - DNA, 440 bp, Homo sapiens
cacggcattccactgtatgaatataccatattggttcatgtgtctccctcatcttcccaaccaggctgtaaattttgcacatctatagcataatcctatggctcttatcaaaagtctgagctcatatcaagtgaacactgaatggaaaaagttattattgctcggtttttttttgtttttttttacagaatctcgctctgtcgccccggctggagtgcagtggcacaatctcggctcactgcaacctctgcctcctgggttcatgccattctcctgcctcagcctcctgagtggctgtgactataggcgcctgccactgcgcctggcaatattttttttttttgtattttttgtagagacagggtttcaccatgttagccaggatgggcttgatctcctgacctcgtaatctgcctgccttgacctcccaaagtgctcgg

SEQ ID NO: 404177 - DNA, 380 bp, Homo sapiens
cttttggtcttccactttctctccttgagacggtatatctttttgtttggtgaggtgataattctcttttaactttttcatcttctgtaactttttttctccagctctaactctgctttaacggcctgacactgaaatgttctatcttgaaggcctagaaaagttgttttcctccagtatatcctgattctgtgctcttggctttcttactttctttctttcttttcttttcttttttttttttttaggagtactcattttttaatttattttagtcaggatattttctgaagtaaaatttcacagaaaacaaaattttattttacatgtacatttcatctctttaaagtcaagttagctctttttctttaaaaaaaaaa

SEQ ID NO: 404178 - DNA, 751 bp, Homo sapiens
tgggagcaggccctggttacagaattttctggggtttaaagtaccctctagaggtttcccatgggttatttggtgcatgccctatgtaagatgaaagtgacctgcgatcagtctgatggtgaggaaagcaggcaaccagaggctgaagtgaagttagcaaagttacatgctatgcaaatatctgattcattgtggaaagcaagcaatcagaggctgaagtgaaagttacaaagttgcactcctatataaatgaagagcttggccggagaccagcttgatggttgcaggaggggaccaatcagaggtactttcagttcttgatctgcttggtagaaaagcggtgtgaatgacagaggtggtgccatccagcgcgctcagcgaggtcagcctgcgcctcctctgccacgatgacatagacactgtgaagcacctgtgtggcgactggttccccatcgagtacccagactcatggtatcgtgatatcacatccaacaagaagttcttttcccttgctgcaacctacagaggtgccattgtgggaatgatagtagctgaaattaagaacaggaccaaaatacataaagcacgaggatggagattattctagcatccaaacttctctgttgacacgacaaagtcgggtacatccctaagtctgggcgtcgtgaaagaggtccaggaagcacggaataggttcctccttaccttgaaaggttccacggtcaccgtattaaccaccgggccaggacat

SEQ ID NO: 404179 - DNA, 389 bp, Homo sapiens
actggacattgtactgggagacacggaactcgaaagaaaatcgcatcgaaaggctgtacctggaggaaggaagtgcggagccagctgagttgggagaagagctccagagaggtgtgaatgacagaggtggtgccatccagcgcgctcagcgaggtcagcctgcgcctcctctgccacgatgacatagacactgtgaagcacctgtgtggcgactggttccccatcgagtacccagactcatggtatcgtgatatcacatccaacaagaagttcttttcccttgctgcaacctacagaggtgccattgtgggaatgatagtagctgaaattaagaacaggaccaaaatacataaagatggagatattctaatttcagctactatcatttc

SEQ ID NO: 404180 - DNA, 411 bp, Homo sapiens
gtgccattgtgggaatgatagtagctgaaattaagaacaggaccaaaatacataaagaggtacgtacgtgtgtgcagtgaggacttggcagtcactgtcattggacgggccaagggggcttgcgatggaatcatgctgcctgctccacagccgtcgtccaaggagcctgtgacccaaggaatccaagtggccaacgacacttgtccctggctggtgcttttctgtgtgtgtgtgtgtgtgatttcatggtgcgtgggcctccagtcgtgcccagcagcaggcttcataaccactgtcgttctgaagcaggcatgagcgcagatgatgcattgagaatctgcagttacaacgtgctatgaaaatacccctgatttgtgttggcggcagtgtcatagaaaccgctaagactgc

SEQ ID NO: 404181 - DNA, 300 bp, Homo sapiens
ccccccacccttcccccacgaggtgtgaatgacagaggtggtgccatccagcgcgctcagcgaggtcagcctgcgcctcctctgccacgatgacatagacactgtgaagcacctgtgtggcgactggttccccatcgagtacccagactcatggtatcgtgatatcacatccaacaagaagttcttttcccttgctgcaacctacagaggtgccattgtgggaatgatagtagctgaaattaagaacaggaccaaaatacataaagatggagatattctaatttcagctactatcatttc

SEQ ID NO: 404182 - DNA, 554 bp, Homo sapiens
agaccaccccttatattgtcttatgcccaatttctgcctccaaagaaagaagaagtaaaaactaaaagtcagaaatggaattcacaagcagacagcctggcgccacactctgggtctggtagttaaagatcaacccctgacctaattggttatttgcataagaaaaagcactgtgaagatccctgtcctgttctgttccattctaattaccggtacatgcagcccccagtcatgtaccccctgcttgctcaatcgatcacgaccctctcacgtggaccccgttagagttgtgagcccttaaaagggacaggaattgcttattcagggagctcggttgttggagacatgagtcttgccgaagctcctggccaaataaagcccttccttctttaactcggtgtctgaggggttttgtcagtagcttgtcctgctacacctgtaatcccagctactcgggaggctgaggtgggagaattgcttgaacccaggaggcagaggttacagtgagccgagattatgccattgcactccagtctgggtaacaagagcaaaac

SEQ ID NO: 404183 - DNA, 274 bp, Homo sapiens
ctttttttaaagctaggtgaaatgatttttaacagtatacttaacctatgtataaaaatatcaattcatttatatgtaataaatacacaattatatttcatattttttcatacgtattacaacatctggtgtgtattttatgcatacagcccatttcaattcaaagtagatacattttaaggattcagtagccacatgcggatagtagctaccatactggataacctaactctagtttccaagtaataacacaattaaaaaaaaaacaaaacaa

SEQ ID NO: 404184 - DNA, 528 bp, Homo sapiens
gcctatgcggggcggggccctggcgctagccaatggcaaatgttcttttcagcttcgctaatccccgtggccagtttgtaactccctagagtccagctggagccttcactcggtcctttggcccgccccgccttgtgggggcaggtctggaggtctgaagagagtttgggctaatccaggccccttcccggctcccacccaacccccactggccccaggagacctggctggagaagcccatgggttctgaaacctcctttctcacagtctgtgcccaaagatgctgcccactcttagtccgagtaagtgtttgccgttttgactctcctggggtcccaagtcgtgtccggcccgccccaccagtcaggaagattccatactgagtaggaaggcagagcaagggtctggtccccccaccacaatgtgtttggatccctagttcttcactggcaaaatctgccctgtctctcacaataatgtgagtctgagcagaaaatattaataataaacctaacactcattgcacgt

SEQ ID NO: 404185 - DNA, 572 bp, Homo sapiens
aaggaatactctagtgctactgactgactgcctaggctttgtcttttgtaaagacaagggaaagaaagccccagtgttagaaaactccttcccactttcattctctgcgagaagtacctagaaatttctagttattagactgtataacttgactctgctgtaaaaactttatcctagcttgggctattttccagatggtgtttcttctaggaggaaaaagaattgcctcaattgcagggaagtttttgctaatggtaagtcaagcaagtctcagtgtctttactacaggtaaaagggtgtaaggagattttatgagaactgaatgaaccctgaaggtcactagtcaaattcaggtatgctgttaagtgttcttgcttgagacccaaattacaagactggccaatttttgtatttttggtaaagactgggtttcactatgttgcccaggctggtctcgaactcctgggctcaagtgatccaccagcactttgggaggcgaagctggaagattgctagagcccaggagttggagaccagcccgggcaacaaagtgagacccccgtctctactta

SEQ ID NO: 404186 - DNA, 375 bp, Homo sapiens
acatagtagatgctaaataaagctaagaggtaagaaacagctgacagtatcaggagacagaaatgttctgggaggtgaggttggtaaggggaaggaagcgagggactctgagtaggacttgggggggatcccagcagagaccccttccaagatcagacttcccacccatgcctcccttcccatcaggcacttctggcctcatcaaacattctgggtgagggctccatctcgagagcttgacagaaaacctttccctgggattccacacctctccagggagtcccgggactctgcagccacctccctcccttcccatctggccaggccacggctgcagactatatttttgcaataaaaaaaaaaatcaggacttgt

SEQ ID NO: 404187 - DNA, 300 bp, Homo sapiens
gagatgaagtgttactgtgtcacccaggctggagtgcagtggcatggtcttggctcactgcaacctctgcctaccgggttcaagcgattcttctgcctcagcctcctgagtagctgggactacaggtgcgtgccagcatgcctgcctaatttttatatttttattggagatggggtttcaccatattggccatgctggtctcgaactcttgaccttgtgatcctcccccggctaagctgttgttatctttttgtttacatcatgttgtttatttgctttctaaggacaactaggtgcctg

SEQ ID NO: 404188 - DNA, 505 bp, Homo sapiens
ttcctgtcctgcattaattttccaaagttggaatatagtcatgtccttttatgctgtagagacttttctttcaccattactttctgatatctagtacacagtatttctttttctcacatctttgccgtttcaccacaataataaatcgggtgaagtgtgcacaatatctgtattttgaatggctatggcgttaggttgaaatggccaggcacaaatttagtctggtcattttgtttacacattgggaaaaaaattagtttattaaacattacctgtaactgtgtctgttttaccaagctggaaccttgggactttttatttctgatttttattacctgaatgtcagaccattttttcatgtgatgtacctagtgagtggagtttgctttgttttatggtatctgtactcctggtatattcaagcactgttttgaaaacagatgacttatttctccattaaaaatgcaataaaaataaatggcaaacaagcaaagtgaaactaaaa

SEQ ID NO: 404189 - DNA, 462 bp, Homo sapiens
aggcagccagctcctggggggagggtagccggctcaaccccctggaggccctgtgtgacctcagcctaggaggctgaagctgcagcctctgcccactgcgccatccttgcgaaggggctcccgcagaagggttggctgtgcccactaggagctggtcctgctgctcacttccatggccctggtggccttcatggagacagccattgtgtgcaaaggacggaaagtaagaggccccctccttctctcaccctttgtggggaaaccgaggcaagtgacaccttaagtcccagggcgctctgtggagcagctgagactccagcttccattttctgacttccagggagctatctttctaggtccctgggagggaggctggaaagggctcgtttcagaatacggttgggcaagtttgtttttctcaattctgcattaaaattgtctcgagtcatggttctgatgaca

SEQ ID NO: 404190 - DNA, 203 bp, Homo sapiens
cttaaatagaaattcctcctttcagcaaagttaaacaggaaagcagcatttagaatcacctcttgggcaaccaagtaacactaagaaaatgtttatctgaatatgatgaacttacaccacctagaaaactgcacagacttgggcagtgataccctatcaagtgccaaaagtatgccaagataagcttcataataaaattatgg

SEQ ID NO: 404191 - DNA, 989 bp, Homo sapiens
ggcaggtacgaggctgggtgttgaatcggccgagggttgagtcagcttggtggctccctgtggagccagggctgagcctggtcacgcgcactcgccaattaagagatggaccagccagcagtcaagtgcattctccagtccttgcaagaaggatcagccctttctgtgccagcctcgatcgccttgtgctttggtctctttttctcccccccgcctggatcctgcctcgcgcgggccgtcctgttgctgagactcggggtaccgttctgctgacccagctccctttagtcacgtttgcttggctctggtactaaatagttgggattaccgaagagtccccttccttgcgtgtcagcacggatgctgtgactgccacctgcgtcctcgtcaagtgcccgagctcgccgccgtgtgtgctgcgctgagtgagttatgaggtgcctttcccggaaccctcctctcgcctggacccaagagaggcgacagctgtggctggggctcttggtttccagagggtctggactggtttgggtgctttaaaatagatatttagttcagtggtgcttatgggggagatgggactagaacttaagtgtgagacttgggtggatgggaaagttaaatataggtctcttcaagtttttttggcttttgctattgttaccacttgtcactgtctccatgttaaaatgccaaaaatgatctagttgcttttgcttttttccctattttccacccagtcactccttaccatgactccttccctcagagggcacgtagcagtatctgtcccgccagtcccaaggccctgtgggaggagactggcctgcatctctctaagacttagtctgatgccatgcgcatctcttgttctgtgttcaatcagtagtccaggggagaagcttctgccacttcagagctttgctaaactatcctaacttgtctaaatctccccagaatcgccatctttgacccaagcttccatgcga

SEQ ID NO: 404192 - DNA, 747 bp, Homo sapiens
gctgggcttcgggacatggagaatcccatgagtcctcgctttcaagaaatgggggagatgggcaagtccttgctttcaaggattcccatgagtccttgctttcaaggattcccatgagtccttgctttcaagaaacagcggggctgggtgtggtggttcatgcctgtaatcccaatcctgtaatccgaggcagaaggattgtgtgaggccatgtgtttgaaatcagcctgaaaacacagggagaccttgtctctacaaaaaatcaaaaaagtctgggcgggggggctcacgcctataatcctagcactttgagaggccgaggtgggcggatcatgaggtcaggagtttacgaccagcctggctaatatggtgaaaccccgtctctactgaaaatacaaaaattagctgggtgtagtggtgcgcacctgtagtcccagctactcgggaggctgaggcagaagaatcacttgaaccctagaggcagaggttgcagtgagtggagattgcaccactgcactccagccagggcgacagagtgagactgcatctcaaaaaaaaaaaaaaaaaaaatcgaaaacttagctgagcatggtgatgtaggcatggcgttgtgtgttggtggtcccagccactcaggaggctgaggtgggaggattgcttgaacccaggaggttgaggttgaagtgaactgtgatcgcgatcgtaccactgcattgaagcctgggcaacagagcaagaccttgtctc

SEQ ID NO: 404193 - DNA, 441 bp, Homo sapiens
caaaactgtcaatctggttgttctctgcttggcaaaagatttttcaaaaatgaagtgaaagaaaaattatttagacaaataacaattgagatatttcatcactcgcagattggaactacaaaaaatattaaagaatgttcttcaggcagagaacaaataatataagatagaaatttagaaagatgaatggcaaatgccattcaattataatcatagaatgtagaagtcttttattctcatatataaatctcttttaaaacaattctgtgaacaaaataatacaaatgtgtatattatatcatagaaataaaaataacaacatcagtagcacatgaggagagaaacagatgtagaatcttaccttctttcaagatacataaaaagtagcattatatttgaaaataaactgtgataagttaaagatgtatattgtgatccctg

SEQ ID NO: 404194 - DNA, 1159 bp, Homo sapiens
taagacggagtctcactctgaaacccaggctacagtgccgtggcacaatcttggctcactgcagcctccatcttcgggttccagcaattctcctgcctcagcctcccgagtagctgagattacaggtgcccaccaccacgcctggctaatttttgtatttttagtagagacagggtttcaccatgttggccaggctgggctcgaactcctgacctcagatgatccacccacctcggcctcccaaagtgctgggattataggcatgagccaccatgcccagcccacattagcttttgaagggaatatttttatgttcataggaaaaaaagcatagctcctctatataaccaacttcttttagtactactgatagctagtatgttaagtttgatggactaattataatcttttttttatattcctagtatgctggattctatgattggcagatttaacatttatccttctcgtaattcacaaccctaaagttccatttactaataatttataattttgctggaacatgaatttgaatcttacatgcaacaattggattgagagttttgggagggcagtatgtgggacctgttcacatagtccatcagtctagcagccccatctcagtgtggctttgtttttgcaatttgactttgagtttgtggtaactcctgtggtgtaaatcattgcttcaggttctgagcaacagtgtatattatagctgcattgcaggtttcaggatttgcagggtatggggatgtatccaccattattgttaaagatttaccttagcagacacattagtatactcttctatttaaaaatcctttataagagtggtattatatggctatcctggtattctttcatattgttagtactttgaaatttttgctgatgttcaattagtaaaattaatggccccctaacagcagttgtactgtttgtatgttaaacttgatacatttagaagttaatgttaaagcctaatcctaaatttttaaaaggtgaaaaagtttttactggcaattgggtggccttgggacctgtgtgaagagcatagactgtagtttggtggaaagagcaaagactttgaagttctcggattctgtgtgtattctgctcctagcagagtgacctcaggcaaatgactttataggca

SEQ ID NO: 404195 - DNA, 999 bp, Homo sapiens
cggagcccacattagcttttgaagggaatatgggctgggcatggtggctcatgcctataatcccagcactttgggaggccgaggtgggtggatcatctgaggtcaggagttcgagcccagcccacattagcttttgaagggaatatttttatgttcataggaaaaaaagcatagctcctctatataaccaacttcttttagtactactgatagctagtatgttaagtttgatggactaattataatcttttttttatattcctagtatgctggattctatgattggcagatttaacatttatccttctcgtaattcacaaccctaaagttccatttactaataatttataattttgctggaacatgaatttgaatcttacatgcaacaattggattgagagttttgggagggcagtatgtgggacctgttcacatagtccatcagtctagcagccccatctcagtgtggctttgtttttgcaatttgactttgagtttgtggtaactcctgtggtgtaaatcattgcttcaggttctgagcaacagtgtatattatagctgcattgcaggtttcaggatttgcagggtatggggatgtatccaccattattgttaaagatttaccttagcagacacattagtatactcttctatttaaaaatcctttataagagtggtattatatggctatcctggtattctttcatattgttagtactttgaaatttttgctgatgttcaattagtaaaattaatggccccctaacagcagttgtactgtttgtatgttaaacttgatacatttagaagttaatgttaaagcctaatcctaaatttttaaaaggtgaaaaagtttttactggcaattgggtggccttgggacctgtgtgaagagcatagactgtagtttggtggaaagagcaaagactttgaagttctcggattctgtgtgtattctgctcctagcagagtgacctcaggcaaatgactttataggca

SEQ ID NO: 404196 - DNA, 340 bp, Homo sapiens
cactttgtcgcccaggctggagtgcagtggcacgatctcggctcgctgcaggctctgcctcccgggttcatgccattctcctgcctcagcctcccgagcagctggaactacaggtgcctgccaccacgcccagctaatttttttgtatttttattagagacgggattttacagtgttagccaggatggtctcgatctcctgaccttgtgatccgcccacctcggcctctcaaagttctgggattacaggcgtcagccaccgtgcctggctttctctttttcttagtaaatttcttccctaaaatatccagtgaactcgagtgtcagggatatgattagtt

SEQ ID NO: 404197 - DNA, 474 bp, Homo sapiens
cctctgcattgtcccttgggggtgctgggcaatcagggtggtggcacaggctgggaggggttgttggtgccctgcctcccactcagggtggtaccactccccagttctgccactgagacatgtctgatgaggcaccatttattcctctgtggttcataagacaacgtgtagaaaattagcattttatccctctagctgtattctgttaaaaatatatctaaaagcatcccatgcctgtaatcccagctacttgggaggctgaggcaggagaaatgcttgaacctgggaggtggaggttgcggtgagtcgagatcgctccattgcattccagcctgggcaacaagagcgaaactctgtctcaaaagaaaaaaagagttaaaaggctgttccatcttgcatactcctctcccccatgttggtgagattccaaagtgtagaagttttaacttttctaagctggaatttattagctgt

SEQ ID NO: 404198 - DNA, 314 bp, Homo sapiens
ctctacaaattaattaacaccaaagaatacatttctcctatactgattgttttgcagttaagcttgagtccaatttcccctagaagttgttgttttgatagtctttggacatactgtgaaatgtgattaagtcacccttggtagtgttagtttatcactacggtgaaaaaccatagagaaaataagaaattccatggaaattttcctagtaaccagttgtcaccactggcatcatgtatatagatgggattgttattgttaccgtatttatatgatttggctgcctatcaaaatattatatattttcaaaagtg

SEQ ID NO: 404199 - DNA, 408 bp, Homo sapiens
aaaaatagaggaagaagccctttctaactctggtcccaaggaacacctgttgcagatgccacttagtctcaagcttagctgtcatgtcctactcataaactcagccatcttccccttctttctcatgccaaccagtatcatatgtcaggctgaatatatccgtgctgatgtcagagaatcacataacaccagaggaaaacaaggccagccagaatgttgctacattttcagagaagaaaaccaaagcaaaaaggccaaaatatagcttccaaattttgcatattgtcattgaaattcaaggtttcagataaagtttgaaactcttgaggccaagtggcgagactgcaattacgttactttttagcagctgcagtttttttctaaatcaagtcatctcactttgttaaa

SEQ ID NO: 404200 - DNA, 517 bp, Homo sapiens
atgctaaccacatgactattgcttcccttattcaacccacccctgaatggcatgaaggctgttagctcagagtgaagaggcttttaaacgctgtcctgtagattggtatggacaggctgcacttccgatttatctagagagatataagacatgatccatggccaaggtaatggggtgggctcagacatttttaagttcctccagtaattttggtaaatagttctagtttttggaactatggctcagagcatcaaagagaaatgtagctcctgctcccatcctgtgaactttacacaactgcctaaagctatgatatctaatatggtagacagtagccactaggcacatgtggctattggccacttgaagtatgcatagctagtcaagatttcaaagacttacactaaaaccataatgttttggacatagggggttacataaaagtattataagacctaatttcatctttttaaaaacatattttaatgtggcaataaagcatttaaagttacataag

SEQ ID NO: 404201 - DNA, 587 bp, Homo sapiens
atctcccactacagacctgccagggcccaggagagctcgacccacccaggcacaccatagccccagagatggctggggacacagaagtgtggaagcaaatgtttcaggagttaatgcgggaggtgaagccatggcacaggtggacccctgagttcacacaagagaacatctcaaggatcctgaaaaacctggtgttccgaattctgaagaaatgctatagaggaagatttcagttgatagaggaggttcctatgatcaaggacatctctcttgaagggccacacaatagtgacaactgtgaggcatgtctgcagggcttctgtgctgggcccatacaggttacaagcctccccccatctcagaccccaagagtacactccatttacaaggtggaggaggtagttaagccctgggcctcaggagagaatgtctattcctacgcatgccaaaaccacatctgtaggaacttaagcattttctgctgttgtgtcattctcattgttatcgtggtgattgttgtaaaaactgctatatgagccttggaaacatgaagctaagtcagaaaaaaaatcagatacaaaaagtca

SEQ ID NO: 404202 - DNA, 818 bp, Homo sapiens
atctcccactacagacctgccagggcccaggagagctcgacccacccaggcacaccatagccccagagatggctggggacacagaagtgtggaagcaaatgtttcaggagttaatgcgggaggtgaagccatggcacaggtggaccctgagaccagacaagggccttcttcccaacgtcctgaagccaggctggatgcaataccagcagtggaccttcgccaggttccagtgctcctcctgctctcgtaactgggcctctgcccaagttctggtccttttccacatgaactggagtgaggagaagtccaggggccaggtgaagatgagggtgtttacccagagatgtaagaagtgcccccaacctctgtttgaggaccctgagttcacacaagagaacatctcaaggatcctgaaaaacctggtgttccgaattctgaagaaatgctatagaggaagatttcagttgatagaggaggttcctatgatcaaggacatctctcttgaagggccacacaatagtgacaactgtgaggcatgtctgcagggcttctgtgctgggcccatacaggttacaagcctccccccatctcagaccccaagagtacactccatttacaaggtggaggaggtagttaagccctgggcctcaggagagaatgtctattcctacgcatgccaaaaccacatctgtaggaacttaagcattttctgctgttgtgtcattctcattgttatcgtggtgattgttgtaaaaactgctatatgagccttggaaacatgaagctaagtcagaaaaaaaatcagatacaaaaagtca

SEQ ID NO: 404203 - DNA, 646 bp, Homo sapiens
aagtggttggaaagaagatgggggttgaccagaagagggcaggagggaactttctggggtgatgaaagttacacaggttcatcatgcagttacacaggttcacaattattgaaactcagtgaactgaacacttgaggctgtagatttcattgtattgcttctcaacgatcacacctcaaataaaataataataaataaacgcaatgcaatgctcagcacagagcgggtaacacggcaagtgccctagaagagttgctaaattgtaaaacacatttttttcctaggtgaattttaaaaagaatttactaggagaatcactttggaatatgtttggaaatctatttttttattgtgatgaaacatacatgccataacatttaccattttaatcatttttaaatgtacagttcagtggcattaagtgcatgcacactattttgctatttagtttttatttcataatcataaatttaactctgcaatccagctaggcatggaagggaacaaggaaaacatggaacccaaagggaaatgcagtgacagcacaaagattctaggatactgtgagcaaatggggagcaggcatgctctcctgaactataaaggaatggctgagtggtgaagataaaacacaagtctaatttat

SEQ ID NO: 404204 - DNA, 424 bp, Homo sapiens
atgatttctctgctttggtaagccagagtcagtttctgttgttcattactgaaaaccctgacatacagacacacacacacacacacacacacacacacacacacacacacacacactcacgcatgtcttccctgtccacttgttactggggcttagatccaatttagtccacagaggtgcatgcttagacaaaagctgttttttttctcagcaagttgtatgcttattgcatctgtgtatatatacgttaaaaagaaatgcacagacagaataatgcacaccaaaataaatactttgaaacagtgggtacttctggatactaggagttttttctctactggcttctaaaagctttctatttttctaagacatcataattataagaaattataaataaacataattataagtaattactttcatt

SEQ ID NO: 404205 - DNA, 333 bp, Homo sapiens
ggttaatgccaaccagactctttttttccccagtcacatagttgacacccacctaatctttcgtaacttctgtaattccactaaaaaaagatttaggccgggcacggtggctcacacctgtaatcccagcactttggggaggctgaggcaggcggatcacctgaggtcaggagtttgaaatcagcctggccaacatggcgaaaccccgtctctactaaaaatacaaaaaaattagccaggcgtggtggtagtggcgcacctgtaatcccagctactcgggaggctgaagctggagaattgcttgaacccaggaagcagaggttgccgtgggca

SEQ ID NO: 404206 - DNA, 294 bp, Homo sapiens
ctttctttctttctttctttctttccttctttctttctttctttctctctctttcttctttcttctttcttgtcttttttctttctccttttttttctttccttccttttctcttttcttatctttttctttcttttcttcttttttttctttctttcttcccttccttcttgtttggttgcttttttccttccttccttcctttttccttccttccttccatttccttccttcctccctcccttccttccttcctcctttctttctttcattctttctttctttatcattctc

SEQ ID NO: 404207 - DNA, 685 bp, Homo sapiens
cacctgattgccataagcatacaaaaagtggcttcggggatgaaataccattccaacgggagaagagaatgatgaaggaaaccgaaaaattggaaattttgattgtgaatttggttcattatttctcagggtgctcacagaggcaatggcagttttcctgacctaggtaaacaaagaatgagcaagtcataagactagtctgtgttacaaattttagaatttcctgttacttgcattttgattaagagagagatacaatcactaacacaacatagaactagaaggattagcagtaattgttacctctttactccaccactctggcccctgccacacacccatcttatagttgttgaaaatgaagtttaggagattaaataacttgttgaaagctctataattaacagcaaagagaggtttattatagaatcactgctgaacttgccagacagactccaaagcccatgcttatgactatcatgccaaaagtgtggatgcctaagccacaccccagttctattcaaccattattttaaatgggatcagaatatgacacctcaggccaggcgcagtcttcagcttaaaattatctttatataaaagtggcttgtaatctcagcactttgggaggcctatgtgagaggattgcttgagcctaggcatttgagaacagcctggtcaacaa

SEQ ID NO: 404208 - DNA, 568 bp, Homo sapiens
ctcctcagggactctgcagagagtccccaccagcaagaaggctctcaccagatgaggctcctcaaccttggactctcagcctccataactgtaagaaataaatgcctttactttgtaaactacacagttttcaggtattctgttataagcaacagaaaatggactgttttctttggacatccatgaatatggagagatggagcaaggctctctgaggaggaggagcacatgcttgaagaatgtgagccccagaactggcagccaatgtgagatggagctggccaaggactatagatatgtaaaggtcagggcaacacatgcttagaccataaagtgtatatattatacctgtcaaggtaatctatatttggggatgaaagtgaaggacaacatctcacatattcctgcttttcagtaaaaaaggacctgggaaagtcatcattttttcttataaacccagaataattcatagagaatgctaagagaaaacacaattgttgaggtttacacaagcaagtacatttttttttagaagtttcagtctccataatatattaaaagttgaaaa

SEQ ID NO: 404209 - DNA, 426 bp, Homo sapiens
aacatatatatacgaatagagctcatttaacctaaagcaatttctagttagggcagatctcaatatgtgatgtttgatgtaactcaatttttaggagaaaggctgttctgtgttctggggaaagctagtgattttctccaaagaacctggatgcagtctaagttaatgaccctttttgtggctaaatatctttttgatggattatcacaatgctagcagaaattactcttttgttccatcatactggtagtatggcaagagaccaaatgaacatctaagggttccatttgcctttatttttttttctcacgagatttcacaaaacaaaaaaaatgaggattatgttttcagtagtgttttaaatgcaatagtgaatatattaccgtgacaacttgcatacttttttctctttccctttatcagcca

SEQ ID NO: 404210 - DNA, 3923 bp, Homo sapiens
tcagttcttttcttttcatattggttgggttactttgagtctggcctacatgatgggcagtttagaggtcaaccaaaggatttcagcagaacttatacacagaatttcattcaggcttcccgtgtctggttggctacagtgtgggaatttcctcccacttttcagccactactgaggatgcctttcggcaaaattccttgaaattggaaacttacagggaaattcctttcctccaagagtgcgctctcctccagtgttggcttgcttttggttgttctccgtggttttagatagctgtctttatattaattctggagtttacagttgatatctgttgggggcttagtttgataacatgtattcttctattactagtagccagacctgtatgtcttacttgacctgatggagaaaagtttcaacttatgagacaatactgtgctagctagttttactgatttgtactctaaagtacccaagcctaaaatagtagagctgtctatcccacatgaaacttctctgattttcactgttttttataaaaagtatacatgttcacatttctgtaggtttttttaagcatcacaatttttataaactttctatatttccaaggtctacctgctttgtattttgcctagtgagagttttgtattcatgtaggaataatctcttggtgtgagtatctattttccactcatccaaaacagatagagcattgatttcactaagcgttatgttctagtttgctttggtattattattagaaatacctggtgattaatttgagctaagtattcttctctaccctcattcccagcattatcacccgcttttaccacttccaaggggtggaagcattctccacaatgcattttttcatgccagagaaaaatctagaaaaaaatgaataaaacgaagaaattctttccccttggtatctgtagctaacttgcctaagtgttctttcccacagtttaagtcttcagtccatagttcataagcaaaggggtgtagcgagctctgatcttgccagaagagagaataagtgagctaccccacggtggacattctggccatctgaaatgagtcgatgcatgtggcttttgtctaaaggctacaaataaaatgtaaccactttcttctttgagtagttgatatagcaaatagttgaaacagaagttttgattggcaaatcaggatgtggtagatactttaacaaagagtagaactattaccagttttatgtgttgctgtttgtatctctttcacagttttgataatatcacatcctggaaagtgaaacagaaaattattattccattttaaatgactaaatttgctttcatggtatttacagtgaaagagtaaattagaaagtgaatggatgactgttcatgagaaaaagcagggtaaaaagattttatttaattaattgaaaatattagggtcaaaacataggcttatgttatgttttgtgaattgtgctgtgttgtagacatttgatgagtcctaacatagaattgatctagctcttgaaataccatttttgattgagtataaatgggatataggcaccttacaacttcagaattcgaggaagatgatgtgaatcttccaattttatctatttgattcaaatggtatgttttttcacatttctcataatttccacgtcaactcccatgatgatcatgcaggaaagcagcatgattgcacttcttgtagtgcataccatcactaaaacatagttactgtctttctgtggtcttaagaaaaattcagaaacagcataccaatgtacatataagataaataagcttatgtggtacagtaagtgttctgttctgagaaataccttgattcgtatcctaatgtctgatgttattggtagttctcaaacttccccaattctgctttcatctaaattcatcttatctatctattgttaaataatctatcagtccatttttatctatcatctatatatctgtctttatcaatcattcgtctgtaatctatctgtgccgtttggcataagagacagaagggcatagcagtggaaactcaaaggagttacctccatgtgaatggacagtggtgatggtgatctgtgaggtggtgatgtatagaaagaaaaactagaagagagcatgccctaactcagggaccttgtccagcaggcactctggccttgttatactgtgcttgaatatgatagatatgatgactctgccatttcagtcttttgtatttccacatttagagctcagttttaattatgtagaattatttctccagcctgtgttaaactagaccatggattggcaaactttttttgtaaattgccaaatacacattttcagttctgaaagccttgtggtctttgttgcagctaatctactctgctgttgtgttatgaaagcagccataggtaatttataattgaatgagtgcgctgtgcctttcttccaataaaactttacaaaagcatcctgtgggctggagtttaccctttgggaaaccagagcattggctaaactggaacctgaaaaaataatcacatcaactcagccacatggtaataatatttagagtattatttcaacattttcattttcataaaaatttttttagctcttttgccaaattccatctgtgagtgatacaaatgactaccacgtgccattaacatcacctaaacagtgcaaaacaagcatagtagaagtaattggaatgatataaaccccttgctgtaatagttatagttgataaattatgtttcaaaattgaacctatttcttccaaatttcatctataaagttccaaggagttccaaaatcttgcctgccttcttttcccagttagcagtattgtctctgagcagccatggtggtatccatcctccttggacaatgaatttagcctattttgacttcatttgagcagttgtaattgtttcaccacatcagagtaagattactacatgccagagctattctttaactcagcttgtaaaaacatgatagcatcaacaatatacatagcaaatgaatgccatctttaatccaattaaatggtttttacaaatttgctcttgtttgttgatgctatctgcattgcagtaattaaaggtgaggtaaaaagaatgaataaactgccaagttaaaattaaatttgggcaatttctcttttgcagtaatgtatgtatatttactcaaaacatatgccaaatttagtgttgaaaggctcattcaaatcaattgggaaagcacgtaaatgaacaattcataaaagaaaagcattgcaaatggccaagagcatagaaaatgtgctcaatcttaccagtcattataaggaaataatgaaatttgtgtatatatgaaatacttaaaatatatataaaataaaacaattatttgccttttttcacctatcagattaacagattatatgtgttaacaaggtggggagaatttacaactcctgatatgttaaaatctttcaggaaggtagtagaaaatatatgtaagatggaaattagcacttttgaccaacaattttagttttagatatttacctataaggatataataggaggtgttcaaagatgcatgtaactcaatgtagtattaattataattgtaaaatagtaaataacatttttgtcaaatcataatgttaggaaaattagtgatggcacatttaaccaattgaattatattcagttctgaataccgtgatgcatgttcaaattaattgatacaaaaatccaacaactttagcagtttgtttaccagttattgagtaccaactgtgttcaacattgttatttcactcatatgaaatgataaatgtatgtgcttgttatgatacggtcaataaaaccacttttataggaagaatactcacaaaaaaaaaaa

SEQ ID NO: 404211 - DNA, 3985 bp, Homo sapiens
tcagttcttttcttttcatattggttgggttactttgagtctggcctacatgatgggcagtttagaggtcaaccaaaggatttcagcagaacttatacacagaatttcattcaggcttcccgtgtctggttggctacagtgtgggaatttcctcccacttttcagccactactgaggatgcctttcggcaaaattccttgaaattggaaacttacagggaaattcctttcctccaagagtgcgctctcctccagtgttggcttgcttttggttgttctccgtggttttagatagctgtctttatattaattctggagtttacagttgatatctgttgggggcttagtttgataacatgtattcttctattactagtagccagacctgtatgtcttacttgacctgatggagaaaagtttcaacttatgagacaatactgtgctagctagttttactgatttgtactctaaagtacccaagcctaaaatagtagagctgtctatcccacatgaaacttctctgattttcactgttttttataaaaagtatacatgttcacatttctgtaggtttttttaagcatcacaatttttataaactttctatatttccaaggtctacctgctttgtattttgcctagtgagagttttgtattcatgtaggaataatctcttggtgtgagtatctattttccactcatccaaaacagatagagcattgatttcactaagcgttatgttctagtttgctttggtattattattagaaatacctggtgattaatttgagctaagtattcttctctaccctcattcccagcattatcacccgcttttaccacttccaaggggtggaagcattctccacaatgcattttttcatgccagagaaaaatctagaaaaaaatgaataaaacgaagaaattctttccccttggtatctgtagctaacttgcctaagtgttctttcccacagtttaagtcttcagtccatagttcataagcaaaggggtgtagcgagctctgatcttgccagaagagagaataagtgagctaccccacggtggacattctggccatctgaaatgagtcgatgcatgtggcttttgtctaaaggctacaaataaaatgtaaccactttcttctttgagtagttgatatagcaaatagttgaaacagaagttttgattggcaaatcaggatgtggtagatactttaacaaagagtagaactattaccagttttatgtgttgctgtttgtatctctttcacagttttgataatatcacatcctggaaagtgaaacagaaaattattattccattttaaatgactaaatttgctttcatggtatttacagtgaaagagtaaattagaaagtgaatggatgactgttcatgagaaaaagcagggtaaaaagattttatttaattaattgaaaatattagggtcaaaacataggcttatgttatgttttgtgaattgtgctgtgttgtagacatttgatgagtcctaacatagaattgatctagctcttgaaataccatttttgattgagtataaatgggatataggcaccttacaacttcagaattcgaggaagatgatgtgaatcttccaattttatctatttgattcaaatggtatgttttttcacatttctcataatttccacgtcaactcccatgatgatcatgcaggaaagcagcatgattgcacttcttgtagtgcataccatcactaaaacatagttactgtctttctgtggtcttaagaaaaattcagaaacagcataccaatgtacatataagataaataagcttatgtggtacagtaagtgttctgttctgagaaataccttgattcgtatcctaatgtctgatgttattggtagttctcaaacttccccaattctgctttcatctaaattcatcttatctatctattgttaaataatctatcagtccatttttatctatcatctatatatctgtctttatcaatcattcgtctgtaatctatctgtgccgtttggcataagagacagaagggcatagcagtggaaactcaaaggagttacctccatgtgaatggacagtggtgatggtgatctgtgaggtggtgatgtatagaaagaaaaactagaagagagcatgccctaactcagggaccttgtccagcaggcactctggccttgttatactgtgcttgaatatgaaaaaaaaaaaaatcaaaatagtgctgacattctttgtcttctgggtctgagaaaacttagagtagatatgatgactctgccatttcagtcttttgtatttccacatttagagctcagttttaattatgtagaattatttctccagcctgtgttaaactagaccatggattggcaaactttttttgtaaattgccaaatacacattttcagttctgaaagccttgtggtctttgttgcagctaatctactctgctgttgtgttatgaaagcagccataggtaatttataattgaatgagtgcgctgtgcctttcttccaataaaactttacaaaagcatcctgtgggctggagtttaccctttgggaaaccagagcattggctaaactggaacctgaaaaaataatcacatcaactcagccacatggtaataatatttagagtattatttcaacattttcattttcataaaaatttttttagctcttttgccaaattccatctgtgagtgatacaaatgactaccacgtgccattaacatcacctaaacagtgcaaaacaagcatagtagaagtaattggaatgatataaaccccttgctgtaatagttatagttgataaattatgtttcaaaattgaacctatttcttccaaatttcatctataaagttccaaggagttccaaaatcttgcctgccttcttttcccagttagcagtattgtctctgagcagccatggtggtatccatcctccttggacaatgaatttagcctattttgacttcatttgagcagttgtaattgtttcaccacatcagagtaagattactacatgccagagctattctttaactcagcttgtaaaaacatgatagcatcaacaatatacatagcaaatgaatgccatctttaatccaattaaatggtttttacaaatttgctcttgtttgttgatgctatctgcattgcagtaattaaaggtgaggtaaaaagaatgaataaactgccaagttaaaattaaatttgggcaatttctcttttgcagtaatgtatgtatatttactcaaaacatatgccaaatttagtgttgaaaggctcattcaaatcaattgggaaagcacgtaaatgaacaattcataaaagaaaagcattgcaaatggccaagagcatagaaaatgtgctcaatcttaccagtcattataaggaaataatgaaatttgtgtatatatgaaatacttaaaatatatataaaataaaacaattatttgccttttttcacctatcagattaacagattatatgtgttaacaaggtggggagaatttacaactcctgatatgttaaaatctttcaggaaggtagtagaaaatatatgtaagatggaaattagcacttttgaccaacaattttagttttagatatttacctataaggatataataggaggtgttcaaagatgcatgtaactcaatgtagtattaattataattgtaaaatagtaaataacatttttgtcaaatcataatgttaggaaaattagtgatggcacatttaaccaattgaattatattcagttctgaataccgtgatgcatgttcaaattaattgatacaaaaatccaacaactttagcagtttgtttaccagttattgagtaccaactgtgttcaacattgttatttcactcatatgaaatgataaatgtatgtgcttgttatgatacggtcaataaaaccacttttataggaagaatactcacaaaaaaaaaaa

SEQ ID NO: 404212 - DNA, 833 bp, Homo sapiens
atgtgggtgaaacatttagtaaagtatttgccaaccagtaaatgacatttttagcaaatcacttgactctgtgcctctataagctggcacatagtaagtgttcagtaaagttaacttctctgttattattgttgctattatgttcctaggttgtgtacacagattctttgaccctgtcttagctcttttttttttttttttgtagagcaagggaggtggagagggcaaaattaaggcacatgaaacatagagaaataaaacaatcatttctgtggtattgagagcggtttgtcatgtagcgatagagtgaaccacagtagctgatgaagacctgaacggagttgagaccaaaactggttttcaagaatgggttatttggatagatagagaggaaggacatgttaggaaataagaatagtatgagcaaatttctaaaaaagaagataaggatagtgtagtagaaactataacaagcaaccttgttgttgatcttgaaagtgaagtgtgggtggtaaatccctccatcattgttccccttaacccaagattagcagaaagtacataatatattctttttttttttgagacggagtctcactctgtcacccaggctggagtgcagtggcatgatcggtggagagcagtggcacgatctcggctcactgcaacctctgcatcccaggttcaagcaattcttctgccccagcctccttagtagctgatattataagcgcacgccactacacccgactaatttttgtatttttagtagagacggggtttcaccatgttggtcaggctggcctcgaactcctgaccttgtgatccgcccc

SEQ ID NO: 404213 - DNA, 556 bp, Homo sapiens
atgtgggtgaaacatttagtaaagtatttgccaaccagtaaatgacatttttagcaaatcacttgactctgtgcctctataagctggcacatagtaagtgttcagtaaagttaacttctctgttattattgttgctattatgttcctaggttgtgtacacagattctttgaccctgtcttagctcttttttttttttttttgtagagcaagggaggtggagagggcaaaattaaggcacatgaaacatagagaaataaaacaatcatttctgtggtattgagagcggtttgtcatgtagcgatagagtgaaccacagtagctgatgaagacctgaacggagttgagaccaaaactggttttcaagaatgggttatttggatagatagagaggaaggacatgttaggaaataagaatagtatgagcaaatttctaaaaaagaagataaggatagtgtagtagaaactataacaagcaaccttgttgttgatcttgaaagtgaaccccagtagctgatgaagacctgaacggagttgagaccaaaactggttttcaag

SEQ ID NO: 404214 - DNA, 381 bp, Homo sapiens
caaacaaaacaaaaaaaaaaacccagagcaaagaatcagtggatcagaaggaagtgaaggtcagtgagaagcatgacaggggagagttcagaaggagattcaacagatgtgttcacagatacagtcttcctacattctcatttcagtaagtctaggtatgcattcactcatccattccagtcattcaacaaatattagtgaattcctattgtgtgctactaggcccataaacacctacctttgtagcacttacattctaataagaccgttctccctcatagccattgcttccagtaataagtttacagaaactagggactaagatggattgaggtagttaggaaggtccacacagaaagataagtatagaaggggtacttt

SEQ ID NO: 404215 - DNA, 506 bp, Homo sapiens
ttgtgacagataccgtagtagaattcaagttgtctggctcctaggccggattcattcactgtgctaggtgttgggtcttttattttgttattcttcttttgatcggatttctctcatgccatgtgttgataaagccggaagtctgagatggtctgttttcaagaaactaagttctaaatgtagagctgcttgttgttgttgtcggtggtggtgtatgcattcaatttgaaggaaaatttaccaggtcaataatacacacgtttccacacatttttaaagcaatcagtgagctggccttttaaaatttcatctgcgttaaaacatccctctgccgaggcaaggaagtggacattgaggtattaagcctgtccttcagccaagcactgagggcccaagtgttagaattaaaggaaaaaaaatttcccattgtattaatatatttacaaaagaaaagtcataaataaaagcagtggccatgcctccattccatctgtgttcactcgcct

SEQ ID NO: 404216 - DNA, 425 bp, Homo sapiens
taatttttctgttgccttctatgtgacaaacatggttatacttgttaggtactagtaaattattagtaaaacaggtcatgatctcttccttcatgtgtcttacagtcaaattatatttctatgtatgcaaagtttgtatgttcaggaaagcataaagagtctatataattttattaagcagtatcataaaaagcatgagctctcaaatctgagttcaaatcccagctattcccctatgaaagctacttagcctctttccatttcagtttcctcatgtataaaattatacatacccctacaagattgccatcaacacaaattagataatgcctataaaatgtttggcacataaatgctctgtaaacattagttgttggtacttttaaatgtgttgttcacaaatcttctcaatgttgtatattgtt

SEQ ID NO: 404217 - DNA, 359 bp, Homo sapiens
ttttaaacctggaatgaattggctatatttgtgtaaattcagttgtcttccaaacaggaggaaaagtagagccctataaaccctttctaagaacttaaacaatagacacaaggaaatttccatcccctctgagactggcaccattgctgctgctgagataatactgaaagggaaacgaactttgtgcattgtggtttctgggagaccttgggatagtcactatttcttcactatttctgtgttcagttttcttttctccttgattaagacctaagtgattcattcattcagtcacaccgcctctgctgatgtgactttcttattacactgagcataaaaagtgtacaattcattacaaa

SEQ ID NO: 404218 - DNA, 1087 bp, Homo sapiens
ggtattaggttattccatgggctaatctcatttcctaccagaagaacttgctgtttagtggcttttccagttacggatctagttacagttagaggcaggattagaacccaggcctaaatctcatggtgctttagtcaaaagaaatttgctgtggtagaagtaatcctgattttgaagcccttcttaattgggtcttttattctctgctaatgagtacttggtattagaaattttagcaaagcagaaagaaatactggcctcactcagtaatgcactaacgtgtatatagataggaaagttttagatactctgaggtagtttagttctgcttaatggtcatcatatcctaaggtttttcaaataaatataaatggtaatgtaaaataaaaatcgaaaatgtttgctctatttcctggattatagctaaattaacctctctctctctctctctctctctctctctctatatatatatatatacacacacacatatatatatgtatatatatatatgtgtatatatgtatatatttaaaactttctgtatggaaaatttcaaacatgtcataagtataatgaactgtcatgtttgcatcacctagcttcaacagttaacaactcacagccagccttgttttatctacatacccacatacacttccttccccatatgttttgaagcaaaccccaggcataacaaccaaaaacatattctttgtatatctaaaaataaggacttctataaaatataagtaccgtaatattggtcacacaaatattaataatccatagttttacatatcagtcagtatatcagatttggccaattgtgacactattactatttttaaagtttgcatataatgcagggtacaaataacgtccttatgggaattgatcgatactgtataaaatctcttctaagctataagccctgtggtttacctatgcctgttttacaagtcacatttaaaattaaattttaatcctgctgagaacatagtgttcaaaatagctataaagggccaagccaggcctttctcagtcttgtaatctgtaggatgtaagtaggtcgtaccaagagcaa

SEQ ID NO: 404219 - DNA, 415 bp, Homo sapiens
ctggagaaatggaggtgaggacaggagagttcctcatctcctgttccagctcagaccttgtcctatctctatgccttcagctctttaagcaggacttagcttttcgaacttgattttgatctggctttggaaatgcagctgccttctgctgaaatggtcccactctccatctggtgaattaacttgcttttcatctcctcctccctcccttggcctgtgggtcaccgggctactcgatagcaccttggccagagaatcaatggataaggaagggaaaagaaggaaaacttagctcaactcttgttacctgaggcagcgactgaaaccaatgcccacaaagggggttttgtatttcccatgaatttaaaatgtttctgtcactcatgctaccaaatgtcctgagttggtgatccaa

SEQ ID NO: 404220 - DNA, 166 bp, Homo sapiens
caaggaagtattaattttataacccttattccttttaccaggcattaggtgaacatatgacatttagagtaaggtgttagaatagtcgtgtgaccaccttcccatatgatgatcattttcaaatgctattggctctgggagaagctgttatttcactagacgtttc

SEQ ID NO: 404221 - DNA, 163 bp, Homo sapiens
ctttctcaccaatttggggatcgttaaaagccctaacaacaaccttagccattgtgttattagaaatgatttttttaaacatgaagattaaattcttactgttttttaaattcccctgcatcttctcagagtaaaaattcttatttcttaattgtttcaggct

SEQ ID NO: 404222 - DNA, 453 bp, Homo sapiens
ttgatttctggcttaactctgtatcagaatttcttgctcggatcatttggtattgttaatattcgtctatgaaataagatgtttcaaagaattcaacatgctaaggcaatacttaggaaacactgtgcttcaaggtctgcctgtctcctctgctgaacattttaaataatgggatagggattacaggtgtgagtcaccacgcctggccaggccaccattttcttagagagttgcatactgtgcagtgtctgaaagcagtcatttgatatattttgttcaattttctgtatttttgccctggtaggaagtcagatctattatcgtttgctccattatggctgtaagcaaaagtcttctttttgtatttcatcagttctgtaatatttaattaattttagtattatatcattgcagcaatggcttcaactaccagaaatacttatattatttttt

SEQ ID NO: 404223 - DNA, 1241 bp, Homo sapiens
ctctcgtgatccgcccgcctcagcctcccaaagtgctgggattacaggcatgaaccaccgtgcccggcaattctagactattaaaagagatggtttaagagcatttagagaagaatgtaaccatagataccaacatgaattctcagtcaaatcctgactgactttatttcctccttgccaggttatctccaaagaggtagatttgggaaattttagacattgtatgtcttgtatgtatttactccagctgaagaccaccaagaatacacctggtaattgagcaagttgggtttaatgctcattgcagtgagggggagggctcaccattggggataacgtggtgtgtctcagcatgagggtgttaggaacgacttagagaacttagactttggttaagtgattttggggaagattcaagaaagtgggtgttcttttggattgggtgctgttaagggaatccaggataattgggtagcttgtctagaagaagggcagacaagtgaacctaagcacagtcgatgatgaagtcactcactagctgggaaaggggatgtttgctgttttgtggtttgcacactgaccttgttttgtgcttaaacaaaattgtgtagtgattttgttttttgtctcacttcatcgcagtcactgagtgaccttgtctgatgctggtgttttgtgagattgtttgtgtccaagagaactcattggctacctgtgagcaccaggtcagccctaacagctctgaagcctggctgtgtcaggccagttcccagattacaggagctactttcctctctctcacctgctaagtcatcacagataagaggaaaattacgggtcagttaatcgtagcattttttccatgcaaatggctctggttaaaaaataatgagaaaaaaatagtagcatttggtagaatcaaactgaacacttgtacttagtgttggttagcgcatttatgttagagaaatctctgttctctagtgataagcccaagggctatgttttattgtaaaaagaaaaaacccaactcgggtaaacatgtaaaaaacccatttatcaacagtaacacaggaagagctaaataatattcaaagtgtctgtaacttgaattgactaaaacactggagcactctcacactaaaaaattgcttagatcttgaactagtttgaggaacaatgttagagatttatattagcaataattcacatgagaacaaactgggacttccagttggctg

SEQ ID NO: 404224 - DNA, 662 bp, Homo sapiens
tatcctataggcctagcacaagtacacaataaaagttatcagttaattgctaaatgctacacatttcttgccagagaaaacaaagcaaattttgataacattaagccttctataactttgtgtatagaattttttttttctaagacagagtcttgctctgtcaccaggctggaatgcagtggcacgatctcggctcactgcaacctctgccccctgggttcaagcgattctcctgcctcagcctcccaagtagctgggactacgggcgcgtgccaccccaaccagctaatttttgtatttttagtagaaacggggtttcaccatgttggccaggatggtctcaatctcttgaccttgtgatccgcctgccttggcctcccaaagtgctgggattacaggcgtgagccaccgcgcccagcctagaatttttatgggaaataaagttcagttacactcttcacaaaaatgttttccattattgccaaactgtggaaaatttttttcaactaaaataggtttgattttttgcctttggttggttgtttttaaaattttcccccattttcaacaggaataaaattaagaatttttaagtaccaagtccaggaaaaaaaaaataactgtttgaaattaagggaaagctttcctaattgactattctg

SEQ ID NO: 404225 - DNA, 447 bp, Homo sapiens
caggatttgaatcatcacaagagattcaccagaggattttatacacttgggctgtggcagcagactaattacatcacagcactagagtcttcaccagctccggaaaagaatatttttaatcactgcagtcgcttaggataacagggttatctttggaaattcctgccctctcgtgtccagtatagagaactacttttgtgttctctaaggctgtgaatgttagcggacaaccaggagcattttagggcctcagcagaaaggagactgaaccagttccatgaaaacattctcctatctaataaatcaaaaaatcatgactggcttccatcagttcaggagtctccacacaaatgttttgacagtggaacaagagacagtcaaggacagttttatcagtgacatctaccttccaatagcaaaaaccatcaaccgcacggtaattttctg

SEQ ID NO: 404226 - DNA, 499 bp, Homo sapiens
acagctggaagcaggggctttggcttgcgccgtcctttcctgtaatctctcccgctctgggtaaggagctgccccccacctccacaacaagcaaagggagcacgtccatcggcagcgcggggactcggaggaaagcctgcgatgctgctgggggtgaggggaggtgaggggaggactgagcgaggggaaggacaggccccttcctggacagaaggacccgttgagatcacgtctgtgcatccagtccctataaaacacgagagctgttgtgcatagacacatggactctacagttcaagtgggaaatagtctcagaatggccagaaaggctcttgaaaggcaggtcgctaggacaagggagcgtcagccttgccagccactgggatgtacctgagtgtcactgagagtgaccttaatgaggagaatttggcatcgacagtgccagatcagacagaagctccatctgtgatggagacagcatccagatcatcggggagaa

SEQ ID NO: 404227 - DNA, 584 bp, Homo sapiens
ttgcctcttgctgatgagggatacttctgtctccctaactcagaatccagaggcatacttttcaattccccctcatttcctctctcctccaatgtctcctggagcctgtccttcctcttggtccctgatttcatgtgtgatcttgggtgagtcaatttacatctctgggtttcatgttcctcatccatacaagggtgggaatggccaccccattccatccatctggtatgctctaaatgtccataatatgttcccattcacaaaattctcccccaaatttgtgtccctccccaacccccaaatttatacgttgaaacctaatccccaatgtgacggtattaggaagtggggatttggggaggtcattaggtcttgagagcggagcccacatgaatagtattagtgcatttataagggactgaaggggccatagttctccccttctgccatgtaaatacacagagacatggcaccatccgtgaaccagaaagctgttcctcaccagacactgaatctactagtgtcttgatcttggacttcctggcccccagaactgtgagaaatagatttccgttgttaataag

SEQ ID NO: 404228 - DNA, 414 bp, Homo sapiens
ataaacatacttacttcaactttacattactcctaggatgtacgagaaattagtatgattaacagccaagaagcctgagagaattctgaaaactagaagcaaagatgaaaaggaagcacaacaggtacagaagagaatgaagacattctctgcttcaaaacttgtcagttttgcctacttgtgagtgccactaaaggcctatgaaacccttccactgtgtgacactaatgttgtatgggggccttatatccaaagttcaacaactgacagtgattgctctggaccaggatctacatcaccccacctcatgcatgccaaaagtattctcacagactcacacaactaagaatgaaggtagagtggtggactgggaagaacatcaaattcatagtcttacaatgatttattagaagt

SEQ ID NO: 404229 - DNA, 158 bp, Homo sapiens
actactgcgacataccaacgtgtatggaacagtacacccaagccaggctcattgtttaccactttcaggaaactatttgcaaacctgagatgggattagaacactcattatagctaacatttatttttttcattattaaactttattggatatcaaca

SEQ ID NO: 404230 - DNA, 441 bp, Homo sapiens
ggatgttctcaaaacttcgtgttaaaatttgatctccagtgttggaggtggagcctagtcaggggggtctttggggcagatccctcttgaatggcttagtgccatccttgagctaatgagtaagttcttgccctattagttcccatgaaagctgtttgttaagagcctgacacccctcgctcttactctctcactctctctcctctctcttgtttttcctctgaccacgtgaccttgcacacatctcctccccttccacttccaccatgagtggaagcagtctgaggccctcaccagaagcagatgtcggtgctatgcttcttgtacagcctgcagaaccatgaacaaataaaccactattttttaataaattacccaccctcaggtattcctttatagcaacacaaatagactaagacagatgcatttaagactctgcta

SEQ ID NO: 404231 - DNA, 815 bp, Homo sapiens
taaaatgtacttcatgtcaggaaggacacatttctaagtatggaaaatgaaatcattatttacagtaactacaatattctaagggattataattcaatgtgtcaggaaataaactggaaactcaaagactctcaacccttctgctcttagatttgccattataaataaaaagcaaaatgtgtgtgcatgtgtatgtgtgtatgtgtataacatccaagtattctttaaaaataaagcaacaaaattaatgagggaatagagataaggccacgtagcatgagtctaggtcaacaggaaggcattgttcttcccctctgaatggcaatcagatccgaggtccccagctaggttaccaaacatggtcttcctagctcattcacttaccttaaccaacaaaccaaagccttaccaatatgccggtgtttgagccgttcatagatcctcacatggtggcccttgacttctttcacagtgaggacctctgcttcatgaggctcataagaagaggagctaaggactattttgtcatgggggcgccaatccactgcatcttctactataattctgtaacagcataacaatggcattggatatactaacagtgcagcacaaatcatctattaactccagagcaagaaaaggaaatccactgtgaccaacatatcccaccagagaaactgaaatagaaataagacatggcagtggaaaaaggctttcgcaaacagtttaatttagctaatggagtcagttttctggcttgaaaatgtatatgttacagagacagtgaagatattcgatgacccctgaaatacagc

SEQ ID NO: 404232 - DNA, 1710 bp, Homo sapiens
catcttgtctgctccttactgtacatgtggctggcagagaagggaaggtggagccgctattttgaacatgattggcacaactgccagcatctatatctgcagcttgattttacaggctgctctttgttagaaaggaacatgatttggggctacttttcattaaaaggaaaactgtaccgaagacttccataccctcactatctgttttattttctaggtttgggacctctgcgtacctcctgtggctttatggtacctggtattgtttccccagaccatgagtctccagtgttggagtgcccacttcagaagtctgtgtgttttgcttcatcctgaggatcccatcttggataccacattaccttaaacactgcctcagccaggtgatcaaggtcaacgtctactgtgataagtcatggttttggtgtgtacccttgatgtgatgtgataaaaatggcactttacctctgtggtcttcctctgaaaaatcccgtaacagcagcctaatcatgagaagcatatcaacaaaactcagactcagggacattctacaaaataccaggctgtccctccctgaaattgtcaagttcaccaaaaacaaggtgaatctaagaaacctgttacagccaagaggagcctaagaagacatgaggactaaatataacatggaattcgggataggattgtgctacagaaaatgtatgtgctaatgtgagatgttaacagttggagaaactcagttttgggtataaggaattctctgtactatgtttatctaaaaacaattccatggtgagcaaacttaagcatagaaatgttaaataaattgtccaaaatagagaagtaaatagcagtgccaggtttcaagcataagaatcatcaactctgaactttaaacacagctctgtatggtacttttgtttatatcaatgcctagatagataaataggtagatagataatttccaagtgctagaaacaaaaaaggaactaaaactgataaagaatataaatgaggccaggcagggtggctcacacctgtaatcccagcattttgggaggccgaggcaggcagatcactgaaggttcggagttcaagaccagcctggccaactggggaaaccctgtctctactaaaaaaaaaaaaaaatagccaggcatggtggcatgtgcctgtgaagcaagagatgtgagaggaaaaacaaatttttcctctttcttttggtatgggcagcttcccccttgaatccctcctcactccttgtgattttaccctgctctgtaagttttatgagtttatagattcctgttttctgtaactagtgtctgtaagtctctgtagcaccgtggaggtaatgagacatgcttgagcaagcttagattgcagccatctgggcgccatagcgaaggacacgagataaggctgtgcaggcatcttgagcaaacctagataacagccacctggcctgcacagcaagaatcatgtgtaagcttgagttaggaacctgtcacagtttgattaactgcctttgttctgcttctgtaagcttgctttccacaccccacaagctttgcgccactggcaagccaccctccttcagttgcatgaataaaagtcaagccctgtcttcttttgttgctcagcctctggatattaatccactaagccagtggcaacctaaataaaatcctcctgttccacacaaaaggt

SEQ ID NO: 404233 - DNA, 416 bp, Homo sapiens
gacttgagttcatgtgtcattcaccaaagtaaggtcctgctttataataataaaagatgcctagcacaacagttcactcaacagagctctgtgcttattgatctgctgagttgaactgaatctgcaaatccatagaattacatgagacattttaagttacattaaatttctgctgtgtgcttttaaatcatggagtgcgagacccatcagcacttagggtatatttattaccttaacaaatgtcagatgattgtgtccagtgctatctattatttatgaataacaagaggctgtaagactggaaatgacatgctttaatacgtccaaaaggttaggcataatgcagtttgctgccctataaatttctcgacaccattttcctttctaataaagcattgtcagtggttgactatacc

SEQ ID NO: 404234 - DNA, 321 bp, Homo sapiens
atttatttatgtaaaaaatatttaacaacaaacacatagtaccagacacccttctagacactgaggatgaaataatgagtaaagtaaggaaaacaaggtgccttccctccttaccttctagtggaggagacaggcaataatctaataagcgaacatatctacttggttttattaactggaccgcagttcataacagcaaaacagtggatgaggtgggaacaccaatcaaagagattggaaggaatgtgggtggcagaatactacacagatgatccgtgattctttagacggatttctttgggggagacaaaaaaattctag

SEQ ID NO: 404235 - DNA, 350 bp, Homo sapiens
agaatatgttttcctgtattagtccagacctcttgagactgtagtttacgactccccaggaagatctcggcccctctaaaaagccagaagatcaaacaccacttagaggttacggttcattctggctgagtatggtggctcacacttgtaatcccaacactttgggaggcctgagtgatcacctgaggtcaggagttcgagatcagcctggccagcatggtgaaaccctgcctctactaaaaatgcaaaaattatctgggcatggtggtgctcacctgtaaccccagctattcgggagtctgaggcaggagaatcacctggatgacagagcaaaaactctgcctcaaaaa

SEQ ID NO: 404236 - DNA, 528 bp, Homo sapiens
tcaccacacactgtctcacccagatcaacttctagacttgcaagtttcattcatggtaagttccctatacagctgtagcatttaaaaaatgtttatgccatatttgcacagaaccttttctatatttagatatgtttagacatacaaatccttaacattgtgttacagttgcttgcaaaattcagtacagcaacaagctgtacaggtttgtagcctaggagcaataggctataccatataccctaggtgtttagtaagctgtaccctctaagtttgtgtaagtacactctatgctgtttgcacaacaacaaaatcaccttatgacacatttctcagaatgtatccccattgttaagcaacacatgactgtaactgaactgcctgatagaacaaaagtcaacactgacagtcttcagaggaagataacagaattcaaagtccctaataatgtatcatccacaatgtccaacatgtaatgaaacgttacaagacatgcaaagaaacaggaaaacgttacccatatcaaga

SEQ ID NO: 404237 - DNA, 1596 bp, Homo sapiens
tgcagttcttaaaacaaaacggccaggtgcggtgtgtgacgcctgtaatcccagcactttgggaggcaaggcgggtgaatcacaaggtcaggagttcaagaccagcctggccaagatggtgaacgcagtctctactaaaaatacaaaaattagccaggcacagtggcgggcacctgtagttccagctactcgggaggccgaggcaggagactcgcttgaacccgggaggcggaggttgcagtaagccgaggagggccactgcactcctgcctgcgacagagcaagactccatcaaaaaaaaatgtaatttaaaagattaaaagttaagatagatttttacaaatgtatatatctaccattatagtatcatacagaatggttttactgccgtgaagattctctgtgctctgtgtatccatctcttccttccccttggtccatggcaaccactgatctttctactgatcccatagtttcaccgtttccagaacgtcatataattggaatcgaacagtacgtagacttttcggattggcttcttcttttagcaatatgcatttaagtttcctccatgtatttttttgtggcttgatagttcatctcctgttagcagtgaataatatcccgttgccattatacttttgtcaagactcagaacgtacaacgtgaagagtaaacgtgaatgtgcactgtaagctttgagtgataatgaaggatcaaggtaggttcctggttgtcacaggtgtgctcctgtgaggcaggaagctgtagtggggaggctgtgtgtggggaaagggacatatgagaagtctgtactctctgctccgtttagctgtgaacctgcacttctctaaaaaataaaattagttaaaattaaaagcaaaaaattagaaaaattaaaacattacaatgtgtcatatagttttcaaatcacaagacagaaaaagacataatagaagaaactatagaaaacaacaaggataggaataaaacctcagtgatagaagacagaagacagaagacagaaacgtggagcccaacacattaatttattttaatcattagttatactcatttatactaatttatattgatttaacatattaattctgactaaatggcattaaaggaggtctgaggaatttgcatgtcacattctggatgacaggactcaataatattaactctttagtttgctgtaaatcatttaaaaatatgctcaaattccaataaaaattccaagaaaaatattttcgaacaagaacatgtgattttaaatccatatattgaacacacacatacaatgagagccattattataaaatttactataagatatttaagattattatcactatccaaaattaaacaaatttgaaatggcacaaaaataaacacattaatgaaagagaattaaaaacacagaaattgagtgtaattttatctagtaacagggtaacattttaaacccacaaaacagagcgattgttccatttgtggtattaaaatattgggtaatgatttcagaatataaaatgacagaattgaatcatggtcctacaccttacataaaagttaattccagtattaaatgta

SEQ ID NO: 404238 - DNA, 452 bp, Homo sapiens
gaatcacttgaacccaggaggcagaggttgcagtgagccagttgtgccactgcattccatcctgggtgacagagcaaaactccgtctcaaaaaaacaaaaacaaaaacaaaaaacagtagaaccaatacctggttctttgaaaagataataaatttgataaacctctaacaagaccgacagtgagaaaataccaaagacacaaattaccagtcaggaatgaaagaggccaatctctatagactgcacagacattaaagcatgataagggagtactatgaacaactgtatccatatctggtcatatgcccagtagatgtttcgggcaacgattgaccacatatataacagtggctccatgagatcatgataaagctaaaaattcttaccacctagtgaccttgtagccattgtaacacaacacattactcacgtgtttgtggtgatgctggtg

SEQ ID NO: 404239 - DNA, 435 bp, Homo sapiens
ctgatagagcaatcatatgggattttaaaaatatagttccaagtacattactaatggacaaaaggaaagctgaaatccataaaatggggtaaaaaaaactcctcctcccttttttgaatttttaaattttttatttatcttgaaattctggtttaatttgcaacagatctagaaattcaagtcaatttaacaaacatttgttgaattcagtaaggcttcacagcctgaaatatcaatcaaaattacttttttttaccttatattcctttaatattttgttttagtcctacaatccccttgtaacatgatatgctatatttgagttattgtcagtaataataactgacattttaaaccataattgtctttgccaaatactatgcatgctaatcaccttacatactttgactaatcttttataaaaacatgaaaccc

SEQ ID NO: 404240 - DNA, 512 bp, Homo sapiens
cagagactttgcaatgtgcaaggcgcaccaataaaggaatcccactacaccatttccctaccaagagatacctggcagctggcctggggaaaacccttctgctttcctcaggcaggaccagcagagacaagtgggaattccagcagcaccacacaatccaagcagaccataatccaatagcactccaaaggctgtgaaaattaagctgccattggaatcacagcccacaaaagtaggacaagatctacatgctaaacctaaactgtgtgactttctgctaaaataaaaaatgtaaagggaactcatcatcttattacataatatataagatatccaggatacaactgaaaattacctgttatacctaaaacccagaaaatcacaactacaatgagaaaaaaaaaattgacaccagcaccaaagtgattcatatgttgggatcatacaagaagaattgtaaaacagttgtcataaaaatacttcaatgatcaacacaaatcctctttaaaatg

SEQ ID NO: 404241 - DNA, 495 bp, Homo sapiens
tctggaatgctggaaggagccaagagcagatgccatcttggtgatgtgtttcatcttcaggacctgagacccatctggtcaaatatttgtgtgtatatgcaaaattttaggtcatttgttaaaaggagctcatgaatacatgtccttgacttcccagagatggaaaaaacacttctctccgccaaagaacttccaaatagtgcttctagcctatgctcctcatcagtgtccatgtctctcagatgtctctagttttggttgaggaatgaggaaatgtggttgcctccttttattggctgattcgtctgctgagctcctaacttcttagctaatctaggtgaaaccaacccttgtcctggaccctgggcttttgtggaggactgtcttactgttcacaaatactccgccttttccatgagaagctaatttatccctgcctgttgaaattgggcatggacaatgacttgcttggttgtctaataaaatgtgagcaga

SEQ ID NO: 404242 - DNA, 499 bp, Homo sapiens
ctgagggaagcataagaggaaaggcccttagagatagcccttaaagttctgcaacagagatgaacaaacaagacttttgggtgcccagggaccacagtggcactttggggtgggaagtgtgcagaaaaggaatatctggatgcagctgaagttttatgtaaggaaaaggctggagataagtctgtaacagaaattccctctagctagcttcattcatgtaataaataattaggcccattctgtgaccagacactgtgccagcttttccacatttggtgttgaacaaagcagatgtgttccctatttttttggaacctacagacatttacaaaataaacatgtaggaatacattgtgggaagtagcgtggagaagaacagaatgctgtaagaaaaaaatcaggggcactgactccgttttggtgttctgagaaggcttgctctttgacaaagaaagatttcaattgctattggaaagaagcataggggttaacttgacta

SEQ ID NO: 404243 - DNA, 329 bp, Homo sapiens
aacccatagaaatttatgaaatattgatgccaacatctgcttctgaccatgaaggatgaactgttatgggaactgcctctcaccataaacagctagaaaaccagacaaatacatgaaacaactgttttcagatactgggaaatagcagagcaagcctgttatcctgagagaagagaaacaaatgaggtgagccctacaattgcccagtttgctgcctggaggcagtttcagtacatagtgcaggaaagagaacccaaacaagacccagcagtctcactgagttgaggacagaaatcagaattccagaaagccaattgcaggcaaaatac

SEQ ID NO: 404244 - DNA, 124 bp, Homo sapiens
tggaattattatgggattaggtggtatgcagtttttaaaattatcaatcttccattaattaaccagatgtgtgacatgtggcaaattgcttaacatctagaaaaattagtttcttttaaataaa

SEQ ID NO: 404245 - DNA, 351 bp, Homo sapiens
aaataattggagaacctggtgaatatagttaaaaatttcaggtgatttatttaataacaaagaggaaacagaattattaaagaaagtataatgcacgttggaagtacatggagtaaatgccacccattccctttagtctttagtagttagtcatggctctcttaattagcttcttccatacatttttgggattatatcccttatgaccagggatttagtgtagctactttgaaagatgctgaaacttcatgatgaatttaaaatgtgtgccacgcctttcccatacatttgtcaggcagcctctctgtgtatcactgggtttttagaaagccaagccataggattattcac

SEQ ID NO: 404246 - DNA, 551 bp, Homo sapiens
gcgctgtcatgtctggaggagttggtggaggcttggggagcacttgtggactcggtagtgggaaaggcagccctgggtcctgctgcaccagcattgtgactggaggctccaacatcattctgggctctgggaaggaccctgttttggattcctgctctgtgtctggctccagcgctggctccagctgccacaccatcctgaagaagacagttgagtcgagtctgaagacatccatcacctactgagcgacccagcagccacctccttcctgaacacatttggcccactccccccatcagccggctctgcaaggccaactccgtgtccgctgcccacagcccaagccagcccacagcggatgctgcaaaaatcaataaagtctcccctcctgctgttctgaatgctctaagtgcttgcacacctcacccagcaaaacaaaagctgtgtggctccccagcttcctctcctcggaaggcaattgtggcatatctgtgtccagacgtgttctattggtatctcactccacatcccagccactctatcaagggatc

SEQ ID NO: 404247 - DNA, 794 bp, Homo sapiens
ggctggtctcgaactcctgaactcaggtgatccacctacctcagcctcccaaagtgctaggattacaggcgtgagccactgcgcctggcctatcccattttatagtaggagatattgaacccaagagagttaactaacttgccaaaagtcacacagctattaagtggccattgaattgcagatctgttttacttctgatgacatattgaaaatttatgcccttacagggcaaggggattctgtctattgctgctctatccccagcacctagctagtgtcttttggctttcaaatatttgttgttgttaaatggcataaagggacttttgctacacacgttggagatgtgcagatgactgatgttgccgaatgtttcccctactacgttttgtccgttcccaggctgctcattggctttgaccgaggatggtgacgtagatacggtaaagtgctttggtgctttcccatttggtttgaccctgtggttacccagtaataggttcaggatattagaccttgatccagaagatccaaagatgaggataaacctttaaccattgcaacttaaagcccctgagagttgatattccctgtggaggagaattgtattgatttttcagaggtaaaatttagggaaccacatgttcatactattcgattccccttgattcagtctcttacccctcctcctgtttcatggacatttcagtgttgccagtgaaaaagtaatggttttaatttggtccttatttttaacctgcccctgagacttatatgcttgtttataccatgta

SEQ ID NO: 404248 - DNA, 475 bp, Homo sapiens
accattatcctccaattgccagaccctgctagtggcacatccatcagtacatgaactgaatatgtcacagagtgtatcaaagctaaggtaggtgcctgtcccaccatcagttgaatgagaaggtttctgatatcagaaattgggctaccctgctttgccaagactctcttttccaatctctcaaaggcagataataacactaatggacaatgtggccatgagcattaaaacaaatcattaggctggaggcttctcatcagtgcttgagggcaatttcaccacctggggctttccgagaaggcttttgaaggctctgaaacatgctcagtctgcaggagtatgcaggcacccaccgtgccccaagatatggactgtggagcgttcattgtctcaacaattactcactgcaaggtattttcttatggagttgtttttgttccccctaaaatattattacagaaaagaaaactgcatt

SEQ ID NO: 404249 - DNA, 1372 bp, Homo sapiens
cagtcagacaccgagtctcgccttctgagattggcgggtaacctagcaacgcagggaccgcggcggtaactgtggctagggaaacctggagcggtcagagcaggatggccagagacaataaaagcacgagacccaagtagtctaccgaagtctccatctctgtggacctacagaggcacagagggctgctcacaagatggctttagacattctcgccatggcccctttgtatcaggcccctgccatcaacagaatagggccaaagacagacccatctaaaaggccagctgatccactaaaacccttggttctctctaggaccaaactcaccaccattgaggccaaaaggatcatgtccatcctggatgaggcgatctacaaggtggagctggtgaccttgctgtcgtatgtggcatccaacagagaggatatggaggggatgctgggggaggacgtcatgagggcagtgagagagcatgaggatctctgccaggtcctccttgaaaacgtcaggtgcctgaaagagaaagaaaggcaattgcaggagcagaaagaggctgaggaggaagggtggctcagagaccgcctcctttccatagagctgcagaaatccagcctctcaccacttatgcagcagatcaaagactccaccaagaacgtccttagactcttgctcagcaacccccaggctgctaggctcctgcagatgcagacacagggtagaagtgcagaagcccagaattttattgacagcctgatagagctccgtggtttcctgtttgaaaaactactcactagtcccatggaagcgagggataaggcccagttcttacaggatatcagtagacagaatagtaataaccaacaaatcattgatactcttgaaaaggaattggcggagagaatgaagaacaggaatgcagaggaggagttggaggatctggacgctgttcacagggaggagaagatctcgctggaggagctcaggcggaggcacaaagtgctggtgggagagtttgcgcagatccgggaagagcgggagatcaactccaagaaaaggatggaggcagagcaggagatggtgcgcatggtacgggcggccacgctcatccaggccctatggaagggctatctggtgcgctccctgctcagatccaagaagaagcggggcaagggcaaagcaaaggacaaggagaagggcaagcagaaaggcaaggagaagggcaagggcaagaaatgagctctccacccagcccgctcctgacccttatcttcccagagaccaggccaggaaggcccgagatggagagcactaaattcacggctttcatgtttttatttaataaattaaaaagtatttgaagccacattg

SEQ ID NO: 404250 - DNA, 1204 bp, Homo sapiens
cagtcagacaccgagtctcgccttctgagattggcgggtaacctagcaacgcagggaccgcggcggtaactgtggctagggaaacctggagcggtcagagcagaatgctgtctgtatgcctggctggtccccgcctgacacatgtgcctgagatgcctccacacttggtcttcctgcccttgtggccctaacaccctcacaaagctgaaaactgcttccagtgaaaggttctgtgtaaaagcgacagaggacctaagatgaactcttgatgtcaacagttgtggtttctgcagccacactaaccacacagatgtcagcacagctgcactcacacctacttcttcattttgcaggatggccagagacaataaaagcacgagacccaagtagtctaccgaagtctccatctctgtggacctacagaggcacagagggctgctcacaagatggctttagacattctcgccatggcccctttgtatcaggcccctgccatcaacagaatagggccaaagacagacccatctaaaaggccagctgatccactaaaacccttggttctctctaggaccaaactcaccaccattgaggccaaaaggatcatgtccatcctggatgaggcgatctacaaggtggagctggtgaccttgctgtcgtatgtggcatccaacagagaggatatggaggggatgctgggggaggacgtcatgagggcagtgagagagcatgaggatctctgccaggtcctccttgaaaacgtcaggtgcctgaaagagaaagaaaggcaattgcaggagcagaaagaggctgaggaggaagggtggctcagagaccgcctcctttccatagagctgcagaaatccagcctctcaccacttatgcagcagatcaaagactccaccaagaacgtccttagactcttgctcagcaacccccaggctgctaggctcctgcagatgcagacacagggtagaagtgcagaagcccagaattttattgacagcctgatagagctccgtggtttcctgtttgaaaaactactcactagtcccatggaagcgagggataaggcccagttcttacaggatatcagtagacagaatagtaataaccaacaaatcattgatactcttgaaaaggaattggcggagagaatgaagaacaggaatgcagaggtggaaaaggagaactttgtgatccaaga

SEQ ID NO: 404251 - DNA, 1082 bp, Homo sapiens
cagtcagacaccgagtctcgccttctgagattggcgggtaacctagcaacgcagggaccgcggcggtaactgtggctagggaaacctggagcggtcagagcagagtctcattctgttgcccaggccggagtacagtgatgcaaacttggcttactgcaacctccgcctcctaggttcaagagattctcatgcctcagcctcctgagtaactggggttaacctgagtaacaggatggccagagacaataaaagcacgagacccaagtagtctaccgaagtctccatctctgtggacctacagaggcacagagggctgctcacaagatggctttagacattctcgccatggcccctttgtatcaggcccctgccatcaacagaatagggccaaagacagacccatctaaaaggccagctgatccactaaaacccttggttctctctaggaccaaactcaccaccattgaggccaaaaggatcatgtccatcctggatgaggcgatctacaaggtggagctggtgaccttgctgtcgtatgtggcatccaacagagaggatatggaggggatgctgggggaggacgtcatgagggcagtgagagagcatgaggatctctgccaggtcctccttgaaaacgtcaggtgcctgaaagagaaagaaaggcaattgcaggagcagaaagaggctgaggaggaagggtggctcagagaccgcctcctttccatagagctgcagaaatccagcctctcaccacttatgcagcagatcaaagactccaccaagaacgtccttagactcttgctcagcaacccccaggctgctaggctcctgcagatgcagacacagggtagaagtgcagaagcccagaattttattgacagcctgatagagctccgtggtttcctgtttgaaaaactactcactagtcccatggaagcgagggataaggcccagttcttacaggatatcagtagacagaatagtaataaccaacaaatcattgatactcttgaaaaggaattggcggagagaatgaagaacaggaatgcagaggtggaaaaggagaactttgtgatccaaga

SEQ ID NO: 404252 - DNA, 1787 bp, Homo sapiens
cagtcagacaccgagtctcgccttctgagattggcgggtaacctagcaacgcagggaccgcggcggtaactgtggctagggaaacctggagcggtcagagcaggatggccagagacaataaaagcacgagacccaagtagtctaccgaagtctccatctctgtggacctacagaggcacagagggctgctcacaagatggctttagacattctcgccatggcccctttgtatcaggcccctgccatcaacagaatagggccaaagacagacccatctaaaaggccagctgatccactaaaacccttggttctctctaggaccaaactcaccaccattgaggccaaaaggatcatgtccatcctggatgaggcgatctacaaggtggagctggtgaccttgctgtcgtatgtggcatccaacagagaggatatggaggggatgctgggggaggacgtcatgagggcagtgagagagcatgaggatctctgccaggtcctccttgaaaacgtcaggtgcctgaaagagaaagaaaggcaattgcaggagcagaaagaggctgaggaggaagggtggctcagagaccgcctcctttccatagagctgcagaaatccagcctctcaccacttatgcagcagatcaaagactccaccaagaacgtccttagactcttgctcagcaacccccaggctgctaggctcctgcagatgcagacacagggtagaagtgcagaagcccagaattttattgacagcctgatagagctccgtggtttcctgtttgaaaaactactcactagtcccatggaagcgagggataaggcccagttcttacaggatatcagtagacagaatagtaataaccaacaaatcattgatactcttgaaaaggaattggcggagagaatgaagaacaggaatgcagaggaggagttggaggatctggacgctgttcacagggaggagaagatctcgctggaggagctcaggcggaggcacaaagtgctggtgggagagtttgcgcagatccgggaagagcgggagatcaactccaagaaaaggatggaggcagagcaggagatggtgcgcatggtacgggcggccacgctcatccaggccctatggaagggctatctggtgcgctccctgctcagatccaagaagaagcggggcaagggcaaagcaaaggacaaggagaagggcaagcagaaaggcaaggagaagggcaagggcaagaaatgagctctccacccagcccgctcctgacccttatcttcccagagaccaggccaggaaggcccgagatggagagcactaaattcacggctttcatgtttttatttaataaattaaaaagtatttgaagccacattgaagggaacgctctacgaataaatctctttacccagggctgtgggctgtgtgtgtccagctcacagatggtgtttccatgaggagcgtgcagcctggggtgtcagcccagagattatggttccttacttcagccttagtgggaaaccagaccccagctgcagcccggaagctgccatggccatgatggacacatcactcaccagggcagcggggtgtgggtcacagctgcccatagggggcaaagaagcaggcagggaactccaggaggagcggggcctcaggtttcaggctgcccctaaccctgttctgggattaatttgcttgcaacttcccctgctctagcactgtgaaagctcagagggagtcctgaggtcacagcagccctcagcctcacattccagggagctgaacaatt

SEQ ID NO: 404253 - DNA, 679 bp, Homo sapiens
gaataagatctgatgctacaacatagccttcctaatttctcaaatcttacagatagattatagcagacttagactgtatctgactacataatatagtagaataaatattgggaatgcagttatagttttggataaaaaagatccaaatgtatgttcatccttttacttagctaaaacagctcaaacaagtaaaaattaattctctaaatgtaaatattcttgtgtataaaatttgaaaatgatgatacctgacattgttaagagttataaatatgaaaatagctaatgcatattaagtgtggtggacactgtgttatgtgcccaaattctctttcaggattaaagatgtatttgtccagccactgaaggtgtcactatatgacagccctcagatgttagacttgaccaataattttcctgaactgaaagaacggtctctgccttatctaagatgatacacttcctagggcagccatcatctaataactcgaaatacgggacgtacttactagaagaatggaaatttttgttatccagtggcaaatatttgattaatgtttgtcccagagcaattttggaagtagatgatttatcacatgaatctgtatctctaagggaagaggatctaaaagagattgttagttacagccatcaattgttgttggcaagatattacgga

SEQ ID NO: 404254 - DNA, 538 bp, Homo sapiens
tgtggtgaggttgcttctttaaatgcgaccctgatacattcctcctccctgggcaggtccttccctctggagcctccagccacccctgcctgtgttctgttgcggaaagacttctaatttctccttggggcagagtgcctgcggagtggggcgggccgccgccttggctgtttgtgaagcggcatcgttgtctggggtatgatttaatacactttaccgacctgaattcattggatatatgtaaaaatgaaggaatgcacattattctgcttgatgctctgcagagaggagctgcctgagaggttgcacctgcagtcctggatgcactggccccaggggtggttggtgctgactccacatttgtctaataagatgtccagatacaaaaatgtctgtgatgtgggaaccgttacagatctaggagagttttttcaacagcaaaaaaagcaaagcctgtttctgtcaaagtcttttattttatttttgaatttgaccttttaaaataagattaaaacattccatcaagactccctttaaa

SEQ ID NO: 404255 - DNA, 409 bp, Homo sapiens
tacatgtttattagaaaataagtagttgctatttgagaaatgtttttaagttcttagagaaaaacagtatatgcagaagaaatctggaaagctctatatcatatagcattaaaatgcttgttaatagaatattgtagacatttgctgaatactgctaaccagaggctgtagtcttaaggagaagcttaaccaacctcttggtttcggtttcagtatgttcaaattcacttgggtgtttggtagcatacctttactgaatctaactgggcattaacatgacagttgattaaaatgaccttgtaataaatacattattatctgaagacttatgaatatagttaaggctttactgtctatcctaatgttgaaaatctaactcagttttcccaagtcctaggtttcttgatgg

SEQ ID NO: 404256 - DNA, 520 bp, Homo sapiens
gggaaggggttggagttgagtgctctgttctgtggagataacaaagaagcccttcttccttcctcttggatgacctgaccatactttgcagcacaaatgatatcttaaatcttcagtcgcgttgggattggcaaggatgaggggctgtgtgtagccaagggaggcccagacatggtctctgtgggaaatcaaaatttccagcttctctgggctgttacgtcttctcccatcccttgtcactccaccttctccatctctttccatgtgcttctctcagggaaaggcaggcagcctgaccctcagatccttcacccggctcagtgggttacttggggcctcgagttctgcacactagagatcggtgatccctcagggctgggagaggaatagcctgggagactgtcagggtctctgtgatgactgagagtttggtgtatgagttgatgagttgggatgaaccatggtgatgatactttttaaatgaaaaaaaaaaatcacgttgtccaacaaagcattttga

SEQ ID NO: 404257 - DNA, 514 bp, Homo sapiens
tctgaaggagctaagagaagaaactcagagaagttaaaagaagtggctagctcaaggtttagatgtcggcttaggaggcagcagtctaggttcaaccccacctctgcaacctgcaactgcgtaacttttggtgtgctactacacttccctaagccatatcttcatgtctgaaaatgagatgacagtaggtactttgtaagtatcgacagttagtattctgagttggagttgtccagccctcaaagaatcctgacagatgggctacattctcagaactagaaggaacctcaaaagatttcctaggccgctggtttccaaactcttttcttggagaactagggattttgtagaggtcctcggtggatgaagggacactgagcatgtggagctccttcagccagggcagcgggttcaaatgtgagttacatgccagttgcatgcatctggttcttttagttattgggagatgaggtatgatttcatttgacaaaaatggtcccactgctcttcttaa

SEQ ID NO: 404258 - DNA, 784 bp, Homo sapiens
agcggatgttctaaagggatgtcatcatttacaaaatgtctttgttgagtctgaatggttcaaacaatagcaaaaaaggattatttctctcttggacatttcaaagtactatgacacaaaatatccaagacttgttatggtgaggagccaagtggaatggaaaggacagctcatcccggcggctgggagtgcatgcacacacatgccccctttttcttgcctactaacaggatctatagaaggcgtacataatgaagcaagagatggaccctgagggtacttgaagccaacaagtttcacttctggaaaaagacttcagaatatgagtttaaaatataaaaagggaatttgagccaagacacaagaacaaactttttttgacaattatatctttattattcctcttacagagctacatttactcttactaagtttcagagtcaggtagtaatttacagtaagactgaattaccatccataacgttagatgtccttattgaaacttcaacatcatttccaaatatcagcattagcattgtgcttgacattcatttaacgaagttactgaaaatctattaagtataagacatcagttatttttaatagaagtttctgaaaacatttcagcaaaatagcctgttgagaaaaatgtgtatgctgaaaaaaaaaatgaacaaataggaaagcctggttcacaaacaggtgtcagggaaatagacagtacttttatagtaataacataagaacaaacttcttgaaggtaagttttattaaataataggac

SEQ ID NO: 404259 - DNA, 579 bp, Homo sapiens
agcggatgttctaaagggatgtcatcatttacaaaatgtctttgttgagtctgaatggttcaaacaatagcaaaaaaggattatttctctcttggacatttcaaagtactatgacacaaaatatccaagacttgttatggtgaggagccaagtggaatggaaaggacagctcatcccggcggctgggagtgcatgcacacacatgccccctttttcttgcctactaacaggatctatagaaggcgtacataatgaagcaagttgcaagacaagtccaaattcaagaaggtcaagaaatacactccatctccagagaaatctatgactttgagttgaaatatctgaggccaacactccaagcaattttaaacaagtggtgacagaaattaccagacacacatcaagactcaagtataaagctatacaatttaaggatgctcagcaaatgttactgaattgactgggtagtccctaaagagctgaagaataaaagatgttatgagaaatccaacaataccaaatataaattgcctcaggttctgaaatattcaataaagtattctcactgtaaatccttca

SEQ ID NO: 404260 - DNA, 522 bp, Homo sapiens
ccaaaatatcagattcagtcctatgtaatctggtttccattgcattctcttggccagagcaagttgcaagacaagtccaaattcaagaaggtcaagaaatacactccatctccaggtaggagaagctgcaaagaactgtgacaatctatgacaaatagtatgttcaaagggaataatatgggaagatgtgccctccgccaacttctcagggaaaaatacagcttttgtaatatttagtaatatagactgtctaatatttctagagaaatctatgactttgagttgaaatatctgaggccaacactccaagcaattttaaacaagtggtgacagaaattaccagacacacatcaagactcaagtataaagctatacaatttaaggatgctcagcaaatgttactgaattgactgggtagtccctaaagagctgaagaataaaagatgttatgagaaatccaacaataccaaatataaattgcctcaggttctgaaatattcaataaagtattctcactgtaaa

SEQ ID NO: 404261 - DNA, 555 bp, Homo sapiens
ctagaggtggcagagaggggtggccagcacagctccagccagcagctcccacactgctcccagtcctgggcacagtggaagctatggaggcagagaccagggtttgcaatctgggctcctctgcctcactggagagggacttctcccattcagcagagcagcagccctgctgctgaagggcctgctgctactgctgctggggctgtttgcctgcctgcaggaggtgctggagagcaagaaaaggagcctgtgagcaggggttccagcaggtcctcctgctcccagaggcgacctcctcctccaggcatggaggtttgccctcagctgggcatctgggccatttgcccctaatgtgctgcccaggatggcctcttcttgacaggcggacagggggtgagggggccagggggcatctccaaaggaagcttttaaactcagcagctgcaccccagaatctgtatgcctgcacctgcccaaggatttattcatagcttacctaagaatttcaaatttctaccataacactgaaataaagtttgactttttgaaacttca

SEQ ID NO: 404262 - DNA, 256 bp, Homo sapiens
ctctctccaactggctctccgacgtctcggacgaagttgcaaagaacttcctctccggcagcgcggggtcctggcgggtttggagatgcttccgcccctgacgctggggccgcgactccggagtccccgggagcgtgcagccctccaacactgagacccgctgccttcaaagttcccgcggcccccgctgctcgcccatcgctgggaccaggaacggggacaccagcgacggactcttcctcgccggggtgtctac

SEQ ID NO: 404263 - DNA, 895 bp, Homo sapiens
agctagggtctcattctgtcacccaggctgaagtgcagtggcacaatcatggctcactgcagccttcacctcctgagctcaagcaatccacccacctcagcctcctgagtagctgggactacaggcacgtgccagcacacctggctaattttaaaatttttttgtagagaggaggtctcaccatgttgcccaggccagcctcgaactcctgggctcaagtgattcttccacctcagcctcccaaagcactgggatcacaggcatgaactactgcccctggcttcttggcattctttacctttgaaataatacgcaaaatattctgtgttctctgtgtgtattcttctggggagataactttcttcatcactttattaaaggagtctgtgtctcaaaaaggttaagagccaggagactagactagtagcagatgctgggagaaatggagagctaaggaaaatgaaggaactgagacagatagaaggggaaagatccgaggagaaagaaagactaaaaggaagataaataaacaaaaaagagagaagaagaatttcattgctagacatgaaattttagttataaaatcatataataaaaattggtggccaggcgtggtggctcacgcctgtaatcccagcactgtgggaggccgaggtgggtggatcacgaggtcaggagttcaagaccagcctgaccaacatgctgaaaccctgtctctactaaaaatacaaaaaaaattagccaggcatggtggcgcacgcctgtagtcccagctactcaggagactgaggcaggagaatccacttgaacttgggaggcagaggctgcagtgagccaagatcatgccactgccaagatcacaccagcctgggcaacaaagcaagactccgtctca

SEQ ID NO: 404264 - DNA, 482 bp, Homo sapiens
ctggggagaggggagaaactgctcccagtggagaaccacttaagtagagaaaggcttcagcaaatccagatgttctggcaaagatgggaaccaggttcctcggactcagaagactgttggtctccacaaggcaagagtgccctctggtggccagagtcagtaccggcggtcgagaggagctcagagccccggcctaggctgggtgcagagcccacagccgactctgaggtgaaggggtgatgcccaccttggaatcctctgagaggaggaagagagttgcagaataaaagcattttgtgagaaccttcccatttcaaacccccttagcaaatcatggactatccaccaaaggcgtacaggtctaacgtagcaacacactctgcagcctgtttgtttctggtgcaaccaggtgacagcacatcctctggccatctgtgactgtgactgtcagcctcatctggggatagaatgctgtggatgct

SEQ ID NO: 404265 - DNA, 361 bp, Homo sapiens
ttcagtgcttctagcagtcagagagtcagtggtttcttttctctatgaagaaccatgaactaattctgagaaggtgaacttaaagagagcagaaacctttaaaaaaaaaaagttttaactaattcataaaggtctttcttctgatgatcagagtgctagaatacagattgggtatttggagaagagatggaatatatttttttttaagttgatgctttttctagaactgttggatattgacagaaattcctctaagctctactagctacccaaaagatgttggtgtcctgaaaggtatggaaaatagagttatggtcatgtagggttttaaaagaactaaaagaggctttaaaagtccaaa

SEQ ID NO: 404266 - DNA, 474 bp, Homo sapiens
atctgtggaaacacatgtattcagagcaactttttttggcctgaagtcactgcagtggaacatttgggagcaagtttccccagggcccagctccttcccgctaggctctgccatgcctcctgtttattaacagggaggcgtgacaaagggaaaaatctcctgattgaagactcatctcagacatcttttcactcctctagggaagggtgcaattctgggctttaatgacatatgacggggcaggcagtagaggtgttgcgcattttaggcaatacatgtgctgctagaaagttgaggtatagggactttttaggaacacaatttttattgacaagtaacctttcaagaacaataaagaaaatcagaaagaaaacctatgttcatagcagcatcattcataatagcgaaaacaactcaaatggccatcaactgacgaacgtatgaataaaatgtggtctattcatgtgatggaat

SEQ ID NO: 404267 - DNA, 225 bp, Homo sapiens
aattctactagactttcaaagaagaattaataccaatctgttggactctattccacaagataatgaaagaaggaaccctctctaactcattctatgaagccagcatcaccctaataccaaaatcaggaaaggacacaaccaaaaaagaaaactacacaccaatatccttgatgaacatagatgctaaaatccttaagagaatactagttaactgaatccaacaaa

SEQ ID NO: 404268 - DNA, 509 bp, Homo sapiens
tttgtttcattttcccaaggagaatacagaggacagtacttaagttttagttatgttgattgcttgtgtgaaatgctgattcctgccagcagtcgccaggtgtctctcacgctgctgggagaggaatgtctcgtcttcttcatctggttgcctccgtcactgttctagaggcttctggcactggtgcaaggcagagctgtgcttccttgagagtgtgccaagcatttactttggttatttagttctagtctgggagcagacacaaaaggaaaaaaaagaaaataccaactccatgtgtctgaggtatcacttatagtttaaaaaaaatgattgtcttatcatgtttgggaaaatactggtcttcctgttttcctcctatttaaattcatcctaaaacttccagggacacaagaaattattagctattttgaccatccattccagaaaagatggtggccttacaatcaattgcaagtggttaatagaaacatccttttacagcttctatt

SEQ ID NO: 404269 - DNA, 328 bp, Homo sapiens
agatataatggaaggcatgagctagatcaattctacaagtgaaaaattacattaattaagaggaaggatcactcatcacccaattataggtaagtttataggagggtgggactggctacataatggtaggtgatactttatgtccttattttcattaaagagaatatgtcatttcctgaaaatgaaagatgtgggtttgaatagagagttggcaaaatttggtatttatttgaaattggcatttatttgggaagataatgtagggtaaccaatccacttagatgatagttattaactataaactatgtaccaggtactttgctataat

SEQ ID NO: 404270 - DNA, 363 bp, Homo sapiens
cttgactaatactggaaagtaatcaaagtctacacacatacacacatacatataaacacatatatatgtatatataactgtacatttgcatagggctttataatttcatagatactttgtcagttgaccctcacagtaatcttggggaataagaagcacaaaaaagtattttcaaccccgttgtaaagatgaagaaaagaatgatcagatgacttgctcaaaataaaaatgacttgctcaaaattacacagataagcaagaggcagaatcaactgacactcgtgtcttctaacttgtacttcagggatctttgtgctacactaggttaactcaaatttagtttgaataaaaaattcaatatcc

SEQ ID NO: 404271 - DNA, 379 bp, Homo sapiens
catctttgatgggttgagagtactaattgtatcctagacttgctcatccccaacactgaggccctgagtctgtaccctgacttgggggctgaactggagcaactctttgctctgggagaagagttaaaaggagttcacaatgttcaggcccagctgtcttttgggagagatgtctgcactgattatggatccaaacatcagagaggaagtgacaacttttcagaatccttgattcgaagtcaagaaagcctagaagaacatgcaagacaacattcaagcagaacccagggatactatgcagaaagtctttcaatttgaatactttacttatttctttactcatgtgtgtatttattgaataaataggtattaagggctt

SEQ ID NO: 404272 - DNA, 504 bp, Homo sapiens
tgtgtgtttccagtctatttttatgagttcccatcataagtcacaccatccatcatagcataagcatttgaccctcattatgagacatcaagaaagctgtcaccattgccctagcaccagtgtctccagtaaatattggaaatgttaggagatctcatttagtaaattcctgagtgttgcctgccagcgcattgggtcttagtgttttatgaattattctttagtctatgtacttttatcacacttgacagttatcataaatggtctttaggctgaatactagtttttaacaaaggaaaatactcaacattattaagaaggacctgcctggatctgctatagggatgcagaatatagaaattaaaaatatttgagatcgatgtctgtgcaacatatgaaatcatgtaaacagatacaatcaataatttctcttcagttctaacagagccccataaaaacgatttggttcagtttgggctacctgggatggctaaaaaataaaaa

SEQ ID NO: 404273 - DNA, 745 bp, Homo sapiens
tcctattgtctggtacaacttgggggtgaagacaggctttcatctcgtgttacccggaagggccctcaagctgagacacagggccgatatacagaagcagctaattgtgatccttgtggggctctttcatggccagtgtgtggacactatcgtcccctggttttgggagttttcaggcaatcatctgtgtctctggaagatggcataatccctacaccatcttccctgattaagaactatgcttctccagtttttttcccccagatgacaccagagagggagtttggggtctggggacctgtctgtcccaggctggccctgcacaatagcgtggtgagtctgagtggtgggcacaccatgggagggctgttggctattgggatcagtgatctattttctagagacaacttatgcccaaaacagctttgctctgcacagggtgctggagtgagaggctaccagagctgctctccactgtgcaggcctagtgtgagttacattaggaatttgcagaccatctagatgttatttatttttagagacagggtccaggcggtttcaaactcctgggctcaagcactcctcctgctttggcctccctagtagctggaactacatgcacacatgccacgagacctggaaggttttatttttaaaacgttgatggttacttgggtatatattaatatacctgggtatgtttctgtgatgttttgctctccaggtttactttgttaaatgtatc

SEQ ID NO: 404274 - DNA, 351 bp, Homo sapiens
acagagtcattattgtgggttatttgagtgggccctaaaggcaatcacaaatttccttacaagagggaggtagagagacacaaaaaaacagaaggtggtgggaccatggaaggagagtgatttgaagatgctatgctgctggctttgaagatgcaggatgtggccaagagccaaagaatgcaaggaatgtagctctagatactggaaaaggcaaggaaatggattctcctctagagcctctcaagggagcacggccatgggacaccttggttttgacctagtgaaacccacttcagacatctgacctccagaactgtaagaaaataaacctgtattatgtgaaaacaccaa

SEQ ID NO: 404275 - DNA, 168 bp, Homo sapiens
tgcagattacgatcaatgcaagataaaacctgagctggccaacgcttagcttttcatttaaagcctttggccgcaaaaccagttgttcctgagccttttacccccaagtaaaaaatttagctttctttgcaaaatgttgtgtgcttggtaaacactagaatgctattt

SEQ ID NO: 404276 - DNA, 140 bp, Homo sapiens
atgtattgtggtatttagaaaagggattggtggtgactgggccaccagcattggttaagcaaactaagtcgttccaaaacaaccccatttccattttttatggtgatacaagattgataaatcagaagactataatagat

SEQ ID NO: 404277 - DNA, 388 bp, Homo sapiens
ggtggtgggtgggaaataaatacccctgcctctctctcctctcaccctttgatcttctgatcttttgattactcccatttgatgaacctcagggcaaaggaatatgacttaaccaatccgtaaaggtcagtccctccgccagccccttccccagatgcacagaacaagatgcaaaatgatagacaatggatccgaatgaaaatattcactgtagaactatctatttacagaactaggaataaactaaaaatgataaaaaccaaaatcatcttaggataactttttaaccaggcattatactttttaaaggcaagacctttatcttcatctctgacttacagtactaggcacatgcaagagaggctcatcagtgctgtgtgtggaaact

SEQ ID NO: 404278 - DNA, 665 bp, Homo sapiens
cccccaaaggcagcttcaggtaccaaagaggaccttaatttagcccccctccttcaccagcagtgggcagcatctgtgaagagaatagtgccatcatctggttttggctggacaaaggtgagccccggtgatgccctgactggaaactattacaagctgccccaccagtgggcccactgagcccctgcactaagttactcaaaatgtgctaaaaagtttcttctttttaataaaaactagccattgcattggctccttcttccaaaaactaaaaataaaaagactttgctttgtggttggagctataaaagaattgataaccccgatactaaagtatacaaccaagaaaagtgtcaaatatatagttgatttagaacctggattatgttgaagaatttttggtgttctgagggctatgtaaaaatcttgtagactatgggtgctccagtcactaggcagataagcatttattatacatgatttgtaaaataaggcatttataatgttaaatatttctaacaattctagagaatgtacctttcaaaaaaatggaaacttagaaacatatatcccttgtcattttctttcactttgaatctattaatagattcttacaaaacaaaaagtttaataaaaattttctcactcagatattttggaattgt

SEQ ID NO: 404279 - DNA, 374 bp, Homo sapiens
ctatttccatcctccagcaataattcatatagtaatgatttggtggctgatatggtttgactctgtgtccccatgcaaatctcatcttgaattgtaatccccacatgttgggggaggagcctggtaagaggtgattgaatcatggggtgaacttcccccttgctgttctcataatagtgagtgagttcttatgagagctagttgtttgaaggtgtgtggcacttcccccttctcgctctctctcctgctccgccatggtaaagatgtgcttgcttcccctttgccttctgccatgattgtaagtttcctgaggcttaaccatgcttcctgtgaagcctgcagaactgtaagtcaattaaacctcttttcttcat

SEQ ID NO: 404280 - DNA, 370 bp, Homo sapiens
taattttatttcacagaatgaatttcaaaaaccagatgagttttgctgggtgtttcaagatggccaaacaggaacagctccagtctacagctcccagcgtgatcaatgcagaagaaaggtgatttctgcatttccaactggggtacttggttcatctcattgggactggttggacagtgggtgcagcccacaaaggattatcctcgatacttggataatgtccatatatggtgctgattttggccatgtaactttattttatgttatggtgagtagattaaatctctgaaattttaggctttgtcatgtcacttgctttaatcaaataaatatttactggtgtgacacaagcaaacacctgaagcttact

SEQ ID NO: 404281 - DNA, 1366 bp, Homo sapiens
ttccggttactagggcaatctgccggaagagtcaggttctgtgtatgtctccgcgtcttccgcggagcgggtgtgcagggcctgcagcattgaactagatgtcgtccccgcaggccccagaagatgggcagggctgtggcgaccgcggcgatccccctggggacctccgtagcgtcttggtcacgaccgtgctcaacctcgagccgctggacgaggatctcttcagaggaaggcattactgggtaccggccaagaggctgtttggtggtcagatcgtgggccaggccctggtggctgcagccaagtctgtgagtgaagacgtccacgtgcactccctgcactgctactttgttcgggcaggggacccgaagctgccagtactgtaccaagtggagcggacacgaacagggtcgagcttctcggtgcgctctgtgaaggccgtgcaacatgggaagcccatcttcatctgccaggcctccttccagcaggcccagcccagccccatgcagcaccagttctccatgcccactgtgccaccaccagaagagctgcttgactgtgagaccctcattgaccagtatttaagggaccctaacctccaaaagaggtacccattggcgctcaaccgaattgctgctcaggaggtccccattgagatcaagccagtaaacccatcccccctgagccagctgcagagaatggagcccaaacagatgttctgggtgcgagcccggggctatattggtcctgagctggaaagcccaggagcccagggctgatggggacctgttgcaggcgagggcgacatgaagatgcactgctgcgtggccgcctatatctccgactatgccttcttgggcactgcactgctgcctcaccagtggcagcacaaggtgcacttcatggtctcactggaccattccatgtggttccacgcccccttccgagctgaccactggatgctctatgaatgcgagagcccctgggccggtggctctcgggggctggtccatgggcggctgtggcgtcaggatggagtcctagctgtgacctgtgcccaggagggcgtgatccgagtgaagccccaggtctcagagagcaagctgtagccagaggtaccagcttcgcctggggcttcaagaacctcccatctatccccattcctgagacaggagttacagtcccttttggccctcacatccaataaagagactgataccaaaaaaaaaaaaaaggggcggccgccctttttttttttttggtttggggacgtttttatttcgcaggctactttagacttcttttccctcattgtttttgttactatacgacccctgtgctattggggtttaacgggcctggcgcg

SEQ ID NO: 404282 - DNA, 1170 bp, Homo sapiens
ttccggttactagggcaatctgccggaagagtcaggttctgtgtatgtctccgcgtcttccgcggagcgggtgtgcagggcctgcagcattgaactagatgtcgtccccgcaggccccagaagatgggcagggctgtggcgaccgcggcgatccccctggggacctccgtagcgtcttggtcacgaccgtgctcaacctcgagccgctggacgaggatctcttcagaggaaggcattactgggtaccggccaagaggctgtttggtggtcagatcgtgggccaggccctggtggctgcagccaagtctgtgagtgaagacgtccacgtgcactccctgcactgctactttgttcgggcaggggacccgaagctgccagtactgtaccaagtggagcggacacgaacagggtcgagcttctcggtgcgctctgtgaaggccgtgcaacatgggaagcccatcttcatctgccaggcctccttccagcaggcccagcccagccccatgcagcaccagttctccatgcccactgtgccaccaccagaagagctgcttgactgtgagaccctcattgaccagtatttaagggaccctaacctccaaaagaggtacccattggcgctcaaccgaattgctgctcaggaggtccccattgagatcaagccagtaaacccatcccccctgagccagctgcagagaatggagcccaaacagatgttctgggtgcgagcccggggctatattggcgagggcgacatgaagatgcactgctgcgtggccgcctatatctccgactatgccttcttgggcactgcactgctgcctcaccagtggcagcacaaggtgcacttcatggtctcactggaccattccatgtggttccacgcccccttccgagctgaccactggatgctctatgaatgcgagagcccctgggccggtggctctcgggggctggtccatgggcggctgtggcgtcaggatggagtcctagctgtgacctgtgcccaggagggcgtgatccgagtgaagccccaggtctcagagagcaagctgtagccagaggtaccagcttcgcctggggcttcaagaacctcccatctatccccattcctgagacaggagttacagtcccttttggccctcacatccaataaagagactgatacca

SEQ ID NO: 404283 - DNA, 829 bp, Homo sapiens
ttccggttactagggcaatctgccggaagagtcaggttctgtgtatgtctccgcgtcttccgcggagcgggtgtgcagggcctgcagcattgaactagatgtcgtccccgcaggccccagaagatgggcagggctgtggcgaccgcggcgatccccctggggacctccgtagcgtcttggtcacgaccgtgctcaacctcgagccgctggacgaggatctcttcagaggaaggcattactgggtaccggccaagaggctgtttggtggtcagatcgtgggccaggccctggtggctgcagccaagtctgtgagtgaagacgtccacgtgcactccctgcactgctactttgttcgggcaggggacccgaagctgccagtactgtaccaagtggagcggacacgaacagggtcgagcttctcggtgcgctctgtgaaggccgtgcaacatgggaagcccatcttcatctgccaggcctccttccagcaggcccagcccagccccatgcagcaccagttctccatgcccactgtgccaccaccagaagagctgcttgactgtgagaccctcattgaccagtatttaagggaccctaacctccaaaagaggtacccattggcgctcaaccgaattgctgctcaggaggtccccattgagatcaagccagtaaacccatcccccctgagccagctgcagagaatggagcccaaacagatgttctgggtgcgagcccggggctatattggtaagagtaccccatggatgggaggaaaccactctccaaggggtctaccactcatttgctgtgtggccttgggcacatgagttcc

SEQ ID NO: 404284 - DNA, 933 bp, Homo sapiens
ttccggttactagggcaatctgccggaagagtcaggttctgtgtatgtctccgcgtcttccgcggagcgggtgtgcagggcctgcagcattgaactagatgtcgtccccgcaggccccagaagatgggcagggctgtggcgaccgcggcgatccccctggggacctccgtagcgtcttggtcacgaccgtgctcaacctcgagccgctggacgaggatctcttcagaggaaggcattactgggtaccggccaagaggctgtttggtggtcagatcgtgggccaggccctggtggctgcagccaagtctgtgagtgaagacgtccacgtgcactccctgcactgctactttgttcgggcagagcagatgccctcatgtgttctgcgtagatccccagctgagaagagtttgtggacctttacagtatgtgatttgtattaagaaaaccatggggtttcccccttcattttgtaaatatgaaagttatccctgtaatggtaaatacactttttcatactgtcccgtgtctcttactcctcatccctgaggagtattgattggcccccctcttctcggcccccagtcactgctataaagtatttgaatacttaccttgggctcagccaggttcttatctttatgctagttgggagtaaatatgtgctttgtttctttaatttgtttgtaagtaccagccttttgatattgtaatccttccagcctagtgaaatacctggctgttttcttttgtgtgggtgggggcattacttgaactctgaatctcttcatcctgtgatggaagaattcaatgagtctttgccagtaaagtatctagtgcagggcttggcataatctagttttccataaatattattagtttttgatgattaacttatgggaataattaaaatttgcatgatacagagaatagttg

SEQ ID NO: 404285 - DNA, 1315 bp, Homo sapiens
ttccggttactagggcaatctgccggaagagtcaggttctgtgtatgtctccgcgtcttccgcggagcgggtgtgcagggcctgcagcattgaactagatgtcgtccccgcaggccccagaagatgggcagggctgtggcgaccgcggcgatccccctggggacctccgtagcgtcttggtcacgaccgtgctcaacctcgagccgctggacgaggatctcttcagaggaaggcattactgggtaccggccaagaggctgtttggtggtcagatcgtgggccaggccctggtggctgcagccaagtctgtgagtgaagacgtccacgtgcactccctgcactgctactttgttcgggcaggggacccgaagctgccagtactgtaccaagtggagcggacacgaacagggtcgagcttctcggtgcgctctgtgaaggccgtgcaacatgggaagcccatcttcatctgccaggcctccttccagcaggcccagcccagccccatgcagcaccagttctccatgcccactgtgccaccaccagaagagctgcttgactgtgagaccctcattgaccagtatttaagggaccctaacctccaaaagaggtacccattggcgctcaaccgaattgctgctcaggaggtccccattgagatcaagccagtaaacccatcccccctgagccagctgcagagaatggagcccaaacagatgttctgggtgcgagcccggggctatattggcgagggcgacatgaagatgcactgctgcgtggccgcctatatctccgactatgccttcttgggcactgcactgctgcctcaccagtggcagcacaaggtgcacttcatggtctcactggaccattccatgtggttccacgcccccttccgagctgaccactggatgctctatgaatgcgagagcccctgggccggtggctctcgggggctggtccatgggcggctgtggcgtcaggatggagtcctagctgtgacctgtgcccaggagggcgtgatccgagtgaagccccaggtctcagagagcaagctgtagccagaggtaccagcttcgcctggggcttcaagaacctcccatctatccccattcctgagacaggagttacagtcccttttggccctcacatccaataaagagactgataccaaaaaaaaaaaaaaggggcggccgccctttttttttttttggtttggggacgtttttatttcgcaggctactttagacttcttttccctcattgtttttgttactatacgacccctgtgctattggggtttaacgggcctggcgcg

SEQ ID NO: 404286 - DNA, 1279 bp, Homo sapiens
gatggagtttttttagaagcaaggagtattaattttatttaacaaacacatatagagccctcactatgtgccagatattattctaaacactttacaactacggattcatttcattatcattaaaatcctgtaagcgatgagcaccatgatgatccccagtttgcaaataagcacactgctcagagaagtgaagggtcacacggctggtgagtggtggagccaggatttgaatgcaaggaatctgtcaatgtctctgctgtttgtgctgttagagaaaagctccacctgcacagggagaagcctgatgacagggcctggtggtctctgtatccctgggcctggaccttagcagacctcagttagtagtcactgagatgaaatggaatggaagatgagtagtagagtgcctgtcaggcgttgtgatgatgacagggcctgtggacccactgtgtccttgtgcccactgcaggggacccgaagctgccagtactgtaccaagtggagcggacacgaacagggtcgagcttctcggtgcgctctgtgaaggccgtgcaacatgggaagcccatcttcatctgccaggcctccttccagcaggcccagcccagccccatgcagcaccagttctccatgcccactgtgccaccaccagaagagctgcttgactgtgagaccctcattgaccagtatttaagggaccctaacctccaaaagaggtacccattggcgctcaaccgaattgctgctcaggaggtccccattgagatcaagccagtaaacccatcccccctgagccagctgcagagaatggagcccaaacagatgttctgggtgcgagcccggggctatattggcgagggcgacatgaagatgcactgctgcgtggccgcctatatctccgactatgccttcttgggcactgcactgctgcctcaccagtggcagcacaaggtgcacttcatggtctcactggaccattccatgtggttccacgcccccttccgagctgaccactggatgctctatgaatgcgagagcccctgggccggtggctctcgggggctggtccatgggcggctgtggcgtcaggatggagtcctagctgtgacctgtgcccaggagggcgtgatccgagtgaagccccaggtctcagagagcaagctgtagccagaggtaccagcttcgcctggggcttcaagaacctcccatctatccccattcctgagacaggagttacagtcccttttggccctcacatccaataaagagactgatacca

SEQ ID NO: 404287 - DNA, 1221 bp, Homo sapiens
ttccggttactagggcaatctgccggaagagtcaggttctgtgtatgtctccgcgtcttccgcggagcgggtgtgcagggcctgcagcattgaactagatgtcgtccccgcaggccccagaagatgggcagggctgtggcgaccgcggcgatccccctggggacctccgtagcgtcttggtcacgaccgtgctcaacctcgagccgctggacgaggatctcttcagaggaaggcattactgggtaccggccaagaggctgtttggtggtcagatcgtgggccaggccctggtggctgcagccaagtctgtgagtgaagacgtccacgtgcactccctgcactgctactttgttcgggcaggggacccgaagctgccagtactgtaccaagtggagcggacacgaacagggtcgagcttctcggtgcgctctgtgaaggccgtgcaacatgggaagcccatcttcatctgccaggcctccttccagcaggcccagcccagccccatgcagcaccagttctccatgcccactgtgccaccaccagaagagctgcttgactgtgagaccctcattgaccagtatttaagggaccctaacctccaaaagaggtacccattggcgctcaaccgaattgctgctcaggaggtccccattgagatcaagccagtaaacccatcccccctgagccagctgcagagaatggagcccaaacagatgttctgggtgcgagcccggggctatattggtcctgagctggaaagcccaggagcccagggctgatggggacctgttgcaggcgagggcgacatgaagatgcactgctgcgtggccgcctatatctccgactatgccttcttgggcactgcactgctgcctcaccagtggcagcacaaggtgcacttcatggtctcactggaccattccatgtggttccacgcccccttccgagctgaccactggatgctctatgaatgcgagagcccctgggccggtggctctcgggggctggtccatgggcggctgtggcgtcaggatggagtcctagctgtgacctgtgcccaggagggcgtgatccgagtgaagccccaggtctcagagagcaagctgtagccagaggtaccagcttcgcctggggcttcaagaacctcccatctatccccattcctgagacaggagttacagtcccttttggccctcacatccaataaagagactgatacca

SEQ ID NO: 404288 - DNA, 1036 bp, Homo sapiens
ttccggttactagggcaatctgccggaagagtcaggttctgtgtatgtctccgcgtcttccgcggagcgggtgtgcagggcctgcagcattgaactagatgtcgtccccgcaggccccagaagatgggcagggctgtggcgaccgcggcgatccccctggggacctccgtagcgtcttggtcacgaccgtgctcaacctcgagccgctggacgaggatctcttcaggggacccgaagctgccagtactgtaccaagtggagcggacacgaacagggtcgagcttctcggtgcgctctgtgaaggccgtgcaacatgggaagcccatcttcatctgccaggcctccttccagcaggcccagcccagccccatgcagcaccagttctccatgcccactgtgccaccaccagaagagctgcttgactgtgagaccctcattgaccagtatttaagggaccctaacctccaaaagaggtacccattggcgctcaaccgaattgctgctcaggaggtccccattgagatcaagccagtaaacccatcccccctgagccagctgcagagaatggagcccaaacagatgttctgggtgcgagcccggggctatattggcgagggcgacatgaagatgcactgctgcgtggccgcctatatctccgactatgccttcttgggcactgcactgctgcctcaccagtggcagcacaaggtgcacttcatggtctcactggaccattccatgtggttccacgcccccttccgagctgaccactggatgctctatgaatgcgagagcccctgggccggtggctctcgggggctggtccatgggcggctgtggcgtcaggatggagtcctagctgtgacctgtgcccaggagggcgtgatccgagtgaagccccaggtctcagagagcaagctgtagccagaggtaccagcttcgcctggggcttcaagaacctcccatctatccccattcctgagacaggagttacagtcccttttggccctcacatccaataaagagactgatacca

SEQ ID NO: 404289 - DNA, 975 bp, Homo sapiens
ttccggttactagggcaatctgccggaagagtcaggttctgtgtatgtctccgcgtcttccgcggagcgggtgtgcagggcctgcagcattgaactagatgtcgtccccgcaggccccagaagatgggcagggctgtggcgaccgcggcgatccccctggggacctccgtagcgtcttggtcacgaccgtgctcaacctcgagccgctggacgaggatctcttcagaggaaggcattactgggtaccggccaagaggctgtttggtggtcagatcgtgggccaggccctggtggctgcagccaagtctgtgagtgaagacgtccacgtgcactccctgcactgctactttgttcgggcaggggacccgaagctgccagtactgtaccaagtggagcggacacgaacagggtcgagcttctcggtgcgctctgtgaaggccgtgcaacatgggaagcccatcttcatctgccaggcctccttccagcaggcccagcccagccccatgcagcaccagttctccatgcccactgtgccaccaccagaagagctgcttgactgtgagaccctcattgaccagtatttaagggaccctaacctccaaaagaggtacccattggcgctcaaccgaattgctgctcaggaggtccccattgagatcaagccagtaaacccatcccccctgagccagctgcagagaatggagcccaaacagatgttctgggtgcgagcccggggctatattggtggctctcgggggctggtccatgggcggctgtggcgtcaggatggagtcctagctgtgacctgtgcccaggagggcgtgatccgagtgaagccccaggtctcagagagcaagctgtagccagaggtaccagcttcgcctggggcttcaagaacctcccatctatccccattcctgagacaggagttacagtcccttttggccctcacatccaataaagagactgatacca

SEQ ID NO: 404290 - DNA, 1283 bp, Homo sapiens
ttccggttactagggcaatctgccggaagagtcaggttctgtgtatgtctccgcgtcttccgcggagcgggtgtgcagggcctgcagcattgaactagatgtcgtccccgcaggccccagaagatgggcagggctgtggcgaccgcggcgatccccctggggacctccgtagcgtcttggtcacgaccgtgctcaacctcgagccgctggacgaggatctcttcagaggaaggcattactgggtaccggccaagaggctgtttggtggtcagatcgtgggccaggccctggtggctgcagccaagtctgtgagtgaagacgtccacgtgcactccctgcactgctactttgttcgggcagagcagatgccctcatgtgttctgcgtagatccccagctgagaagagtttgtggacctttacagggacccgaagctgccagtactgtaccaagtggagcggacacgaacagggtcgagcttctcggtgcgctctgtgaaggccgtgcaacatgggaagcccatcttcatctgccaggcctccttccagcaggcccagcccagccccatgcagcaccagttctccatgcccactgtgccaccaccagaagagctgcttgactgtgagaccctcattgaccagtatttaagggaccctaacctccaaaagaggtacccattggcgctcaaccgaattgctgctcaggaggtccccattgagatcaagccagtaaacccatcccccctgagccagctgcagagaatggagcccaaacagatgttctgggtgcgagcccggggctatattggtcctgagctggaaagcccaggagcccagggctgatggggacctgttgcaggcgagggcgacatgaagatgcactgctgcgtggccgcctatatctccgactatgccttcttgggcactgcactgctgcctcaccagtggcagcacaaggtgcacttcatggtctcactggaccattccatgtggttccacgcccccttccgagctgaccactggatgctctatgaatgcgagagcccctgggccggtggctctcgggggctggtccatgggcggctgtggcgtcaggatggagtcctagctgtgacctgtgcccaggagggcgtgatccgagtgaagccccaggtctcagagagcaagctgtagccagaggtaccagcttcgcctggggcttcaagaacctcccatctatccccattcctgagacaggagttacagtcccttttggccctcacatccaataaagagactgatacca

SEQ ID NO: 404291 - DNA, 1028 bp, Homo sapiens
ttccggttactagggcaatctgccggaagagtcaggttctgtgtatgtctccgcgtcttccgcggagcgggtgtgcagggcctgcagcattgaactagatgtcgtccccgcaggccccagaagatgggcagggctgtggcgaccgcggcgatccccctggggacctccgtagcgtcttggtcacgaccgtgctcaacctcgagccgctggacgaggatctcttcagaggaaggcattactgggtaccggccaagaggctgtttggtggtcagatcgtgggccaggccctggtggctgcagccaagtctgtgagtgaagacgtccacgtgcactccctgcactgctactttgttcgggcaggggacccgaagctgccagtactgtaccaagtggagcggacacgaacagggtcgagcttctcggtgcgctctgtgaaggccgtgcaacatgggaagcccatcttcatctgccaggcctccttccagcaggcccagcccagccccatgcagcaccagttctccatgcccactgtgccaccaccagaagagctgcttgactgtgagaccctcattgaccagtatttaaggtgagagacctggaggctccatggcagacttttcaaaatgcagctgctatctgtttgtgggtcatagaatcctttagtgggtcttgaccagcatttttaaaatacagattagaaaagaagatactggagtgaataatatgtatgtattaagggcaagaatccttttgtgaaacttgaggtttagtcatgtgtgtttctggtgtgtgtctgtactgggtcatggtataaaatgaagggcttggccgggtgcagtggcgcatacctataatcccagcactttgggaagccaaggcaggaggaccgcctgagaccaggagtttgataccagcctcgccaacatagcaagactccatctctaatttaaaaataaggctggggctgggtgtgggggctcatacctataataacaccttgggaagcccaagtgggaggatcacccgct

SEQ ID NO: 404292 - DNA, 1137 bp, Homo sapiens
gatggagtttttttagaagcaaggagtattaattttatttaacaaacacatatagagccctcactatgtgccagatattattctaaacactttacaactacggattcatttcattatcattaaaatcctgtaagcgatgagcaccatgatgatccccagtttgcaaataagcacactgctcagagaagtgaagggtcacacggctggtgagtggtggagccaggatttgaatgcaaggaatctgtcaatgtctctgctgtttgtgctgttagagaaaagctccacctgcacagggagaagcctgatgacagggcctggtggtctctgtatccctgggcctggaccttagcagacctcagttagtagtcactgagatgaaatggaatggaagatgagtagtagagtgcctgtcaggcgttgtgatgatgacagggcctgtggacccactgtgtccttgtgcccactgcaggggacccgaagctgccagtactgtaccaagtggagcggacacgaacagggtcgagcttctcggtgcgctctgtgaaggccgtgcaacatgggaagcccatcttcatctgccaggcctccttccagcaggcccagcccagccccatgcagcaccagttctccatgcccactgtgccaccaccagaagagctgcttgactgtgagaccctcattgaccagtatttaaggtgagagacctggaggctccatggcagacttttcaaaatgcagctgctatctgtttgtgggtcatagaatcctttagtgggtcttgaccagcatttttaaaatacagattagaaaagaagatactggagtgaataatatgtatgtattaagggcaagaatccttttgtgaaacttgaggtttagtcatgtgtgtttctggtgtgtgtctgtactgggtcatggtataaaatgaagggcttggccgggtgcagtggcgcatacctataatcccagcactttgggaagccaaggcaggaggaccgcctgagaccaggagtttgataccagcctcgccaacatagcaagactccatctctaatttaaaaataaggctggggctgggtgtgggggctcatacctataataacaccttgggaagcccaagtgggaggatcacccgct

SEQ ID NO: 404293 - DNA, 1777 bp, Homo sapiens
ttccggttactagggcaatctgccggaagagtcaggttctgtgtatgtctccgcgtcttccgcggagcgggtgtgcagggcctgcagcattgaactagatgtcgtccccgcaggccccagaagatgggcagggctgtggcgaccgcggcgatccccctggggacctccgtagcgtcttggtcacgaccgtgctcaacctcgagccgctggacgaggatctcttcagaggaaggcattactgggtaccggccaagaggctgtttggtggtcagatcgtgggccaggccctggtggctgcagccaagtctgtgagtgaagacgtccacgtgcactccctgcactgctactttgttcgggcaggggacccgaagctgccagtactgtaccaagtggagcggacacgaacagggtcgagcttctcggtgcgctctgtgaaggccgtgcaacatgggaagcccatcttcatctgccaggcctccttccagcaggcccagcccagccccatgcagcaccagttctccatgcccactgtgccaccaccagaagagctgcttgactgtgagaccctcattgaccagtatttaagggaccctaacctccaaaagaggtacccattggcgctcaaccgaattgctgctcaggaggtccccattgagatcaagccagtaaacccatcccccctgagccagctgcagagaatggagcccaaacagatgttctgggtgcgagcccggggctatattggcgagggcgacatgaagatgcactgctgcgtggccgcctatatctccgactatgccttcttgggcactgcactgctgcctcaccagtggcagcacaaggtgcacttcatggtctcactggaccattccatgtggttccacgcccccttccgagctgaccactggatgctctatgaatgcgagagcccctgggccggtggctctcgggggctggtccatgggcggctgtggcgtcaggatggagtcctagctgtgacctgtgcccaggagggcgtgatccgagtgaagccccaggtctcagagagcaagctgtagccagaggtaccagcttcgcctggggcttcaagaacctcccatctatccccattcctgagacaggagttacagtcccttttggccctcacatccaataaagagactgataccactggcgagtggctggcttttaattcccctgggccagacctgcagccttgccttcatcccttaactccaggactccaggggcagagtccctggccttcagccaagaggccttgccagcttgggggcccaccaacaagggaacattgccccaacctgtgccacagccccccggctgtttataggctggagaggctgtgtcagacttccctgtactacacaagggcaaccccagccaaagctcaccctgagcctagctcaacagaagtttccttgatctgcttcacattctcttttggaacttctaggggctcccagcaccctctgcagcctcccagctattctgttctcatcaggtccttcccctgccttctggggcaacccctctcctcacagtggccttaaatctaggcaagggttagtccagcacctccttgatgagcaattctttgagactggggggtggtgtgggggtaaggcctgcctcctgcagggcttggagccgagcctctgattgacgtttgtccaggcccaggcgccaggagagccggacatgggcctccagaaagggtgccagcaaagggtggaggctcttgtccccaagcagctgc

SEQ ID NO: 404294 - DNA, 658 bp, Homo sapiens
cacccatgcacgggagtcccttttccccctacctccgtgcaggtcctgagctggaaagcccaggagcccagggctgatggggacctgttgcaggcgagggcgacatgaagatgcactgctgcgtggccgcctatatctccgactatgccttcttgggcactgcactgctgcctcaccagtggcagcacaaggtgcacttcatggtctcactggaccattccatgtggttccacgcccccttccgagctgaccactggatgctctatgaatgcgagagcccctgggccggtgagtgtggggccgtgtgggacaagggcactgaccttgagtggcaggagcctgctttcttgggtgatgctgatttcccgacttcctgtgtggcgctgcacaggtcacttcctttccttccctcccaggctttggcatcttcatcttcaaaatgagagggtgaggccgggacacctgctctgctctaaatttctagaatgtgctggaaatgtgattcaccttctcccagggacccagttctagtcccaaaaccagttcagattctttgtattacaataggcaaatcatatcttccatctgaacctcagtttcctcatctaaacaaagagggttacattacagcagtggtatccaaacccgcagtccatca

SEQ ID NO: 404295 - DNA, 1441 bp, Homo sapiens
ttccggttactagggcaatctgccggaagagtcaggttctgtgtatgtctccgcgtcttccgcggagcgggtgtgcagggcctgcagcattgaactagatgtcgtccccgcaggccccagaagatgggcagggctgtggcgaccgcggcgatccccctggggacctccgtagcgtcttggtcacgaccgtgctcaacctcgagccgctggacgaggatctcttcaggtagccggcagctcctgcccagcatcccctcctttagggcagaaacttgatcttgactgccgccgcccggggcccctggctccgggactagtatggctctgcgtgggatgcaccctctgccacgattaggagagaactcgcccccaacagagctgtcctctctgctctggcttcctcccttcctctccgcgctgcgaggtctgcacagctgagcaaatatagtggtgacctgagagaccctgctcggcagcctgccctaagccttcacgggggagctagcccagagagggcagtgatttgcccaagggcacacagctgatggatcagccttaaaaccgacgccgcagctccttgtgtcttcagtatccttttcttctcacaatatcccgcccccagtaccatttggggacccgaagctgccagtactgtaccaagtggagcggacacgaacagggtcgagcttctcggtgcgctctgtgaaggccgtgcaacatgggaagcccatcttcatctgccaggcctccttccagcaggcccagcccagccccatgcagcaccagttctccatgcccactgtgccaccaccagaagagctgcttgactgtgagaccctcattgaccagtatttaagggaccctaacctccaaaagaggtacccattggcgctcaaccgaattgctgctcaggaggtccccattgagatcaagccagtaaacccatcccccctgagccagctgcagagaatggagcccaaacagatgttctgggtgcgagcccggggctatattggcgagggcgacatgaagatgcactgctgcgtggccgcctatatctccgactatgccttcttgggcactgcactgctgcctcaccagtggcagcacaaggtgcacttcatggtctcactggaccattccatgtggttccacgcccccttccgagctgaccactggatgctctatgaatgcgagagcccctgggccggtggctctcgggggctggtccatgggcggctgtggcgtcaggatggagtcctagctgtgacctgtgcccaggagggcgtgatccgagtgaagccccaggtctcagagagcaagctgtagccagaggtaccagcttcgcctggggcttcaagaacctcccatctatccccattcctgagacaggagttacagtcccttttggccctcacatccaataaagagactgatacca

SEQ ID NO: 404296 - DNA, 1232 bp, Homo sapiens
ttccggttactagggcaatctgccggaagagtcaggttctgtgtatgtctccgcgtcttccgcggagcgggtgtgcagggcctgcagcattgaactagatgtcgtccccgcaggccccagaagatgggcagggctgtggcgaccgcggcgatccccctggggacctccgtagcgtcttggtcacgaccgtgctcaacctcgagccgctggacgaggatctcttcagaggaaggcattactgggtaccggccaagaggctgtttggtggtcagatcgtgggccaggccctggtggctgcagccaagtctgtgagtgaagacgtccacgtgcactccctgcactgctactttgttcgggcagagcagatgccctcatgtgttctgcgtagatccccagctgagaagagtttgtggacctttacagggacccgaagctgccagtactgtaccaagtggagcggacacgaacagggtcgagcttctcggtgcgctctgtgaaggccgtgcaacatgggaagcccatcttcatctgccaggcctccttccagcaggcccagcccagccccatgcagcaccagttctccatgcccactgtgccaccaccagaagagctgcttgactgtgagaccctcattgaccagtatttaagggaccctaacctccaaaagaggtacccattggcgctcaaccgaattgctgctcaggaggtccccattgagatcaagccagtaaacccatcccccctgagccagctgcagagaatggagcccaaacagatgttctgggtgcgagcccggggctatattggcgagggcgacatgaagatgcactgctgcgtggccgcctatatctccgactatgccttcttgggcactgcactgctgcctcaccagtggcagcacaaggtgcacttcatggtctcactggaccattccatgtggttccacgcccccttccgagctgaccactggatgctctatgaatgcgagagcccctgggccggtggctctcgggggctggtccatgggcggctgtggcgtcaggatggagtcctagctgtgacctgtgcccaggagggcgtgatccgagtgaagccccaggtctcagagagcaagctgtagccagaggtaccagcttcgcctggggcttcaagaacctcccatctatccccattcctgagacaggagttacagtcccttttggccctcacatccaataaagagactgatacca

SEQ ID NO: 404297 - DNA, 1360 bp, Homo sapiens
ttccggttactagggcaatctgccggaagagtcaggttctgtgtatgtctccgcgtcttccgcggagcgggtgtgcagggcctgcagcattgaactagatgtcgtccccgcaggccccagaagatgggcagggctgtggcgaccgcggcgatccccctggggacctccgtagcgtcttggtcacgaccgtgctcaacctcgagccgctggacgaggatctcttcagaggaaggcattactgggtaccggccaagaggctgtttggtggtcagatcgtgggccaggccctggtggctgcagccaagtctgtgagtgaagacgtccacgtgcactccctgcactgctactttgttcgggcaggggacccgaagctgccagtactgtaccaagtggagcggacacgaacagggtcgagcttctcggtgcgctctgtgaaggccgtgcaacatgggaagcccatcttcatctgccaggcctccttccagcaggcccagcccagccccatgcagcaccagttctccatgcccactgtgccaccaccagaagagctgcttgactgtgagaccctcattgaccagtatttaagggaccctaacctccaaaagaggtacccattggcgctcaaccgaattgctgctcaggaggtccccattgagatcaagccagtaaacccatcccccctgagccagctgcagagaatggagcccaaacagatgttctgggtgcgagcccggggctatattggtcctgagctggaaagcccaggagcccagggctgatggggacctgttgcaggcgagggcgacatgaagatgcactgctgcgtggccgcctatatctccgactatgccttcttgggcactgcactgctgcctcaccagtggcagcacaaggtgcacttcatggtctcactggaccattccatgtggttccacgcccccttccgagctgaccactggatgctctatgaatgcgagagcccctgggccggtgagtgtggggccgtgtgggacaagggcactgaccttgagtggcaggagcctgctttcttgggtgatgctgatttcccgacttcctgtgtggcgctgcacaggtcacttcctttccttccctcccaggctttggcatcttcatcttcaaaatgagagggtgaggccgggacacctgctctgctctaaatttctagaatgtgctggaaatgtgattcaccttctcccagggacccagttctagtcccaaaaccagttcagattctttgtattacaataggcaaatcatatcttccatctgaacctcagtttcctcatctaaacaaagagggttacattacagcagtggtatccaaacccgcagtccatca

SEQ ID NO: 404298 - DNA, 1492 bp, Homo sapiens
ttccggttactagggcaatctgccggaagagtcaggttctgtgtatgtctccgcgtcttccgcggagcgggtgtgcagggcctgcagcattgaactagatgtcgtccccgcaggccccagaagatgggcagggctgtggcgaccgcggcgatccccctggggacctccgtagcgtcttggtcacgaccgtgctcaacctcgagccgctggacgaggatctcttcaggtagccggcagctcctgcccagcatcccctcctttagggcagaaacttgatcttgactgccgccgcccggggcccctggctccgggactagtatggctctgcgtgggatgcaccctctgccacgattaggagagaactcgcccccaacagagctgtcctctctgctctggcttcctcccttcctctccgcgctgcgaggtctgcacagctgagcaaatatagtggtgacctgagagaccctgctcggcagcctgccctaagccttcacgggggagctagcccagagagggcagtgatttgcccaagggcacacagctgatggatcagccttaaaaccgacgccgcagctccttgtgtcttcagtatccttttcttctcacaatatcccgcccccagtaccatttggggacccgaagctgccagtactgtaccaagtggagcggacacgaacagggtcgagcttctcggtgcgctctgtgaaggccgtgcaacatgggaagcccatcttcatctgccaggcctccttccagcaggcccagcccagccccatgcagcaccagttctccatgcccactgtgccaccaccagaagagctgcttgactgtgagaccctcattgaccagtatttaagggaccctaacctccaaaagaggtacccattggcgctcaaccgaattgctgctcaggaggtccccattgagatcaagccagtaaacccatcccccctgagccagctgcagagaatggagcccaaacagatgttctgggtgcgagcccggggctatattggtcctgagctggaaagcccaggagcccagggctgatggggacctgttgcaggcgagggcgacatgaagatgcactgctgcgtggccgcctatatctccgactatgccttcttgggcactgcactgctgcctcaccagtggcagcacaaggtgcacttcatggtctcactggaccattccatgtggttccacgcccccttccgagctgaccactggatgctctatgaatgcgagagcccctgggccggtggctctcgggggctggtccatgggcggctgtggcgtcaggatggagtcctagctgtgacctgtgcccaggagggcgtgatccgagtgaagccccaggtctcagagagcaagctgtagccagaggtaccagcttcgcctggggcttcaagaacctcccatctatccccattcctgagacaggagttacagtcccttttggccctcacatccaataaagagactgatacca

SEQ ID NO: 404299 - DNA, 535 bp, Homo sapiens
ttgtctaccttgctgatttctctggtatacagggaaaataagccattgaaaacagtttgatacaagttgctgtgctaagatagcagatttgtttgagaggctgcgtagaccacctctattcagcctagtctcccccagtctatgttaaaagataaatatgcagctaatttagttcagcccaggttcatactataatttcagtggttactgccctaccccatttggaggaagaaaggataagagaaaaatatgtgtatctaagacttctcgagtttatataatgagtcagttatgcccatgtaatagctaggttgtatacatcaacacgggagtggaacatgtatgcaccagaataatgtttctcctttcagagtgagctttcttgcctgttaacaagtaatgtatttttattgattcgtgtaaatatcaagtgtttaaaattcatgtcacatacttctgaatatgacatattactaaatgctacagttactttttgtcaaaatgtttttaataaaagtgttaaataacaaaaaaa

SEQ ID NO: 404300 - DNA, 275 bp, Homo sapiens
gcggaagtgcattgatccctcagcccgtggagaaagagcggaggcgctgtgcggttttccgtgggggtgtcagctccggcccgtgccggaagaaggagccaagaccgggatcgcttttttgccccttcctcaccccacattcggtcacgaagaggtggaaacaaaaggacacttacaatgtagtccaacctcctgattttacatatgaggggattgttccacggaagttaaacaatttgccagacgtcattatgtatctactgagtgagagaatc

SEQ ID NO: 404301 - DNA, 463 bp, Homo sapiens
ctataggaactgtggcataaggaatcttgttctaagctactgtcttttggtgtcatttgttatccagccatggataactgatagacttcttcatccacatctgctacctgtagtcaaccaaagcagttttatacaaaggtactattttctggctttttattccaaccagatttcacaatttttttgagtgtgggtgtagaggatggtgaaatatccatggaatagaagattgttgaataagaaagtcagaggtagcaaggaaaatgtgtatttagttcaaaaaaatcctatcaacctagttgtatgtgttgataataaagatctctctgtctttcccagcaattcggatcaaccttgttaaggttgaacagagacagacccaggtgtttgaatggttcatatttgtgttttactcctaagggtgaagcacctgtaatttttagggcttaagatatcatcaaga

SEQ ID NO: 404302 - DNA, 468 bp, Homo sapiens
cacccttgagtgaaccaggtacaagcagcctccacccaggcattttcttaatgtccacaaaggctcgctgacttcaagttagctatttgtgtcctttaacttgttgccacaatttaaaaccaggtgagcattttctgcacagagtggtcataagcagtgtctgttctgctgtgctcggcctctttgtcacctgttccatatttgggcatgaagcactaggcccatatgccttcaccattttgcaatgttgttctgggacagagttatagggtttttgccttgaacaaagcatctacattcttcattcttagggagtgacagttccattgccaatatgtggatatcagttttcttcaagcttgtgtaccactcgtatccactgctgttcagttgcataatctctaagattaaaaactacattttggtaatgctggcaacgagggcacaaggaaataaattgtctgtttt

SEQ ID NO: 404303 - DNA, 422 bp, Homo sapiens
aaaaaaaaaaaaaaaaaaaaaaaacaattaggaaagggtaggtatgagtaaaacaggtgaaaggtggggaaagtgtgccaaatgggaagacaggctctcaatgtagtccatagtttgacttgtggcttggctttctggctttaaactgaaaaagcctggaggttttggcttggagttggggtttcactggggacctgcccctatctgcctaggcgtttgtctgcctcttgctgctatcacatagattgtggagaaatcacataataataaagttaagagaagatataatcagagaaacaagctgcaatgtattttaccacctccaacaaaaattacctgctaaaagtggccgggcacagtggctcaggcctgtaatcccagcactttgggaggcaaaggcaggtatcacttgaggtcaggag

SEQ ID NO: 404304 - DNA, 2263 bp, Homo sapiens
cggggacaccacgccagtgctttcctgccttccttccgagatggaaagaggagctcctagctcacttaagccggggtagggctggttctcctttccgagccaaaatcccaggcgatggtgaattatgaacgtgccacaccatgaagctcttgtggcaggtaactgtgcaccaccacacctggaatgccatcctgctcccgttcgtctacctcacggcgcaagtgtggattctgtgtgcagccatcgctgctgccgcctcagccgggccccagaactgcccctccgtctgctcgtgcagtaaccagttcagcaaggtggtgtgcacgcgccggggcctctccgaggtcccgcagggtattccctcgaacacccggtacctcaacctcatggagaacaacatccagatgatccaggccgacaccttccgccacctccaccacctggaggtcctgcagttgggcaggaactccatccggcagattgaggtgggggccttcaacggcctggccagcctcaacaccctggagctgttcgacaactggctgacagtcatccctagcggggcctttgaatacctgtccaagctgcgggagctctggcttcgcaacaaccccatcgaaagcatcccctcttacgccttcaaccgggtgccctccctcatgcgcctggacttgggggagctcaagaagctggagtatatctctgagggagcttttgaggggctgttcaacctcaagtatctgaacttgggcatgtgcaacattaaagacatgcccaatctcacccccctggtggggctggaggagctggagatgtcagggaaccacttccctgagatcaggcctggctccttccatggcctgagctccctcaagaagctctgggtcatgaactcacaggtcagcctgattgagcggaatgcttttgacgggctggcttcacttgtggaactcaacttggcccacaataacctctcttctttgccccatgacctctttaccccgctgaggtacctggtggagttgcatctacaccacaacccttggaactgtgattgtgacattctgtggctagcctggtggcttcgagagtatatacccaccaattccacctgctgtggccgctgtcatgctcccatgcacatgcgaggccgctacctcgtggaggtggaccaggcctccttccagtgctctgcccccttcatcatggacgcacctcgagacctcaacatttctgagggtcggatggcagaacttaagtgtcggactccccctatgtcctccgtgaagtggttgctgcccaatgggacagtgctcagccacgcctcccgccacccaaggatctctgtcctcaacgacggcaccttgaacttttcccacgtgctgctttcagacactggggtgtacacatgcatggtgaccaatgttgcaggcaactccaacgcctcggcctacctcaatgtgagcacggctgagcttaacacctccaactacagcttcttcaccacagtaacagtggagaccacggagatctcgcctgaggacacaacgcgaaagtacaagcctgttcctaccacgtccactggttaccagccggcatataccacctctaccacggtgctcattcagactacccgtgtgcccaagcaggtggcagtacccgcgacagacaccactgacaagatgcagaccagcctggatgaagtcatgaagaccaccaagatcatcattggctgctttgtggcagtgactctgctagctgccgccatgttgattgtcttctataaacttcgtaagcggcaccagcagcggagtacagtcacagccgcccggactgttgagataatccaggtggacgaagacatcccagcagcaacatccgcagcagcaacagcagctccgtccggtgtatcaggtgagggggcagtagtgctgcccacaattcatgaccatattaactacaacacctacaaaccagcacatggggcccactggacagaaaacagcctggggaactctctgcaccccacagtcaccactatctctgaaccttatataattcagacccataccaaggacaaggtacaggaaactcaaatatgactcccctcccccaaaaaacttataaaatgcaatagaatgcacacaaagacagcaacttttgtacagagtggggagagactttttcttgtatatgcttatatattaagtctatgggctggttaaaaaaaacagattatattaaaatttaaagacaaaaagtc

SEQ ID NO: 404305 - DNA, 2985 bp, Homo sapiens
cggggacaccacgccagtgctttcctgccttccttccgagatggaaagaggagctcctagctcacttaagccggggtagggctggttctcctttccgagccaaaatcccaggcgatggtgaattatgaacgtgccacaccatgaagctcttgtggcaggtaactgtgcaccaccacacctggaatgccatcctgctcccgttcgtctacctcacggcgcaagtgtggattctgtgtgcagccatcgctgctgccgcctcagccgggccccagaactgcccctccgtctgctcgtgcagtaaccagttcagcaaggtggtgtgcacgcgccggggcctctccgaggtcccgcagggtattccctcgaacacccggtacctcaacctcatggagaacaacatccagatgatccaggccgacaccttccgccacctccaccacctggaggtcctgcagttgggcaggaactccatccggcagattgaggtgggggccttcaacggcctggccagcctcaacaccctggagctgttcgacaactggctgacagtcatccctagcggggcctttgaatacctgtccaagctgcgggagctctggcttcgcaacaaccccatcgaaagcatcccctcttacgccttcaaccgggtgccctccctcatgcgcctggacttgggggagctcaagaagctggagtatatctctgagggagcttttgaggggctgttcaacctcaagtatctgaacttgggcatgtgcaacattaaagacatgcccaatctcacccccctggtggggctggaggagctggagatgtcagggaaccacttccctgagatcaggcctggctccttccatggcctgagctccctcaagaagctctgggtcatgaactcacaggtcagcctgattgagcggaatgcttttgacgggctggcttcacttgtggaactcaacttggcccacaataacctctcttctttgccccatgacctctttaccccgctgaggtacctggtggagttgcatctacaccacaacccttggaactgtgattgtgacattctgtggctagcctggtggcttcgagagtatatacccaccaattccacctgctgtggccgctgtcatgctcccatgcacatgcgaggccgctacctcgtggaggtggaccaggcctccttccagtgctctgcccccttcatcatggacgcacctcgagacctcaacatttctgagggtcggatggcagaacttaagtgtcggactccccctatgtcctccgtgaagtggttgctgcccaatgggacagtgctcagccacgcctcccgccacccaaggatctctgtcctcaacgacggcaccttgaacttttcccacgtgctgctttcagacactggggtgtacacatgcatggtgaccaatgttgcaggcaactccaacgcctcggcctacctcaatgtgagcacggctgagcttaacacctccaactacagcttcttcaccacagtaacagtggagaccacggagatctcgcctgaggacacaacgcgaaagtacaagcctgttcctaccacgtccactggttaccagccggcatataccacctctaccacggtgctcattcagactacccgtgtgcccaagcaggtggcagtacccgcgacagacaccactgacaagatgcagaccagcctggatgaagtcatgaagaccaccaagatcatcattggctgctttgtggcagtgactctgctagctgccgccatgttgattgtcttctataaacttcgtaagcggcaccagcagcggagtacagtcacagccgcccggactgttgagataatccaggtggacgaagacatcccagcagcaacatccgcagcagcaacagcagctccgtccggtgtatcaggtgagggggcagtagtgctgcccacaattcatgaccatattaactacaacacctacaaaccagcacatggggcccactggacagaaaacagcctggggaactctctgcaccccacagtcaccactatctctgaaccttatataattcagacccataccaaggacaaggtacaggaaactcaaatatgactcccctcccccaaaaaacttataaaatgcaatagaatgcacacaaagacagcaacttttgtacagagtggggagagactttttcttgtatatgcttatatattaagtctatgggctggttaaaaaaaacagattatattaaaatttaaagacaaaaagtcaaaacaaaaatattttctaacttgtaagttctatttaaagggggtgggggggaatcttgggaacgttgtggggtacaagccacaagttaacttgctatgctgccagaagggatttctggtataaggttgaaattgctgagataaaataaactaaaacaacaaacatccttaaagaggtagggtgtgggctgctgagggggcaagagggatagactgaatctgtcattttttagaagatgcttcataggacacaggactatccatttctacagacatctttcttaagccgagagctgtctttgcagaattatcttattaaaaaaaaatacaaaaaaaaagcaccatgaatttgtactgtgccaaaatgatagtggcaataatatttttcttcagaggctaaggggaagatagacctgtacatgtattttaagcaggaaaaccaccaaaattcaaacgaacccttaaaggggctgagtctttgtccatgtgcacaagtcttgggggtctgtgcactggacacacatgtgccttgcctgacagaattgcttagaaaggagcagagaaggacgggagctggcgtagctctcagtctaatgctttcacattgcaccagattcctgcagttgggcttaacccactctgcaaggcatgtgtctattcagggtttcccaggaggaggaggcccctgaaggggtgcggcagcaggggggtgggaagggagg

SEQ ID NO: 404306 - DNA, 664 bp, Homo sapiens
tgaacgatactgagctcattcgctacgttaccatcaccaactgcagtccgttggttgtgaagtttcgctggttcttcttggtgaatgatgaggaaaatcagataaggtacccccagcacagaactctcacagaactctgcttttcatttgttttctctttcaggcttttcatggggttttctgtattccatgtactggccattcatgaatattttccattttgaccactaattattgacagaattaacaaggagcttaaaatcacgatccatcctcgatttcctaacaggaaacatagataaaacatctttgaaagtcccaatcaccaccgaattaacaaagcaatatccataagcccactttatttttgagtctagtgataagaccattagaaattcatcactaaaaaataaagtctttgtagaattgtttaaattattattttattgtggtaatatatatacaacttaacaaatttttaagtgtacaatacagtattattgactataagtaaaccagatttctagaacttatcttgctgcactgaaactttatgcctgttgcccattctcctttctccccagcccccgcaaccaccattctactctttgattttattaatttaactattttaactacctcatataagtggaatcatgcagta

SEQ ID NO: 404307 - DNA, 452 bp, Homo sapiens
tgaacgatactgagctcattcgctacgttaccatcaccaactgcagtccgttggttgtgaagtttcgctggttcttcttggtgaatgatgaggaaaatcagataaggtacccccagcacagaactctcacagaactctgcttttcatttgttttctctttcaggcttttcatggggttttctgtattccatgtactggccattcatgaatattttccattttgaccactaattattgacagaattaacaaggagcttaaaatcacgatccatcctcgatttcctaacaggaaacatagataaaacatctttgaaagtcccaatcaccaccgaattaacaaagcaatatccataagcccactttatttttgagtctagtgataagaccacaataaaataataatttaaacaattctacaaagactttattgtggtaatatatatacaacttaa

SEQ ID NO: 404308 - DNA, 310 bp, Homo sapiens
aaaaatcaaaatccgcctcagaaaaaagcaaaacacatggcacttacattctgccaacattcctactgccttatactttttcagtctgcactcttgacattttctacgcatgtacatgtccatttcacagtgactaccattcctgcaactatatactgcattttgttgatgctacattgaaaaaaacccaataaaaaagttttaaaattttttaccataggtatttctagttaattatttttattaatatatgccttcatattaatcacgttaactaaattatttcaataaaatgttttttctctcaata

SEQ ID NO: 404309 - DNA, 482 bp, Homo sapiens
aataggtgggaaattctgcttttcattcagactttcatttagaattttaagtaatagagtcaggattatgctatgttgcttgggttgctctctaattgtttgtctcaagcagtcctcccagctcagcctcccaaagtgctgggattcgaggcatgagccaccatgcccagacaaggtttgtctccttataaagaattattcattgctgggcacagtggctcacatctgtaatcccaacaatttgggaggccaaggcaggaggatcacttgagcccaggagctcaagaccagccacagcaacatgacgattccctctctctacaaaaaatacaaaaaattagctggatgtggtggcacataccatatccaggaggctgaggcagaaggagaaccaaagcctgggaggttgatgctgcagtgagctgtgattgtgcccctgcactccagcctgggtaattgagtgagggcctttgttaaaaaac

SEQ ID NO: 404310 - DNA, 475 bp, Homo sapiens
ttttactgttttttcatgagaattgaagcagggaaatatttggctaggcaatgttacaaaagaaaaccagtcgttgggttattgttggagcagaaattccctgaagtcccataggaagccttccacaattgggccatgcagcaggatcactacgagagccctgtcaaaatgcactttcatcatttctacctgccactcctgcagaagtgtcgaattaacgtccagaggtggggcttgagcacctgtgacttccccaggctcccttttgggcagccctgacccatccttccaggtgctgggggtccctgcacacaaccctgtagctcccatgtagtacctgacacttggtcgttcttttggttttttttgagacagtcttccgctctgtcgcccaggctggaggttacagtgagccgagatcatcccactgcacttcagcccgggtgacagagggagactgtctcaaaaaaaaaaa

SEQ ID NO: 404311 - DNA, 681 bp, Homo sapiens
aaggacactgcccccgtgctagagggcttgaaggaggaagagatgactaaggaggagatcagcatcctcagcaatgcctgctctaagctgcaggaacagaagaagtcactcaccaggaagaaggaggagctggagctgtggcagggccggttctcacctgcagttttccttgtgtatcggagctctttcttaactttctattttcccccaattctttaagcagtcgattggcacagagttttcccacggggggctgcagtggatttactgtgtcagggatgagcctggctcgggttggtggggctctgaagcacatttggggttctttgtagcttctaatgtgaggtttgagtccagtgcacccacagcagcatacccttctcaccccttgtggtgttgcaggctcaggcccctggggtcctttaacaacataggatttggaagacataggaatggcacaggcagccaggaaagcagctgcgctcagacgatgccttctccattacttgaagcttctttttgttcagccattaaagaaacttgacaaaataggaacaggagatatttctcaattgtaaacctttgtgcagggacagttggcttccagaggctttcagctttcagttatttgagaaagaagtttgttttagatccttaatatttatgaattctcaaaaaaaa

SEQ ID NO: 404312 - DNA, 707 bp, Homo sapiens
aaggacactgcccccgtgctagagggcttgaaggaggaagagatgactaaggaggagatcagcatcctcagcaatgcctgctctaagctgcaggaacagaagaagtcactcaccaggaagaaggaggagctggagctgtggcagggccggttctcacctgcagttttccttgtgtatcggagctctttcttaactttctattttcccccaattctttaagcagtcgattggcacagagttttcccacggggggctgcagtggatttactgtgtcagggatgagcctggctcgggttggtggggctctgaagcacatttggggttctttgtagcttctaatgtgaggtttgagtccagtgcacccacagcagcatacccttctcaccccttgtggtgttgcaggctcaggcccctggggtcctttaacaacataggatttggaagacataggaatggcacaggcagccaggaaagcagctgcgctcagacgatgccttctccattacttgaagcttctttttgttcagccattaaagaaacttgacaaaataggaacaggagatatttctcaattgtaaacctttgtgcagggacagttggcttccagaggctttcagctttcagttatttgagaagtttgtttcacctacaggagtgggcacctggcacagtgagatcctccttgggtggccagtgaactgcttcag

SEQ ID NO: 404313 - DNA, 330 bp, Homo sapiens
gagcttgtgatccacctgccttggcctcccaaagtgctgcgattataggcatgagccaaaaatttttaaaaatttttgtagagagaagctctcactatgtttcccaggctggtcgtgaactcttggcctcaagcaatgctccctcctcggcctctggaagcactgggactggcctgtttttgcatttttaaagtttggatgaaaatgctttgtgacatcaaacttttttgtgaactacagattaattgactaactagaattatgctatcagttgaggtctgtagtaagttgagtgtcatttaattggtaaaattgtcagttagtttttat

SEQ ID NO: 404314 - DNA, 462 bp, Homo sapiens
aaagttttaaaaaagattcacgggtagaattgtgctataaatccagcccatagtggagtaagttagagtgagcttctacgatagtatggtaaactgagaataatactgggagatggaatgttatcttggcttatatggtttcagtaaggaaattttaaaggaatctgagtgaggttatactaaggggtaattaatgaagtatctgtcctctctatgatatagagaattggtaaaacttttatcaaagcaagccattgaacctctcctttcacatttgctctttggttgccatttatatttgagtgcttaacactcatagtcatttatttctaaattgtccatttacctattctttgattaaagtataaataatagtgcttatttaataggttttcaaattaataatttgtgtgactatatattactcttatggtaaataggtatttaataaaaatacttaat

SEQ ID NO: 404315 - DNA, 382 bp, Homo sapiens
ttttgagaaaaaatcttattcttgttttgttctcttttgctagtacaatacgttgtataatgtaggcattcaataaataattactcaattgagttatgatttgtaagaaacctatcataaactagatgttaatatatgaatgcattttcagaaattatgttaaatgttaatttatgtaaaattcaagccactttcatatttccttctgagtaactggaaaatataaaaagaaaataataaacttaggaatctgatataggcacacaataaatatttattaaataaatgaatgaataagttagtgaccaaatgaatacattttcttactctcatttaggttgcctttttctagggaatattatctatgcttctgttgagtagt

SEQ ID NO: 404316 - DNA, 540 bp, Homo sapiens
cttgagacctgccacctagaagggtcagagtgatactcagcctttctagttagtacctgtatttcattaggtctgggttgtcatttaaaaaactctccaagtgagcaaagcaggatactgttgctctccagatatttgaagggtatttggggataggaacacacttgttctggaatgtaatgtttcagctgccagagctaggaacatttgagggaaaggcaggaggaggcaggtttttattcaggataagaaggaaggtgggttgaggaagaagggtaacattttttatcatttgtattgcataaaatacataaagctttcacagtaaccctggaagatagcatttcgatgaggaaactgagattcagagatgttagtgacttacgtaagatcccacagtttattagttaataacaggcatttgaacctagttcagtctggtgacacaaaagtaattatgtaatgctgcctctctcattggtaagtacctgctatagaatgtgctgtctgcctaacacccttagtttatttaaaaaaaaa

SEQ ID NO: 404317 - DNA, 445 bp, Homo sapiens
tatgttgaagatcagttgtcttgattctacctgtgtacatcctgcttatttctgcggtttttactttatagcatactccaccaatcctttttaaggaaaaagcaaaatcctattatgggaatgcttcaaaccactctgagcttccagattaatctgaaacagcatctgagttcacaactgggtcagagttgcagaatagcaagagaaacttgccagttcagcaggcgtgtgtcttgggttagttaagacagcaggacagtcctgaggcctgacttccttgcatgtgtttcaaccttgggtgctgagataattctgggtggctttagataactttgtttcttaactgaaaaaggagtgtctgttgcctgataagtgtttatccgtgaaatagcaacatggtgtgcatcttagggtaggagggcttttagatctccagagaccagga

SEQ ID NO: 404318 - DNA, 217 bp, Homo sapiens
atgggatttctccgtgttggtcaggctggtcttgaactcccaacctcaggtaatctgcctgccttggcctcccaaagtgctgggattacagggtgagccaccacgcctggcctggaacttcttaaatataaagaatatctacaaaaactatagcaaatgtcatactcgatagtaaaatattaaacactttcctattgagttggagaatgttacaaga

SEQ ID NO: 404319 - DNA, 420 bp, Homo sapiens
cgcgatcggaaggtggcgccacgcggcccctacaggcctgggactcccacccgagctcgcaaagtaggtcggggtctgaagctgggggcctagagcaactagcttcttggaaagcgactgcaattatttggggtaatatactctgttccagagacgtccaccccccacctcccacaaaaaaaaaccctgcacttaatttaaatgttacgttatatatacatcccatcatatacatatattcacacataatcactatgtaacagtccaggaagaaatttaatatttgggtaaattacatattcacacatcttcacataagtaaaaccagggtatccagacaaaaaaacaatctactaacctatatctgtttcccataggtcatatctggtctgggggtaaataaatacttctgacctcact

SEQ ID NO: 404320 - DNA, 646 bp, Homo sapiens
ggggtttcaccatgttagccaggatggtctcgatctcctgacctcatgatccacccgcctcagccttccaaagtgctgggattacaggagtgagccaccgcgcccggccttttagcttatcttgaaatccaccagcctaccttctgttcatggcacgagcagtgatttcagtgaaaccatcataaacattcttgttccactagacgctgatcacagcagtgatgtttctgtgttaacaccctgtactgtccctcgagtactgtacctttgtgcttgcacacgtgtcactaacgcacgtgttaccagagtctcacgaccctacggtgctatttttattggtgcaaaattaaaccctctcagctgaccgttgctggataggatcagaatgcaggaaaagagcctctatggcaatacgattgtccttttttcgtttcagagtcaaatgtatctattttccattcgttaacttgcattacatactgtacccatggaatttttgttttactttttggggctggttttgaaaggaaaaaaaacggaagacaaacattggacgccattatacatgaaaattatatagaaaaattaatcatttcattggaagcaagttgaatatgtgtaataaaatgtttttccataacagttt

SEQ ID NO: 404321 - DNA, 240 bp, Homo sapiens
agtactcaaggaaactgcatgttaagatgtggtaattaaagtattaaaatattctaagggtcccttgcactctccctttctgtgcccattgtgacagcatggtcacatcattgcttgaggcatgcaagagtgctttattgaagatagtattacggggggagattttattttgatagagagtaacaaatagactaataatctatcttaaagtaagtatcttaaagtcagtaggcaaaggag

SEQ ID NO: 404322 - DNA, 460 bp, Homo sapiens
tagttcagtgtctgcccagttggccgcccagttttgtgcttgaaacccagggccctggtggggtagtcaccagagggaatctcctggtttgcaggttgtgaagaccatggaacaagtgcagtatatgtgcccaagttcctcaggctgagaccctcacagcttcccttgggtcagggggaaaatttcccgattccttgcgcttcccaggtgaggtgacaccccaccctgcttccgctcagcctctgtgggctgcacccactgtccaacctgccccggtgagatgaaccaggtacctcagttggaaatgcagaaatcacccaccgtctgcatcgatctcgctgggacctgcagactggtgctgttcctattcggccatcttgaacctctctcctgatccctgagttttcagagagactgatttgagtaataataaaactctggtctcctgctcagccagctc

SEQ ID NO: 404323 - DNA, 484 bp, Homo sapiens
atgcaacaacctgtgaagtaggaactattatctccactttgaatgaggtactgagtttcagaggctcagcaacttgcccaaggtcattcttctggtaaatggtgttgctggcattccatcccagttcattctgtctactggaggccatatttataatcactcactcccctatcgtgcctcctaggcttcccacgtggcattcataccactccacaatgcatggaccagtctaggctcccactgaatttcttatcctatggcaataaggcatgctttccagcccagggtaaaagagctttttctctatttgtgtttctgcattgttaagcctgttgtcatacacacagttgctcctcagtagcttatttcttgactcattctaaacatatggtaaacttctaaagttaaaaaaagttagtgttatattgagatgaaatatctgtgattaaaaaaatgaacatcatgtcacaatataaaaaagaaa

SEQ ID NO: 404324 - DNA, 231 bp, Homo sapiens
atgcaactttctgtgggttagctaaatctttagtgtgtcaggtagtcgaaagaaatttgctgtatagtgctgtgaaatatgctgcatccatgagccctctgctctttgcccatagggagcaaagacacaatctttttgcaagctgtcccagtgccatattgaccatcttccttttacagcaaaaagttattgcttcctttggttaaggttgggacacccctctggaggcac

SEQ ID NO: 404325 - DNA, 637 bp, Homo sapiens
aacaaacaaacaaaacagatccatttgtctctctttttgggtaatgaattaagagttctgaacataatagagtgcgtggtttcccgtgcttctttgccttaaaacctatgtccttcagtcccttctgcatttaatataatgtgcattctttgcatgcttaccaagtagaaattttttgcttaggatggagcgatagtgagtttaaaactatctatagagttatagaaagcttagcattctttcccacaaggggaatttattagaaagctaaatgtctttggtaaaacaccaaaatcttacatacagatgcttctcactcttacacagagagttccactgagaaggcagaagaataaggtgcccatagtcatttaggagtcatttcaaatggtgctctatagtcttcagtgccaccatgctgggagggctgaccctcttttcagtcaggtcttttcccttacctgttttctgcttgggttccaaataggatttttgtctagagggtgaaaaagaaggcatcctacttaaggcctgaaaagcacacttcagagaattttatttgactcaatgaatgatgcttttctgactgagcaccttcttggtgccaaaagcactatattagccactagggacacaa

SEQ ID NO: 404326 - DNA, 464 bp, Homo sapiens
ttcaaagactgttaaagcattcctattttgataaatccaaaggaagcgccttctttacatggaaaataaattgttgctgaattggaaaattactaggcaatttagtgatgataattttagtgatgatatgggatgcaaggctggttcaacatacacaaatcaataaatgtaatccatcacatacacagaaccaatgacaaaaaccacatgttatctcaatagatgcagaaaaggccttcgataaaattaaacactgcttcatgctaaaaactctcaataaactaggtattgatggaatgtatctcaaaataataagagttatttatgacagacccacagccaatatcatactgaatgggcaaaagctggaaacattccctttgaaaactggcacaagacaaggatgccctctctcaccactcctattcaacatagtgttggaaattgtagccagggcaatcaga

SEQ ID NO: 404327 - DNA, 449 bp, Homo sapiens
aagagcagtaggtcaccatgacttcaccttccaggagaagcgccctgttggctctgaagcttgctagaaaaaagaaaggaaggaacaaattatagagaagcattttactatggtccaaatatttgtttcagccagattaaattttatgttagaagtacacatttatggctgggcgcagtggctcatgcttgtaatccaagcactttgggaggccgaggtgggtggatcacctgaggtcggtagttcaagaccagcctgaccaacatggagaaaccctgtctctactaaaaatacaaaattagcccagcgtggtggcacatgcctataatcccagctactcgggaaggctgaggcagcagagtcgcttgaacctgggaggcggaggttgtggtgagtcgagattgcgccattgcactccagcctgggcaacaagagcgaaactccgtgtc

SEQ ID NO: 404328 - DNA, 692 bp, Homo sapiens
ggcggatcacgaggtcaggagatcgaggccatcctggctaacacagtgaaaccctgtctctactaaaaatacaaaaaattagccggtcctggcgtcaggcactacttaggaggctgaggcaggagaatggcgcgaacccgggaggcggagcttgcagtgagctaagatcccactactgcactctagcctgggcaacagtgcgagactccgtctcaaaaaaaaaaagggatgtttcagaaagataaaagggtcaagtaaacaacgaaggtactggaatcagaccttcaaaatagataaaaacaaaatttgacgggattaaaggatctcctcatcatagagaagtccacaaccataattggaagtttgaatacctgtctcaataattgacagaagtagtagattaaaactaccagtaaggacatagaagatcagagtaatactgtatgtaataccacccaccttgacataattggcatttatagaacacaaaatccaataattatagaatatgcattcttttccagtatacattcagcaagatagaccatatatatggtggaccataaaataagcttcaaaagattgaaatcttagactttgttctttgatcataatagaattagaaatcaataacaaaaaatctggaaagttctctgatcacaatagaattagaaatctatagcaaaaaaaaa

SEQ ID NO: 404329 - DNA, 528 bp, Homo sapiens
agatagttttaattctgcttgtgacattaaaagattatttgggccagttatagcttattaggtgttgaagagaccaaggttgcaaggccaggccctgtgtgaacctttgagctttcatagagagtttcacagcatggactgtgtccccacggtcatccagtgttgtcatgcattggttagtcaaaatggggagggactagggcagtttggatagctcaacaagatacaatctcactctgtggtggtcctgctgacaaatcaagagcattgcttttgtttcttaagaaaacaaactcttttttaaaaattacttttaaatattaactcaaaagttgagattttggggtggtggtgtgccaagacattaattttttttttaaacaatgaagtgaaaaagttttacaatctctaggtttggctagttctcttaacactggttaaattaacattgcataaacacttttcaagtctgatccatatttaataatgctttaaaataaaaataataaaataatcctattaatacac

SEQ ID NO: 404330 - DNA, 187 bp, Homo sapiens
gcggccgcctactactactaaattcaaggccgttcgactttgttattttttctttctacccttcaaaatgaataatctatattgatctatgttctaatttgctgattgtttcttctgccaagttatatcttcttgtgaccttttctagtgaatttttcatttcagttattataattttcaactccag

SEQ ID NO: 404331 - DNA, 496 bp, Homo sapiens
cctcctgcagccacaggtgatcaaaatgaggtctgtgtgacggagcctgcagcgaggcaagatggctgcctcaaacaagtccatatttcatctctcctcctaacctcctgcctgccaaagctctggcagggaactcattacaacaaagcatgcatgcaccctaattacctgtcatacttctctgttgctggaccagaccctataagagaattccaaagaatttatttttatgggaacaaaatgcagtaattgatgttgcaatcctgcccaaatcactgaacagatcctttaacatccaaattccctaaaacagctttgacttactacacacttcacatgccagctagtgtttgaagtgcgtgtagccgcccccatgaagccctttcttactgtaagtgctcaagaacaaagatatttcttaaacttcctttgattctcataaaataaaaatagccattacataataaagcacaaagctccatgggttaagaagtcc

SEQ ID NO: 404332 - DNA, 270 bp, Homo sapiens
tgccaaaaaaaaaaaaaattgtttaactctatgcttaaccttttccattagcagtttctaccagcaaaataaatcttttccaccaccaccaaatatttttccgcatctttgtcaacacttgttcttgctgtctttttaaattttagccactctgttaggtgtgatgtggtatctcattgtggttttgattttcatgtccctgatggcaaatggtgttgagcatagtttcatgtgcttattggccatatgtttacctaccttggggaaatg

SEQ ID NO: 404333 - DNA, 371 bp, Homo sapiens
acagaaggtatgagagatgagatgccatggaagggatggcagcgatcacagaggctggggggcagaggaaagagacgttgaagaggtggaggggtaatgaacctaggcgggagacaggctaacatttactaagtgcccgtgatgcaccaaggactaggctagctatacaacctttcattgaattcttatgacaacagagaaggaaacaggtttagagagctcatgtaacttacctgtggtgacacagctagcaactttattaagattttgttacgtactatacactgtattaagcatcagtatcttatctcatttaatccccacaacaactctactagagtctcatttaataaatgaggaaacttaggctc

SEQ ID NO: 404334 - DNA, 391 bp, Homo sapiens
ggagcagtcccgaaacccacggtctgtgcctccaggagaccggtgggagcacatgggattcaccaagaaaggtaagcccccgagagcttctccctctgagtcccttcggtccttcagcattaggacggagacacattgggctctaaggaggtggatcctgaagacccagagctgtgggagcagaagatggtggcctggcaggcctagggtcaaggagggcttcctgccagtcccctccccagggcccctcctcactgagggctcctcctctcaggctgggcagaagggcccagcgatgcccctgtgaaggtggacacagaaggaccctggcagagcctggagcaggcctggggaaggggagccatcgtggctgggccaaggatgatggtgg

SEQ ID NO: 404335 - DNA, 396 bp, Homo sapiens
tgctcacgggtttgctgcccggcctccatccctcgccacacaggcttgttttaaaacacagtgtttcccggaatatggcaactgcacccctgaggttgagccatgcaagagagagagagcgggcgcccggggcaggagccatgaagcttctgtaaccgggacccgggagagacctcccatcctttctatccatactgttggttggaagtggatcagtaagcaccgcccgtgccccagggatgtggggtagggtgtgcaggggcgtgggtgccaggaggccaggatcacagggccccttggcggctgcccaccccacggtgacatgacatttggtctgagaccttcccttgccctcttagtaaatatgtaatacagctgggcctgaacacagattga

SEQ ID NO: 404336 - DNA, 230 bp, Homo sapiens
ccaaggagcagcaagagagcaggccccagtgaatatgcactttgcaagcttcagcttgtatcgcgttgctgatgagccactggccaatgcaagtcacaaaactggcccagagttaacgtgggaagtgaccccaaggatgtggatacagggaggcatgaccaaatcagaagccattacttcaacaatctctgcaaagaagagaggtttccttctcttcataatctctacca

SEQ ID NO: 404337 - DNA, 403 bp, Homo sapiens
agattcttcaagaggtttttcccccttaacaatgtaggcaagtcatgctttctaaaccaaaaggggaattcattgtatgtcacattatgccatagaggctcaggctgtattcttcatattgagaggacagtagctgtgcattttcttctgtagctgctggtaaggggcccagacttggagatgggggcctggagttctattctacctccattcacagctggctgagagactagcggtcacctgcctagtcttctgtactttagtttcctcagctcaaaaatgaaggtaatgatgacaaaaataccagcttcactgggttttgtgaagctaagatgtgcatctatgtgaatgtgcttgacgaaaagtagttattttaaaataaatttgtgttgatattataaag

SEQ ID NO: 404338 - DNA, 289 bp, Homo sapiens
gtttttagagtattaaacatatagtttgaaaggggagggcaaaattatctagcaaaataactaagttgcttttggagtttataataggaggactagatttaatttgaactgattaagaatgaccttgaggacagggcctgtatgttgaatatatgtcaagaactccatggtggctggacagatagataaacacacatatagttttttttcaatttgtttccttaagtggtgtgtaggccaggcacagtggctcacacccaaagtgctgggattacaggtgtgagccacc

SEQ ID NO: 404339 - DNA, 1197 bp, Homo sapiens
  misc_feature (1176)..(1178): n is a, c, g, or t
  misc_feature (1180)..(1180): n is a, c, g, or t
  misc_feature (1182)..(1183): n is a, c, g, or t
aggagccaggagagatagaccatgagtagagggcagacatgggaaaggtgggggaggcacagcatagcagcatttttcattctactactacatgggactgctcccctatacccccagctaggggcaagtgccttgactcctatgttttcaggatcatcatctataaagtaagagtaataattgtgtctatctcatagggttattatgaggatcaaaggagatgcacactctctggaccagtggcctaacagttcaggacagagctatgggcttcctatgtatgggtcagtggtctcaatgtagcaggcaagttccagaagatagcatcaaccactgttagagatatactgccagtctcagagcctgatgttaatttagcaatgggctgggaccctcctccagtagaaccttctaaccagctgctgcagtcaaagtcgaatgcagctggttagactttttttaatgaaagcttagctttcattaaagattaagctcctaagcagggcacagatgaaattgtctaacagcaactttgccatctaaaaaaatctgacttcactggaaacatggaagcccaaggttctgaacatgagaaatttttaggaatctgcacaggagttgagagggaaacaagatggtgaagggactagaaaccacatgagagacacgaggaaatagtgtagatttaggctggaggtaaatgaaagagaagtgggaattaatacttactgaaatctttctatatgtcaggtgccattttatgatatttaataatctcattacatatggtaattctgtgagatatgtattattgaacatactataattaatactaatgataagtaacacctcttgagtacttagtatatgctagaatcaaatttaagtttatcatatgaggccgggcacggtggctcatatatgggattacatgcctgtaatcccagcactttgggaggccaaggcaattggatcacctgaggtcaggagttccagaccagcctggccaacatggtgaaaccccttctctactaaaaaatacaaaaaatcagccaggtgtggtggcacgcgtctataatcccagctactcaggaggctgaggcaggagaatcacttgaacccaggaggtggaggttgcagtgagctaagattgcaccactgcactccagcctaggnnncngnntgagactccatctc

SEQ ID NO: 404340 - DNA, 351 bp, Homo sapiens
gcactcttactttgagaagtgtgtcaagaaatggcaaacatttaatttggactttggggatttttgcagctgaaatgcatataccagtttccctgatatgaaatatcacatagttgagacacatgaacctgaatcctttcatgatatctgtgatgaccacaactcctttttcctgatcactttaatcacccaggctgttaactcatttttaatcactgtgttttaaaagaagcactaatgattgattcttgccccttttcaatatattttgaacttaccaattctgcagttttgttaaatatgtcaaaatactcttttcaactgcacattttttcaacgtgattttgactc

SEQ ID NO: 404341 - DNA, 471 bp, Homo sapiens
ttttttttgagacagtttcgctcttgttgcccaggctgtagtgcaatggtgcgatctcggctcactgcaacctccacctcctgagttcaagcaattctcctgcctcagcctctgaagttgctgggattataggtgtgtgccaccatgcccggctaattttgtatttttagtagagacagggttttgccatgttggtcagggtggtcttgaactcctgacctcaggtaatctgcccatctcagcctcccaaagtaatgggattataggcataagacaccaaacctggcctagaatacatgcttttacgtgctttatctcatttaacttgatccccacaaccaccagtactaatattatctccacgtacagatgaggaaattgaggctcagaggaatgaagtcatttgttcaaggtcacgcaaagtcagtagcacgctgccctcactccagatcttcatgctgccctgacgtc

SEQ ID NO: 404342 - DNA, 330 bp, Homo sapiens
tatacatgtacatgtatatacatagtcacatgtttgtatgtagatgtgcactcatgaatatatgtatgtacatatgagtgagtattgggccacaatgtaaaggtatttctcattgtagtttgtggctttaaaacttcaaataccctgtaataagcagctgaaacagtatcagttcccatctagtcaatggaaaccttcttcgaaggatctccagagtgttccttgagctctgcagacccagcagatatatacagaaacaccatcaatcaagctaaggttccagctatgtactgttaaaagctgtatattcaaacaatatgcaaatacatt

SEQ ID NO: 404343 - DNA, 276 bp, Homo sapiens
gttaaactgtggtatgtggtcaaagaagaacttgcacattagagccaaggtgctagtgaaaaaaattagtttttctgcctacatcagatatgtcagtatcaatgatcctatgaaatgtggaccatttttaaaaacgttaaaaaaattttatagaccgactgggaagttcattcatattgaagagtcatgaaactcctgtccatgtttgttcaggaagtaatcttgcatgacgattggtagatgggaagattggattccctgtacaatcagaataaa

SEQ ID NO: 404344 - DNA, 439 bp, Homo sapiens
atggtacttacatcagcaaagacatataaaccaacagaatagaattcagagtctagaaataaacccataatttctggtcaattgatttttgacaagggtgccaagacattcaatggaaaaagaatagtctttttaacaaacagtattgggataactggatattctatgcaaaagaatgaaggtgggcccttatgtcacatcatatgcaaaaatgaactcaaaatggatcaagcgtgagagttaaactataaaattcttataatcttcatcacattgaatcaggcaatggtttcctagatatataaagcacaaacaataaaagaaacacatatataaattggacttcatcacaattttaaaagtttctgatgtagaggataccattcagaaagtgaacaggtaatcacagaatgggagtattacaaaccatatctctgat

SEQ ID NO: 404345 - DNA, 763 bp, Homo sapiens
atcaatctcatactctctagagccttacttcttagagtgtagtccatagacaggcagcatcagcaccaattgtgagcttgtcagaaatgctgtgtctcagactccagcccagacctactgaaccacaatctgcattttaacaagatatccattaaagtctgagatgcactatgctaggctactctatgacaatagctggcttactctattaattgtgatgttaacctttgctgttcatttgttaattcccctgaaggaataaattactcaaatctctaagatatttaaaaacagacaagaaaacaaaacaaagagaaaatgatgacatactgatattatctttatctgtccttccagttacggccaaaatctcttttgtcctttcaatcctcaaatcactacaatctggcttatacatacatccattctgcaactggtcacctctgaagcaaccaatgacctacctttcaaaaaaagaaaaagaaaaaaacgtcactgtctgtgataatgttggctacaaccttaaaagtctctctctgctgcaattatttggagcacttcctagctatttctactacctttcatcttcatgattttcttacttctatggctgtttccgcaccttgaggtttttcttccttcctatattcattctcccacaagtttaatttatgctatgtgtggcttaaatgattacctaaatgttgtcaattcgtcccccatcacccccgcaaatcatcctctctacttccaactctgacat

SEQ ID NO: 404346 - DNA, 509 bp, Homo sapiens
tgggaagaatggcacaagaagacaagttgaaattagatgccagaactgcagattacttggttgaaatgtctttggtgttgcatttttagtccttgcgatgattggttaaattgcatactttggaattgtaagcttctattagcaccaattcttttgtaatttgcagtacagagaaaaagctgacaacttaatttttagattgctgacattttgatacattgttcttataaccctgccttacaaactaaaaacagagagagagagagagagagagaaagcagaaaggtctatattagacctagaaaacaaatgtaatatttaacctgccttgagtatatatttttctctccagttatattgggtgggtgcttgatgaggatagggagttatttctcttcaggtttctttcccaaaccaagtaaaggtctagacacttaaagcattcagtaaatacttacgaaattgtataaaaaatggggccatttgtaacttacgctttactaccaaaa

SEQ ID NO: 404347 - DNA, 598 bp, Homo sapiens
agtaatttagagagatggggcttctgatcctgtgcacatgcctgggttgggccagttttaaaacttgtcaaatgggagcttaatagagtctcctgggggctcccttgcaggcccagcaccacggtggcatcccccagttgcagctccctggtatgtattaaaaggacctattgggtttacaggtgtggcctccagtacctctcctgggatttgtgagtgtagcactattccttttcaatggcatccatctcctgatctgttggcctcactgtacctgattaataataaaactttccttttaaaatacttgtgtctgagggacagagggcagctctggtcacaggggtcacagctaatgaaatccaaccccgttctgctgctctgtggccatggtggcaccgtgtgtggcatcaccaggctgggccatgctgggctgaggctgagggctgctaacaagtgtcctttgtgcaaaaccacccattcctatgggctgcaggctcctcttctgcccaagtccataagagtccaagccagtcatactgttcagctctgcacctgccgatgacctccgagcactgttgtgtgctcagcagccctg

SEQ ID NO: 404348 - DNA, 578 bp, Homo sapiens
aaataggctcatttcctggcatttctggaatgtagttcctacatcatggccttctttccgtgctctgttgtcaggcaaatggccagtctttcagctttggccttctttaattcacagatcatgtcctagtctccgccttccccagcttccagagatcatacggcagatattcaaggtgcttttttctaaaggtctcttacttgctgctcactggtttaagataaacttaaagcatcctcctaccatataggatggggaaacaaagtagcagcagagctctctctctttctagagaaattttgttcatcagtctctcctgcttagtattctagcccttctagcctccccttttgtattgtcaaaattactaatgcaaagtggccagtcaagtttaggacacaaagcagttgactatacatggtctaatacctgtctttgaaatgtgggataagttaacctttttagcttcgatccttagagtctcaaaaaagtaatggaaaaattctcacttttatatttttttaaagctttttgaagtcaaacaagctacacataatgaatgtgaatgaatgtgtgtg

SEQ ID NO: 404349 - DNA, 333 bp, Homo sapiens
aaccccttctccctcagacccaggagtccaggccccagcccctcctccctcagacccaggagtccagacccccaaccccttctccctcagacccaggagtccaggccccagcccctcctccctcagacccaggagtccaggtccccagcccctccaccctcagatcttcaaatggaatctggggccaggcacggtggcgcacgcttgtaattccaaggctttgggaggccaagtgggaaagactgagcctaggaagctgaggttgcagggagctgtgattgtgccacagcaatccagcctgggtgacagaccgagatcctgtcttaaaaaaag

SEQ ID NO: 404350 - DNA, 232 bp, Homo sapiens
tcagtaatatgaactcagggctttggtttccatgtggccctaatggactcactctccctgttccagctaaccaacttcagccttgttcctgttcaatggagaacagcttacgctggagtctgtggttttctctgggccaccttcatctgtttttcccagcagagcggtgacggcacattcaagtcagctttcaccattttatatacaaaggggaccagtgccacagaagggt

SEQ ID NO: 404351 - DNA, 384 bp, Homo sapiens
ttctacagtaactgtccctcagctacacagaactcctcttggtccatcacatgtctgacccatctttttgggcacctgttttagagcctattctgctggaggttggaaagagacttagagagtggttagtgatgcatctggtaagggaaacatggaggttatctcagcctctgctaaaaaaggaggaggctctcattcagagcaaacacatgggccctgcagtactggaagaaagacagtgaatggccatcatgcttttccaggcgccctcagattgctcactgggctttatgacttcttaaagaaaatctattgccttattcccaaaaggatttaacgtgtcgcacagagatgagatactgtaatagaatgggataagttaaa

SEQ ID NO: 404352 - DNA, 475 bp, Homo sapiens
gtgaatacctgtggcttatttcttgagcggtttaattgacaaacacttcttaagggttcactgtgccaaaactggattacatgggtgcacatttcaaggttaaggaaagtgagtgtgcagaggagacaaacataaagaactatgatgttactgatagcaggaaaaaataagcagcagcagaagaaaagatataaaagcaagtgaactacagagagaaaaacagaacatttttaaaaagagggagctagcagaacagtaggaatagaaataaccagaaaaagtttagcatttcagatttttttttttttttttttttttttttttctttgagatagagtcttgctttgtctggcccaggctggagtgcaagtgcagtggtgcagtctcagctcagtacagcctccacctcccaagttcaagtgattatcctgtctcagcctcccaagtagctgggactacaggcatgcaccaccac

SEQ ID NO: 404353 - DNA, 392 bp, Homo sapiens
aaaaaaaaaaacaaattcaggaattcggggccctttcgtacattcacaatgttgcacaactgtctagttctgaaacatcttcatgaatccaaaaagaaaccccacgttcattaatagccactccccattcctccctcccccggcccctggcgaccaccagtctgcattctgtctctatggatttgcctatggtggatatttcttgcaatggaattgtgtaataggtgacattttgcatctagattctttggttcagcataacgtctttggggttcatccacgttgcagtgtgttttagtgcttcactcttttttatggctgaataatagtccatggtttgcgtagaccacattttgtttcttttctcttttttttgagatagagtttcactc

SEQ ID NO: 404354 - DNA, 499 bp, Homo sapiens
ccacacatgcactcacatacaagggcatattattcagcaataaaaatggagtgctgttacatgctacaacatggatgaactttgaaaacattatactaagtgaaagaatcccgacacaaaaaccacatattttatgattccacataaaatatatacactttatattatatatattgtctatatatataggcaaattcatagaaacagtagattagtgattgccaggggttgagggagggggcaatagggagtgattgctaatgactatggggtttcctttgtggatgatgaaaatgttctgaaattagataatgttgatggttgcacaactccaaaaaggtacaaccattaaaaaccgctagactgtgcactttaaaagtgtaaattttatggtatcttaaaaaactatcaatcatttaaaaattacattttaaaataggaacaatttaagattagaaaagattccttttgaaataaaaataagattgctagaattaaa

SEQ ID NO: 404355 - DNA, 473 bp, Homo sapiens
aaaaacaagcaccatcttcatacctgctgaaatctaattctcatccagagggatgtgaggaataaagggggcagtgataccaacagcgggcgtagacagcccatccatcccacgcaggtaatgaagctgatgcttagagaggttgagtaatccacccatgtctctctgacccaggtctgaccaccatactattgcctgcagatgaagaggagcaacatattgtatcctgtgttgctcaagagagcagaattaggacttagaatagccttctaagaattgctctgtgccaccaaatgggtggcagacttctagacaagttttctaaacttgtcagcctcaactacaagtgagctggtgagagaaaacaaacatcactatccaggggcttttgctggacttactgaatgtaacagagatcggattggattgtctctaatgtctgtttcacgaatagagttctgtaaatagtctgt

SEQ ID NO: 404356 - DNA, 431 bp, Homo sapiens
ctctcaaggtcctttctggaactgggattatgtataaagcttaattttagctcaagttctcaactgaaataggtaaatgatctcagctactggttaatttaatcatatattcacttacttaaatttttctcaatttcagaaatattagttacaatattctaaacctaaaattttgatcatttagtaacagcaaaactcttcataactgaaaacatcaattggtagcacgcgcttaaaaaagaaatgactacataatggcttataatgaaaatacctggtcatttgctttttatctatgaaccccaataaacatagttaggcctcttctagctctaccactttctgcctattgccttattttaactgtctccaaatgaactcttttgagaataagtgattttaaaaacaaacagctgccctgttcctacaac

SEQ ID NO: 404357 - DNA, 410 bp, Homo sapiens
tatagatgtatttacatattgtttaactaaaaacaaacaaaaaaaaaagcaaagtcatgtacaagcagaaataaacatttagaatacagaatttgtggaataaaccaaagtagacaaaaatcaaagaatttatccctggggcattcaatgacttgatacaaggtcaccttctacttagttaactgtccttgaggagtaaggagagcgcaggggcaggagagatgtctgatcctgtctccagcaactgatagacccaggttagaagttagatgaagctgcctgccagttatcttggtagaaacttctttctgcatgtactcagataagacatcagtaccctgggtggttctctgcaaaattcaaggtctgcagagtcaccaactgaagtctattggtaaacttgcttttaa

SEQ ID NO: 404358 - DNA, 1193 bp, Homo sapiens
  misc_feature (1020)..(1020): n is a, c, g, or t
  misc_feature (1056)..(1056): n is a, c, g, or t
  misc_feature (1065)..(1065): n is a, c, g, or t
  misc_feature (1193)..(1193): n is a, c, g, or t
ctcgacgccagcctaggcaaaaggcaatgtatctaaacgaaaagaaaataggctttctccgctctaccgcctcgggcagccacacctccacacttccggcggtgtaccggccaaatgccgcctgccagcaacttccgtcctcctagctaaaagcggaaaacagaggctcggaaccgctgcgtggttcttgctcttcactcggccgttttaaagggtgactctttcctgtcccggcctgcgtggtgtgggcttgtgggtctttgagacccgaaaattgagagcgttttcgcactccagcggctgctcctggcggctctgcggccgtcaccatgccacagaatgaatatattgaattacaccgtaaacgctatggataccgtttggattaccatgagaaaaagagaaagaaggaaagtcgagaggctcatgaacgttcaaagaaggcaaagaaaatgattggtctgaaggctaagctttaccataaacagcgtcatgctgagaaaatacaaatgaaaaagactatcaagatgcatgaaaagagaaacaccaaacaaaagaatgatgaaaagacaccacagggagcagtacctgcctatctgctggacagagagggacaatctcgagctaaagtactttccaatatgattaaacagaaaagaaaagagaaggcgggaaaatgggaagtccctctgcctaaagtacgtgcccagggagaaacagaagtattaaaagttattcgaacaggaaagagaaagaagaaggcatggaagagaatggttactaaagtgtgctttgttggagatggctttacaagaaaaccacctaaatatgaaagattcatcaggccaatgggcttgcgtttcaagaaagcccatgtaacacatcctgaactgaaagccaccttttgcctaccaatacttggtgtaaagaagaatccctcatccccactgtatacaactttgggtgttattaccaaaggtactgtcattgaagtaaatgtgagcgaatttgggctgtgcncaggggagtttggggaaatgcccgttcaccacctgnaatgtgggngttatcgggtttggggggccgcctttttttgggcgccccggagctctcgggtttttccccccctcgcggcgatttgttcggtaaaaaaggcgccctcgtggcgggtttgtttcgggcttcctctcgan

SEQ ID NO: 404359 - DNA, 2363 bp, Homo sapiens
ctcgacgccagcctaggcaaaaggcaatgtatctaaacgaaaagaaaataggctttctccgctctaccgcctcgggcagccacacctccacacttccggcggtgtaccggccaaatgccgcctgccagcaacttccgtcctcctagctaaaagcggaaaacagaggctcggaaccgctgcgtggttcttgctcttcactcggccgttttaaagggtgactctttcctgtcccggcctgcgtggtgtgggcttgtgggtctttgagacccgaaaattgagagcgttttcgcactccagcggctgctcctggcggctctgcggccgtcaccatgccacagaatgaatatattgaattacaccgtaaacgctatggataccgtttggattaccatgagaaaaagagaaagaaggaaagtcgagaggctcatgaacgttcaaagaaggcaaagaaaatgattggtctgaaggctaagctttaccataaacagcgtcatgctgagaaaatacaaatgaaaaagactatcaagatgcatgaaaagagaaacaccaaacaaaagaatgatgaaaagacaccacagggagcagtacctgcctatctgctggacagagagggacaatctcgagctaaagtactttccaatatgattaaacagaaaagaaaagagaaggcgggaaaatgggaagtccctctgcctaaagtacgtgcccagggagaaacagaagtattaaaagttattcgaacaggaaagagaaagaagaaggcatggaagagaatggttactaaagtgtgctttgttggagatggctttacaagaaaaccacctaaatatgaaagattcatcaggccaatgggcttgcgtttcaagaaagcccatgtaacacatcctgaactgaaagccaccttttgcctaccaatacttggtgtaaagaagaatccctcatccccactgtatacaactttgggtgttattaccaaaggtactgtcattgaagtaaatgtgagcgaattgggccttgtgacacaaggaggcaaagttatttggggaaaatatgcccaggttaccaacaatcctgaaaatgatggatgtataaatgcagtcttactggtttgacagcaatttcatatataattattgaggactacacaccaattgaagaaactgccattactgtgatgtttctgaatactaccaaacagccatacatgtctgcaatgaagagatttattaaattgtaaacattaaagtggtccagttttataaatggtctttattttgaaatacgctttgaccccatgttcataaaactgaatgattgaaaaaaagcaaatatacaaatatcctacttcatcaatatctgcatttgtgagtgggtattcagcaatttcctgaaaaaaccaccagtgttcattgaaaatgcctttcaaaaaggttaatacacaattatgtgtctgagaatttaactgaagtatcttcaaaatctcgttaatcattaatcctaaaaaaggtaggtagcattaatacagatgttaagtttatagtgtttgtttacactagaagtatgtgagaagacactaaaagttcagaaatcttagagaaatcttttcacctgtgaaatccagtacagcaaaggtctagtgaattcacattctaaacatttttttcatctcatttaccatgtataataatacctacttggcactattttctacttgaatcatgaaaatgaaaaaaatatactaaagtctttgtactctcttagcattttctgtattctaaacaatatatttatactttcagaatagtattaagaattagtttaagtaactccagctaagttttaaaaggaaaaagaagactgcactgattccctgaggagaaatttatttgcagttacttagatgatgtaaaaaggtaaggatttacggttgtaacttggtgaaagcacttttgtgatctgttatatgttgtggttttaaggatggcgtatattacattaatctataatcaccacattgttttaaattgtttattttttttttaaagaagtctgtcttcagagtacaaccaatgtgattaattgtgcctttaacaaagtcattcaatgtctaaacaaattcagtatctgaaacatcttcatgaggaactgacgaagattaaaacccgaccaggacatccaaattagtcatactactttacccaaacaaacaaacaaaaaaaatttggggcggcccgaaatttaaaatttgggggccggagaagggaaactcacaaacggcacaggggttcaacaaacgggcagggtgaacagttgttggccagaatatcccacgccggagaaaaaaaacaaaacatacttaataa

SEQ ID NO: 404360 - DNA, 1736 bp, Homo sapiens
ctcgacgccagcctaggcaaaaggcaatgtatctaaacgaaaagaaaataggctttctccgctctaccgcctcgggcagccacacctccacacttccggcggtgtaccggccaaatgccgcctgccagcaacttccgtcctcctagctaaaagcggaaaacagaggctcggaaccgctgcgtggttcttgctcttcactcggccgttttaaagggtgactctttcctgtcccggcctgcgtggtgtgggcttgtgggtctttgagacccgaaaattgagagcgttttcgcactccagcggctgctcctggcggctctgcggccgtcaccatgccacagaatgaatatattgaattacaccgtaaacgctatggataccgtttggattaccatgagaaaaagagaaagaaggaaagtcgagaggctcatgaacgttcaaagaaggcaaagaaaatgattggtctgaaggctaagctttaccataaacagcgtcatgctgagaaaatacaaatgaaaaagactatcaagatgcatgaaaagagaaacaccaaacaaaagaatgatgaaaagacaccacagggagcagtacctgcctatctgctggacagagagggacaatctcgagctaaagtactttccaatatgattaaacagaaaagaaaagagaaggcgggaaaatgggaagtccctctgcctaaagtacgtgcccagggagaaacagaagtattaaaagttattcgaacaggaaagagaaagaagaaggcatggaagagaatggttactaaagtgtgctttgttggagatggctttacaagaaaaccacctaaatatgaaagattcatcaggccaatgggcttgcgtttcaagaaagcccatgtaacacatcctgaactgaaagccaccttttgcctaccaatacttggtgtaaagaagaatccctcatccccactgtatacaactttgggtgttattaccaaaggtactgtcattgaagtaaatgtgagcgaattgggccttgtgacacaaggaggcaaagttatttggggaaaatatgcccaggttaccaacaatcctgaaaatgatggatgtataaatgcagtcttactggtttgacagcaatttcatatataattattgaggactacacaccaattgaagaaactgccattactgtgatgtttctgaatactaccaaacagccatacatgtctgcaatgaagagatttattaaattgtaaacattaaagtggaaaaaaaacgacacaacaaaaaaaaaaaaacaaggaagaagcacgaacacccgcaaaacagaacacaaccaccacaaatgacaaggacccgcacacgcacaccacaaccccgaatgaaagcacgggcaacccatgagacaggaagcaacccaaaacaacagggaaaacaaaagagaaataacacaaaaaacgaaacagcgcattaaagaagagccacatatcacagacgacacacactgcgagcgaacaccgcccccgcacgacacacaggagccccaaaaatcaagagacgatacaccacaagcaggaaggcaccaaaagggagcaccctcccaccaaaaaggaagagcaaacccccggacacaaataacgcgcaagagagagccaccagggagaaaaatggggggcgacaaaaaagatgcgcaccagggggcacacagcatcgggcagacaccgacccaaagcagctaatcccccatacccacgt

SEQ ID NO: 404361 - DNA, 4062 bp, Homo sapiens
gcacgagcggcacgagcggcacgagtgagtttgagacccgaaaattgagagcgttttcgcactccagcggctgctcctggcggctctgcggccgtcaccatgccacagaatgaatatattgaattacaccgtaaacgctatggataccgtttggattaccatgagaaaaagagaaagaaggaaagtcgagaggctcatgaacgttcaaagaaggcaaagaaaatgattggtctgaaggctaagctttaccataaacagcgtcatgctgagaaaatacaaatgaaaaagactatcaagatgcatgaaaagagaaacaccaaacaaaagaatgatgaaaagacaccacagggagcagtacctgcctatctgctggacagagagggacaatctcgagctaaagtactttccaatatgattaaacagaaaagaaaagagaaggcgggaaaatgggaagtccctctgcctaaagtacgtgcccagggagaaacagaagtattaaaagttattcgaacaggaaagagaaagaagaaggcatggaagagaatggttactaaagtgtgctttgttggagatggctttacaagaaaaccacctaaatatgaaagattcatcaggccaatgggcttgcgtttcaagaaagcccatgtaacacatcctgaactgaaagccaccttttgcctaccaatacttggtgtaaagaagaatccctcatccccactgtatacaactttgggtgttattaccaaaggtactgtcattgaagtaaatgtgagcgaattgggccttgtgacacaaggaggcaaagttatttggggaaaatatgcccaggttaccaacaatcctgaaaatgatggatgtataaatgcagtcttactggtttgacagcaatttcatatataattattgaggactacacaccaattgaagaaactgccattactgtgatgtttctgaatactaccaaacagccatacatgtctgcaatgaagagatttattaaattgtaaacattaaagtggtccagttttataaatggtctttattttgaaatacgctttgaccccatgttcataaaactgaatgattgaaaaaaagcaaatatacaaatatcctacttcatcaatatctgcatttgtgagtgggtattcagcaatttcctgaaaaaaccaccagtgttcattgaaaatgcctttcaaaaaggttaatacacaattatgtgtctgagaatttaactgaagtatcttcaaaatctcgttaatcattaatcctaaaaaaggtaggtagcattaatacagatgttaagtttatagtgtttgtttacactagaagtatgtgagaagacactaaaagttcagaaatcttagagaaatcttttcacctgtgaaatccagtacagcaaaggtctagtgaattcacattctaaacatttttttcatctcatttaccatgtataataatacctacttggcactattttctacttgaatcatgaaaatgaaaaaaatatactaaagtctttgtactctcttagcattttctgtattctaaacaatatatttatactttcagaatagtattaagaattagtttaagtaactccagctaagttttaaaaggaaaaagaagactgcactgattccctgaggagaaatttatttgcagttacttagatgatgtaaaaaggtaaggatttacggttgtaacttggtgaaagcacttttgtgatctgttatatgttgtggttttaaggatggcgtatattacattaatctataatcaccacattgttttaaattgtttattttttttttaaagaagtctgtcttcagagtacaaccaatgtgattaattgtgcctttaacaaagtcattcaatgtctaaacaaattcagtatctgaaacatcttcatgaggaaaactgaaggaaaggaatttaaaaacacagaccaggaaacaatcacaaaatataggtttaattactacttttaaacttaaaaaaaaataaaaaccaagaaaacaaacataggtactccagtaagacttgctactctgaataatgtaacattttttctaagttctataaatatatactggaagttttagaacacatacagacgcttaggaaaagaaaggctagttccttggaaatgacgatccaggatgatacaatcacttgatgacagaaggtaagcctttcttacaattagattttagcagataattttaccactaatataaatgggtgatgtgtggatcacaagttctagaaggcgaataaaaatactgactccaggtaatttctggatactacaaaaatgaagtttgcttgttttttttagaaccaaaaatactatcttgtaaggtacaaagaaagcttgatattaagtatgaaaacataagcataacatttgtaactaatcacacccatgaaagacgactagatgacacctgaaacatttttcaaaatactgtaacacagatgagtaatattagtataaattttttatgtacattaagatctgtttcagtttgctggtgtgaccaaaccttagaaggtaatcccaagggataaagcagaacataagagcagatatttagatattagtacaggctcaatttgatgcaatcataaaccttcaagatttctagtcactgaaaccccattgtaggtagtgttctggagtctgctataagtaaatctttaatgactagatgttttccttaccatctacactgaatggaaataccatgaatatagacacattttaagtagaagactgacgttctaaatcatgctgtttgattttataaaaaaatcataatagaccctctcacctttaaaagttgtagaggagctttataataaattcttaaatatactaatttctgtgatgtctagcaattgaataatttaaacttgaaagaactaaaatactaataaccatctgctttatattacacaaggaaatatacacgtatgtacataaaaagtgaactcccttcacaaataagttcacaaaggactatgtgtaatgtgactggacattcaacaactagactagccggttgaaatcacattttcagtcctctgtaattgtgaaattttttctaatgccttgcaaaaactacagataactgattaagttcatgtaggttccttattgaagataaattgtggtataaattctatactcaagttactgaacatgagagttaggtttttccaagtgatctaacttttccctctataatctataaaccccaaaataacaatttctgtcagagagaatctgtaacagaagtgttcttgtgtgctgaacaaaaaacttctaaattgtttacaattcacttactatttaacccaaacaagtttaacaagaataagtttatactgttagcccccaatggtcatatatgattaataaacattttttgtaaactcaactatattcacacatcaagagttgagccagtgagctcaatctttaaaaaactacacttgtctaaagaaagtcttttagtgctcacttcggcagcacatatactaaaattagaacaatacagggaaaattagcatggcccctgtgcaaggatgacacaaattcatgaagcgtttccatgtttaaaataatttgaaaagaaagtattttaaacaaatccaagtaaaaataaaatatctacaagtgttttcaaatctaagaaatgaaacatgtaaagattaagaatttactgaatcttaacagagtatttccctttgtgatattgacagaagtttctcataaaatgtataaaacagcataaatgtttggtagattcactaatagtagtcatacttttttttttttacttagtattagcatttgttgaaaaaataaatggccaaagtgctttaattttcatttagaatgaaataatctggcttacctttgactaattaaagaaaatatagggtaatacaattgttcaaaatctaacacaaataggagcgtttactatttttgtctgctttaagattttaacttgatcgaaaataccaacatccccaaacaaaatttactgacct

SEQ ID NO: 404362 - DNA, 1413 bp, Homo sapiens
ctcgacgccagcctaggcaaaaggcaatgtatctaaacgaaaagaaaataggctttctccgctctaccgcctcgggcagccacacctccacacttccggcggtgtaccggccaaatgccgcctgccagcaacttccgtcctcctagctaaaagcggaaaacagaggctcggaaccgctgcgtggttcttgctcttcactcggccgttttaaagggtgactctttcctgtcccggcctgcgtggtgtgggcttgtgggtctttgagacccgaaaattgagagcgttttcgcactccagcggctgctcctggcggctctgcggccgtcaccatgccacagaatgaatatattgaattacaccgtaaacgctatggataccgtttggattaccatgagaaaaagagaaagaaggaaagtcgagaggctcatgaacgttcaaagaaggcaaagaaaatgattggtctgaaggctaagctttaccataaacagcgtcatgctgagaaaatacaaatgaaaaagactatcaagatgcatgaaaagagaaacaccaaacaaaagaatgatgaaaagacaccacagggagcagtacctgcctatctgctggacagagagggacaatctcgagctaaagtactttccaatatgattaaacagaaaagaaaagagaaggcgggaaaatgggaagtccctctgcctaaagtacgtgcccagggagaaacagaagtattaaaagttattcgaacaggaaagagaaagaagaaggcatggaagagaatggttactaaagtgtgctttgttggagatggctttacaagaaaaccacctaaatatgaaagattcatcaggccaatgggcttgcgtttcaagaaagcccatgtaacacatcctgaactgaaagccaccttttgcctaccaatacttggtgtaaagaagaatccctcatccccactgtatacaactttgggtgttattaccaaaggtactgtcattgaagtaaatgtgagcgaattgggccttgtgacacaaggaggcaaagttatttggggaaaatatgcccaggttaccaacaatcctgaaaatgatggatgtataaatgcagtcttactggtttgacagcaatttcatatataattattgaggactacacaccaattgaagaaactgccattactgtgatgtttctgaatactaccaaacagccatacatgtctgcaatgaagagatttgtacttaagtgaaaaaaaataaacaaaaaaaaaaggggcgttttgggggggaaaagaataaaaaggaaggaatttttcagaccatgtaaaaggaacagggccacaagagagtataaaccgtcataaaaggaaaagagaagaggaaggtcaataaagaaaggaacaacaaatatataaaaaacaagaaa

SEQ ID NO: 404363 - DNA, 3836 bp, Homo sapiens
  misc_feature (86)..(86): n is a, c, g, or t
gctagtctggtagctttaagatagctttgccttagcaaggatcaaagtcctacccaaatatctaaaatatctagaagtataaagcnttgagctcaacgctttatacttctgtttctccacagggagcagtacctgcctatctgctggacagagagggacaatctcgagctaaagtactttccaatatgattaaacagaaaagaaaagagaaggcgggaaaatgggaagtccctctgcctaaagtacgtgcccagggagaaacagaagtattaaaagttattcgaacaggaaagagaaagaagaaggcatggaagagaatggttactaaagtgtgctttgttggagatggctttacaagaaaaccacctaaatatgaaagattcatcaggccaatgggcttgcgtttcaagaaagcccatgtaacacatcctgaactgaaagccaccttttgcctaccaatacttggtgtaaagaagaatccctcatccccactgtatacaactttgggtgttattaccaaaggtactgtcattgaagtaaatgtgagcgaattgggccttgtgacacaaggaggcaaagttatttggggaaaatatgcccaggttaccaacaatcctgaaaatgatggatgtataaatgcagtcttactggtttgacagcaatttcatatataattattgaggactacacaccaattgaagaaactgccattactgtgatgtttctgaatactaccaaacagccatacatgtctgcaatgaagagatttattaaattgtaaacattaaagtggtccagttttataaatggtctttattttgaaatacgctttgaccccatgttcataaaactgaatgattgaaaaaaagcaaatatacaaatatcctacttcatcaatatctgcatttgtgagtgggtattcagcaatttcctgaaaaaaccaccagtgttcattgaaaatgcctttcaaaaaggttaatacacaattatgtgtctgagaatttaactgaagtatcttcaaaatctcgttaatcattaatcctaaaaaaggtaggtagcattaatacagatgttaagtttatagtgtttgtttacactagaagtatgtgagaagacactaaaagttcagaaatcttagagaaatcttttcacctgtgaaatccagtacagcaaaggtctagtgaattcacattctaaacatttttttcatctcatttaccatgtataataatacctacttggcactattttctacttgaatcatgaaaatgaaaaaaatatactaaagtctttgtactctcttagcattttctgtattctaaacaatatatttatactttcagaatagtattaagaattagtttaagtaactccagctaagttttaaaaggaaaaagaagactgcactgattccctgaggagaaatttatttgcagttacttagatgatgtaaaaaggtaaggatttacggttgtaacttggtgaaagcacttttgtgatctgttatatgttgtggttttaaggatggcgtatattacattaatctataatcaccacattgttttaaattgtttattttttttttaaagaagtctgtcttcagagtacaaccaatgtgattaattgtgcctttaacaaagtcattcaatgtctaaacaaattcagtatctgaaacatcttcatgaggaaaactgaaggaaaggaatttaaaaacacagaccaggaaacaatcacaaaatataggtttaattactacttttaaacttaaaaaaaaataaaaaccaagaaaacaaacataggtactccagtaagacttgctactctgaataatgtaacattttttctaagttctataaatatatactggaagttttagaacacatacagacgcttaggaaaagaaaggctagttccttggaaatgacgatccaggatgatacaatcacttgatgacagaaggtaagcctttcttacaattagattttagcagataattttaccactaatataaatgggtgatgtgtggatcacaagttctagaaggcgaataaaaatactgactccaggtaatttctggatactacaaaaatgaagtttgcttgttttttttagaaccaaaaatactatcttgtaaggtacaaagaaagcttgatattaagtatgaaaacataagcataacatttgtaactaatcacacccatgaaagacgactagatgacacctgaaacatttttcaaaatactgtaacacagatgagtaatattagtataaattttttatgtacattaagatctgtttcagtttgctggtgtgaccaaaccttagaaggtaatcccaagggataaagcagaacataagagcagatatttagatattagtacaggctcaatttgatgcaatcataaaccttcaagatttctagtcactgaaaccccattgtaggtagtgttctggagtctgctataagtaaatctttaatgactagatgttttccttaccatctacactgaatggaaataccatgaatatagacacattttaagtagaagactgacgttctaaatcatgctgtttgattttataaaaaaatcataatagaccctctcacctttaaaagttgtagaggagctttataataaattcttaaatatactaatttctgtgatgtctagcaattgaataatttaaacttgaaagaactaaaatactaataaccatctgctttatattacacaaggaaatatacacgtatgtacataaaaagtgaactcccttcacaaataagttcacaaaggactatgtgtaatgtgactggacattcaacaactagactagccggttgaaatcacattttcagtcctctgtaattgtgaaattttttctaatgccttgcaaaaactacagataactgattaagttcatgtaggttccttattgaagataaattgtggtataaattctatactcaagttactgaacatgagagttaggtttttccaagtgatctaacttttccctctataatctataaaccccaaaataacaatttctgtcagagagaatctgtaacagaagtgttcttgtgtgctgaacaaaaaacttctaaattgtttacaattcacttactatttaacccaaacaagtttaacaagaataagtttatactgttagcccccaatggtcatatatgattaataaacattttttgtaaactcaactatattcacacatcaagagttgagccagtgagctcaatctttaaaaaactacacttgtctaaagaaagtcttttagtgctcacttcggcagcacatatactaaaattagaacaatacagggaaaattagcatggcccctgtgcaaggatgacacaaattcatgaagcgtttccatgtttaaaataatttgaaaagaaagtattttaaacaaatccaagtaaaaataaaatatctacaagtgttttcaaatctaagaaatgaaacatgtaaagattaagaatttactgaatcttaacagagtatttccctttgtgatattgacagaagtttctcataaaatgtataaaacagcataaatgtttggtagattcactaatagtagtcatacttttttttttttacttagtattagcatttgttgaaaaaataaatggccaaagtgctttaattttcatttagaatgaaataatctggcttacctttgactaattaaagaaaatatagggtaatacaattgttcaaaatctaacacaaataggagcgtttactatttttgtctgctttaagattttaacttgatcgaaaataccaacatccccaaacaaaatttactgacct

SEQ ID NO: 404364 - DNA, 4198 bp, Homo sapiens
ctcgacgccagcctaggcaaaaggcaatgtatctaaacgaaaagaaaataggctttctccgctctaccgcctcgggcagccacacctccacacttccggcggtgtaccggccaaatgccgcctgccagcaacttccgtcctcctagctaaaagcggaaaacagaggctcggaaccgctgcgtggttcttgctcttcactcggccgttttaaagggtgactctttcctgtcccggcctgcgtggtgtgggcttgtgggtctttgagacccgaaaattgagagcgttttcgcactccagcggctgctcctggcggctctgcggccgtcaccatgccacagaatgaatatattgaattacaccgtaaacgctatggataccgtttggattaccatgagaaaaagagaaagaaggaaagtcgagaggctcatgaacgttcaaagaaggcaaagaaaatgattggtctgaaggctaagctttaccataaacagcgtcatgctgagaaaatacaaatgaaaaagactatcaagatgcatgaaaagagaaacaccaaacaaaagaatgatgaaaagacaccacagggagcagtacctgcctatctgctggacagagagggacaatctcgagctaaagtactttccaatatgattaaacagaaaagaaaagagaaggcgggaagagaatggttactaaagtgtgctttgttggagatggctttacaagaaaaccacctaaatatgaaagattcatcaggccaatgggcttgcgtttcaagaaagcccatgtaacacatcctgaactgaaagccaccttttgcctaccaatacttggtgtaaagaagaatccctcatccccactgtatacaactttgggtgttattaccaaaggtactgtcattgaagtaaatgtgagcgaattgggccttgtgacacaaggaggcaaagttatttggggaaaatatgcccaggttaccaacaatcctgaaaatgatggatgtataaatgcagtcttactggtttgacagcaatttcatatataattattgaggactacacaccaattgaagaaactgccattactgtgatgtttctgaatactaccaaacagccatacatgtctgcaatgaagagatttattaaattgtaaacattaaagtggtccagttttataaatggtctttattttgaaatacgctttgaccccatgttcataaaactgaatgattgaaaaaaagcaaatatacaaatatcctacttcatcaatatctgcatttgtgagtgggtattcagcaatttcctgaaaaaaccaccagtgttcattgaaaatgcctttcaaaaaggttaatacacaattatgtgtctgagaatttaactgaagtatcttcaaaatctcgttaatcattaatcctaaaaaaggtaggtagcattaatacagatgttaagtttatagtgtttgtttacactagaagtatgtgagaagacactaaaagttcagaaatcttagagaaatcttttcacctgtgaaatccagtacagcaaaggtctagtgaattcacattctaaacatttttttcatctcatttaccatgtataataatacctacttggcactattttctacttgaatcatgaaaatgaaaaaaatatactaaagtctttgtactctcttagcattttctgtattctaaacaatatatttatactttcagaatagtattaagaattagtttaagtaactccagctaagttttaaaaggaaaaagaagactgcactgattccctgaggagaaatttatttgcagttacttagatgatgtaaaaaggtaaggatttacggttgtaacttggtgaaagcacttttgtgatctgttatatgttgtggttttaaggatggcgtatattacattaatctataatcaccacattgttttaaattgtttattttttttttaaagaagtctgtcttcagagtacaaccaatgtgattaattgtgcctttaacaaagtcattcaatgtctaaacaaattcagtatctgaaacatcttcatgaggaaaactgaaggaaaggaatttaaaaacacagaccaggaaacaatcacaaaatataggtttaattactacttttaaacttaaaaaaaaataaaaaccaagaaaacaaacataggtactccagtaagacttgctactctgaataatgtaacattttttctaagttctataaatatatactggaagttttagaacacatacagacgcttaggaaaagaaaggctagttccttggaaatgacgatccaggatgatacaatcacttgatgacagaaggtaagcctttcttacaattagattttagcagataattttaccactaatataaatgggtgatgtgtggatcacaagttctagaaggcgaataaaaatactgactccaggtaatttctggatactacaaaaatgaagtttgcttgttttttttagaaccaaaaatactatcttgtaaggtacaaagaaagcttgatattaagtatgaaaacataagcataacatttgtaactaatcacacccatgaaagacgactagatgacacctgaaacatttttcaaaatactgtaacacagatgagtaatattagtataaattttttatgtacattaagatctgtttcagtttgctggtgtgaccaaaccttagaaggtaatcccaagggataaagcagaacataagagcagatatttagatattagtacaggctcaatttgatgcaatcataaaccttcaagatttctagtcactgaaaccccattgtaggtagtgttctggagtctgctataagtaaatctttaatgactagatgttttccttaccatctacactgaatggaaataccatgaatatagacacattttaagtagaagactgacgttctaaatcatgctgtttgattttataaaaaaatcataatagaccctctcacctttaaaagttgtagaggagctttataataaattcttaaatatactaatttctgtgatgtctagcaattgaataatttaaacttgaaagaactaaaatactaataaccatctgctttatattacacaaggaaatatacacgtatgtacataaaaagtgaactcccttcacaaataagttcacaaaggactatgtgtaatgtgactggacattcaacaactagactagccggttgaaatcacattttcagtcctctgtaattgtgaaattttttctaatgccttgcaaaaactacagataactgattaagttcatgtaggttccttattgaagataaattgtggtataaattctatactcaagttactgaacatgagagttaggtttttccaagtgatctaacttttccctctataatctataaaccccaaaataacaatttctgtcagagagaatctgtaacagaagtgttcttgtgtgctgaacaaaaaacttctaaattgtttacaattcacttactatttaacccaaacaagtttaacaagaataagtttatactgttagcccccaatggtcatatatgattaataaacattttttgtaaactcaactatattcacacatcaagagttgagccagtgagctcaatctttaaaaaactacacttgtctaaagaaagtcttttagtgctcacttcggcagcacatatactaaaattagaacaatacagggaaaattagcatggcccctgtgcaaggatgacacaaattcatgaagcgtttccatgtttaaaataatttgaaaagaaagtattttaaacaaatccaagtaaaaataaaatatctacaagtgttttcaaatctaagaaatgaaacatgtaaagattaagaatttactgaatcttaacagagtatttccctttgtgatattgacagaagtttctcataaaatgtataaaacagcataaatgtttggtagattcactaatagtagtcatacttttttttttttacttagtattagcatttgttgaaaaaataaatggccaaagtgctttaattttcatttagaatgaaataatctggcttacctttgactaattaaagaaaatatagggtaatacaattgttcaaaatctaacacaaataggagcgtttactatttttgtctgctttaagattttaacttgatcgaaaataccaacatccccaaacaaaatttactgacct

SEQ ID NO: 404365 - DNA, 3656 bp, Homo sapiens
tgatcccctggccgcggcctcctgaggtgccgggagtgcagatggagtctcgttcactcagtgctcaatgccagggagaaacagaagtattaaaagttattcgaacaggaaagagaaagaagaaggcatggaagagaatggttactaaagtgtgctttgttggagatggctttacaagaaaaccacctaaatatgaaagattcatcaggccaatgggcttgcgtttcaagaaagcccatgtaacacatcctgaactgaaagccaccttttgcctaccaatacttggtgtaaagaagaatccctcatccccactgtatacaactttgggtgttattaccaaaggtactgtcattgaagtaaatgtgagcgaattgggccttgtgacacaaggaggcaaagttatttggggaaaatatgcccaggttaccaacaatcctgaaaatgatggatgtataaatgcagtcttactggtttgacagcaatttcatatataattattgaggactacacaccaattgaagaaactgccattactgtgatgtttctgaatactaccaaacagccatacatgtctgcaatgaagagatttattaaattgtaaacattaaagtggtccagttttataaatggtctttattttgaaatacgctttgaccccatgttcataaaactgaatgattgaaaaaaagcaaatatacaaatatcctacttcatcaatatctgcatttgtgagtgggtattcagcaatttcctgaaaaaaccaccagtgttcattgaaaatgcctttcaaaaaggttaatacacaattatgtgtctgagaatttaactgaagtatcttcaaaatctcgttaatcattaatcctaaaaaaggtaggtagcattaatacagatgttaagtttatagtgtttgtttacactagaagtatgtgagaagacactaaaagttcagaaatcttagagaaatcttttcacctgtgaaatccagtacagcaaaggtctagtgaattcacattctaaacatttttttcatctcatttaccatgtataataatacctacttggcactattttctacttgaatcatgaaaatgaaaaaaatatactaaagtctttgtactctcttagcattttctgtattctaaacaatatatttatactttcagaatagtattaagaattagtttaagtaactccagctaagttttaaaaggaaaaagaagactgcactgattccctgaggagaaatttatttgcagttacttagatgatgtaaaaaggtaaggatttacggttgtaacttggtgaaagcacttttgtgatctgttatatgttgtggttttaaggatggcgtatattacattaatctataatcaccacattgttttaaattgtttattttttttttaaagaagtctgtcttcagagtacaaccaatgtgattaattgtgcctttaacaaagtcattcaatgtctaaacaaattcagtatctgaaacatcttcatgaggaaaactgaaggaaaggaatttaaaaacacagaccaggaaacaatcacaaaatataggtttaattactacttttaaacttaaaaaaaaataaaaaccaagaaaacaaacataggtactccagtaagacttgctactctgaataatgtaacattttttctaagttctataaatatatactggaagttttagaacacatacagacgcttaggaaaagaaaggctagttccttggaaatgacgatccaggatgatacaatcacttgatgacagaaggtaagcctttcttacaattagattttagcagataattttaccactaatataaatgggtgatgtgtggatcacaagttctagaaggcgaataaaaatactgactccaggtaatttctggatactacaaaaatgaagtttgcttgttttttttagaaccaaaaatactatcttgtaaggtacaaagaaagcttgatattaagtatgaaaacataagcataacatttgtaactaatcacacccatgaaagacgactagatgacacctgaaacatttttcaaaatactgtaacacagatgagtaatattagtataaattttttatgtacattaagatctgtttcagtttgctggtgtgaccaaaccttagaaggtaatcccaagggataaagcagaacataagagcagatatttagatattagtacaggctcaatttgatgcaatcataaaccttcaagatttctagtcactgaaaccccattgtaggtagtgttctggagtctgctataagtaaatctttaatgactagatgttttccttaccatctacactgaatggaaataccatgaatatagacacattttaagtagaagactgacgttctaaatcatgctgtttgattttataaaaaaatcataatagaccctctcacctttaaaagttgtagaggagctttataataaattcttaaatatactaatttctgtgatgtctagcaattgaataatttaaacttgaaagaactaaaatactaataaccatctgctttatattacacaaggaaatatacacgtatgtacataaaaagtgaactcccttcacaaataagttcacaaaggactatgtgtaatgtgactggacattcaacaactagactagccggttgaaatcacattttcagtcctctgtaattgtgaaattttttctaatgccttgcaaaaactacagataactgattaagttcatgtaggttccttattgaagataaattgtggtataaattctatactcaagttactgaacatgagagttaggtttttccaagtgatctaacttttccctctataatctataaaccccaaaataacaatttctgtcagagagaatctgtaacagaagtgttcttgtgtgctgaacaaaaaacttctaaattgtttacaattcacttactatttaacccaaacaagtttaacaagaataagtttatactgttagcccccaatggtcatatatgattaataaacattttttgtaaactcaactatattcacacatcaagagttgagccagtgagctcaatctttaaaaaactacacttgtctaaagaaagtcttttagtgctcacttcggcagcacatatactaaaattagaacaatacagggaaaattagcatggcccctgtgcaaggatgacacaaattcatgaagcgtttccatgtttaaaataatttgaaaagaaagtattttaaacaaatccaagtaaaaataaaatatctacaagtgttttcaaatctaagaaatgaaacatgtaaagattaagaatttactgaatcttaacagagtatttccctttgtgatattgacagaagtttctcataaaatgtataaaacagcataaatgtttggtagattcactaatagtagtcatacttttttttttttacttagtattagcatttgttgaaaaaataaatggccaaagtgctttaattttcatttagaatgaaataatctggcttacctttgactaattaaagaaaatatagggtaatacaattgttcaaaatctaacacaaataggagcgtttactatttttgtctgctttaagattttaacttgatcgaaaataccaacatccccaaacaaaatttactgacct

SEQ ID NO: 404366 - DNA, 4401 bp, Homo sapiens
ctcgacgccagcctaggcaaaaggcaatgtatctaaacgaaaagaaaataggctttctccgctctaccgcctcgggcagccacacctccacacttccggcggtgtaccggccaaatgccgcctgccagcaacttccgtcctcctagctaaaagcggaaaacagaggctcggaaccgctgcgtggttcttgctcttcactcggccgttttaaagggtgactctttcctgtcccggcctgcgtggtgtgggcttgtgggtctttgagacccgaaaattgagagcgttttcgcactccagcggctgctcctggcggctctgcggccgtcaccatgccacagaatgaatatattgaattacaccgtaaacgctatggataccgtttggattaccatgagaaaaagagaaagaaggaaagtcgagaggctcatgaacgttcaaagaaggcaaagaaaatgattggtctgaaggctaagctttaccataaacagcgtcatgctgagaaaatacaaatgaaaaagactatcaagatgcatgaaaagagaaacaccaaacaaaagaatgatgaaaagacaccacagggagcagtacctgcctatctgctggacagagagggacaatctcgagctaaagtactttccaatatgattaaacagaaaagaaaagagaaggcgggaaaatgggaagtccctctgcctaaagtacgtgcccagggagaaacagaagtattaaaagttattcgaacaggaaagagaaagaagaaggcatggaagagaatggttactaaagtgtgctttgttggagatggctttacaagaaaaccacctaaatatgaaagattcatcaggccaatgagacggggtttcaccgtgttagccaggatggtctcgatctccgtgatccgcccgccttagcctcccaaagtgttggaattacaggcatgagccaccgtgcccggccaacggcttgcgtttcaagaaagcccatgtaacacatcctgaactgaaagccaccttttgcctaccaatacttggtgtaaagaagaatccctcatccccactgtatacaactttgggtgttattaccaaaggtactgtcattgaagtaaatgtgagcgaattgggccttgtgacacaaggaggcaaagttatttggggaaaatatgcccaggttaccaacaatcctgaaaatgatggatgtataaatgcagtcttactggtttgacagcaatttcatatataattattgaggactacacaccaattgaagaaactgccattactgtgatgtttctgaatactaccaaacagccatacatgtctgcaatgaagagatttattaaattgtaaacattaaagtggtccagttttataaatggtctttattttgaaatacgctttgaccccatgttcataaaactgaatgattgaaaaaaagcaaatatacaaatatcctacttcatcaatatctgcatttgtgagtgggtattcagcaatttcctgaaaaaaccaccagtgttcattgaaaatgcctttcaaaaaggttaatacacaattatgtgtctgagaatttaactgaagtatcttcaaaatctcgttaatcattaatcctaaaaaaggtaggtagcattaatacagatgttaagtttatagtgtttgtttacactagaagtatgtgagaagacactaaaagttcagaaatcttagagaaatcttttcacctgtgaaatccagtacagcaaaggtctagtgaattcacattctaaacatttttttcatctcatttaccatgtataataatacctacttggcactattttctacttgaatcatgaaaatgaaaaaaatatactaaagtctttgtactctcttagcattttctgtattctaaacaatatatttatactttcagaatagtattaagaattagtttaagtaactccagctaagttttaaaaggaaaaagaagactgcactgattccctgaggagaaatttatttgcagttacttagatgatgtaaaaaggtaaggatttacggttgtaacttggtgaaagcacttttgtgatctgttatatgttgtggttttaaggatggcgtatattacattaatctataatcaccacattgttttaaattgtttattttttttttaaagaagtctgtcttcagagtacaaccaatgtgattaattgtgcctttaacaaagtcattcaatgtctaaacaaattcagtatctgaaacatcttcatgaggaaaactgaaggaaaggaatttaaaaacacagaccaggaaacaatcacaaaatataggtttaattactacttttaaacttaaaaaaaaataaaaaccaagaaaacaaacataggtactccagtaagacttgctactctgaataatgtaacattttttctaagttctataaatatatactggaagttttagaacacatacagacgcttaggaaaagaaaggctagttccttggaaatgacgatccaggatgatacaatcacttgatgacagaaggtaagcctttcttacaattagattttagcagataattttaccactaatataaatgggtgatgtgtggatcacaagttctagaaggcgaataaaaatactgactccaggtaatttctggatactacaaaaatgaagtttgcttgttttttttagaaccaaaaatactatcttgtaaggtacaaagaaagcttgatattaagtatgaaaacataagcataacatttgtaactaatcacacccatgaaagacgactagatgacacctgaaacatttttcaaaatactgtaacacagatgagtaatattagtataaattttttatgtacattaagatctgtttcagtttgctggtgtgaccaaaccttagaaggtaatcccaagggataaagcagaacataagagcagatatttagatattagtacaggctcaatttgatgcaatcataaaccttcaagatttctagtcactgaaaccccattgtaggtagtgttctggagtctgctataagtaaatctttaatgactagatgttttccttaccatctacactgaatggaaataccatgaatatagacacattttaagtagaagactgacgttctaaatcatgctgtttgattttataaaaaaatcataatagaccctctcacctttaaaagttgtagaggagctttataataaattcttaaatatactaatttctgtgatgtctagcaattgaataatttaaacttgaaagaactaaaatactaataaccatctgctttatattacacaaggaaatatacacgtatgtacataaaaagtgaactcccttcacaaataagttcacaaaggactatgtgtaatgtgactggacattcaacaactagactagccggttgaaatcacattttcagtcctctgtaattgtgaaattttttctaatgccttgcaaaaactacagataactgattaagttcatgtaggttccttattgaagataaattgtggtataaattctatactcaagttactgaacatgagagttaggtttttccaagtgatctaacttttccctctataatctataaaccccaaaataacaatttctgtcagagagaatctgtaacagaagtgttcttgtgtgctgaacaaaaaacttctaaattgtttacaattcacttactatttaacccaaacaagtttaacaagaataagtttatactgttagcccccaatggtcatatatgattaataaacattttttgtaaactcaactatattcacacatcaagagttgagccagtgagctcaatctttaaaaaactacacttgtctaaagaaagtcttttagtgctcacttcggcagcacatatactaaaattagaacaatacagggaaaattagcatggcccctgtgcaaggatgacacaaattcatgaagcgtttccatgtttaaaataatttgaaaagaaagtattttaaacaaatccaagtaaaaataaaatatctacaagtgttttcaaatctaagaaatgaaacatgtaaagattaagaatttactgaatcttaacagagtatttccctttgtgatattgacagaagtttctcataaaatgtataaaacagcataaatgtttggtagattcactaatagtagtcatacttttttttttttacttagtattagcatttgttgaaaaaataaatggccaaagtgctttaattttcatttagaatgaaataatctggcttacctttgactaattaaagaaaatatagggtaatacaattgttcaaaatctaacacaaataggagcgtttactatttttgtctgctttaagattttaacttgatcgaaaataccaacatccccaaacaaaatttactgacct

SEQ ID NO: 404367 - DNA, 3709 bp, Homo sapiens
ctcgacgccagcctaggcaaaaggcaatgtatctaaacgaaaagaaaataggctttctccgctctaccgcctcgggcagccacacctccacacttccggcggtgtaccggccaaatgccgcctgccagcaacttccgtcctcctagctaaaagcggaaaacagaggctcggaaccgctgcgtggttcttgctcttcactcggccgttttaaagggtgactctttcctgtcccggcctgcgtggtgtgggcttgtgggtctttgagacccgaaaattgagagcgttttcgcactccagcggctgctcctggcggctctgcggccgtcaccatgccacagaatgaatatattgaattacaccgtaaacgctatggataccgtttggattaccatgagaaaaagagaaagaaggaaagtcgagaggctcatgaacgttcaaagaaggcaaagaaaatgattggtgaaaatatgcccaggttaccaacaatcctgaaaatgatggatgtataaatgcagtcttactggtttgacagcaatttcatatataattattgaggactacacaccaattgaagaaactgccattactgtgatgtttctgaatactaccaaacagccatacatgtctgcaatgaagagatttattaaattgtaaacattaaagtggtccagttttataaatggtctttattttgaaatacgctttgaccccatgttcataaaactgaatgattgaaaaaaagcaaatatacaaatatcctacttcatcaatatctgcatttgtgagtgggtattcagcaatttcctgaaaaaaccaccagtgttcattgaaaatgcctttcaaaaaggttaatacacaattatgtgtctgagaatttaactgaagtatcttcaaaatctcgttaatcattaatcctaaaaaaggtaggtagcattaatacagatgttaagtttatagtgtttgtttacactagaagtatgtgagaagacactaaaagttcagaaatcttagagaaatcttttcacctgtgaaatccagtacagcaaaggtctagtgaattcacattctaaacatttttttcatctcatttaccatgtataataatacctacttggcactattttctacttgaatcatgaaaatgaaaaaaatatactaaagtctttgtactctcttagcattttctgtattctaaacaatatatttatactttcagaatagtattaagaattagtttaagtaactccagctaagttttaaaaggaaaaagaagactgcactgattccctgaggagaaatttatttgcagttacttagatgatgtaaaaaggtaaggatttacggttgtaacttggtgaaagcacttttgtgatctgttatatgttgtggttttaaggatggcgtatattacattaatctataatcaccacattgttttaaattgtttattttttttttaaagaagtctgtcttcagagtacaaccaatgtgattaattgtgcctttaacaaagtcattcaatgtctaaacaaattcagtatctgaaacatcttcatgaggaaaactgaaggaaaggaatttaaaaacacagaccaggaaacaatcacaaaatataggtttaattactacttttaaacttaaaaaaaaataaaaaccaagaaaacaaacataggtactccagtaagacttgctactctgaataatgtaacattttttctaagttctataaatatatactggaagttttagaacacatacagacgcttaggaaaagaaaggctagttccttggaaatgacgatccaggatgatacaatcacttgatgacagaaggtaagcctttcttacaattagattttagcagataattttaccactaatataaatgggtgatgtgtggatcacaagttctagaaggcgaataaaaatactgactccaggtaatttctggatactacaaaaatgaagtttgcttgttttttttagaaccaaaaatactatcttgtaaggtacaaagaaagcttgatattaagtatgaaaacataagcataacatttgtaactaatcacacccatgaaagacgactagatgacacctgaaacatttttcaaaatactgtaacacagatgagtaatattagtataaattttttatgtacattaagatctgtttcagtttgctggtgtgaccaaaccttagaaggtaatcccaagggataaagcagaacataagagcagatatttagatattagtacaggctcaatttgatgcaatcataaaccttcaagatttctagtcactgaaaccccattgtaggtagtgttctggagtctgctataagtaaatctttaatgactagatgttttccttaccatctacactgaatggaaataccatgaatatagacacattttaagtagaagactgacgttctaaatcatgctgtttgattttataaaaaaatcataatagaccctctcacctttaaaagttgtagaggagctttataataaattcttaaatatactaatttctgtgatgtctagcaattgaataatttaaacttgaaagaactaaaatactaataaccatctgctttatattacacaaggaaatatacacgtatgtacataaaaagtgaactcccttcacaaataagttcacaaaggactatgtgtaatgtgactggacattcaacaactagactagccggttgaaatcacattttcagtcctctgtaattgtgaaattttttctaatgccttgcaaaaactacagataactgattaagttcatgtaggttccttattgaagataaattgtggtataaattctatactcaagttactgaacatgagagttaggtttttccaagtgatctaacttttccctctataatctataaaccccaaaataacaatttctgtcagagagaatctgtaacagaagtgttcttgtgtgctgaacaaaaaacttctaaattgtttacaattcacttactatttaacccaaacaagtttaacaagaataagtttatactgttagcccccaatggtcatatatgattaataaacattttttgtaaactcaactatattcacacatcaagagttgagccagtgagctcaatctttaaaaaactacacttgtctaaagaaagtcttttagtgctcacttcggcagcacatatactaaaattagaacaatacagggaaaattagcatggcccctgtgcaaggatgacacaaattcatgaagcgtttccatgtttaaaataatttgaaaagaaagtattttaaacaaatccaagtaaaaataaaatatctacaagtgttttcaaatctaagaaatgaaacatgtaaagattaagaatttactgaatcttaacagagtatttccctttgtgatattgacagaagtttctcataaaatgtataaaacagcataaatgtttggtagattcactaatagtagtcatacttttttttttttacttagtattagcatttgttgaaaaaataaatggccaaagtgctttaattttcatttagaatgaaataatctggcttacctttgactaattaaagaaaatatagggtaatacaattgttcaaaatctaacacaaataggagcgtttactatttttgtctgctttaagattttaacttgatcgaaaataccaacatccccaaacaaaatttactgacct

SEQ ID NO: 404368 - DNA, 403 bp, Homo sapiens
agctgggcgtggtggcgggcgcctgtaatcccagctactagggaggctgaggcaggagaatcgcttgaacctgggaggcggaggttgcagtgagctgagatcacgccattgcactccagcctgggcaagaagagcaaaaatccgtctcaaaaaaaaaaaaaatcttttcagcttcgtgagagatttgaaaaagtagtatcataagacattgtcagtgaattctgacttttaaacatgacatattagaatcttcattttccacagtcatattttcctcattaaactagtgatctacaatatgcctgatattgtctaggtctcaaaacacttcttgtctttgacagcagttcgaaaacttgagtaggactgttttataagagtcaattccagtttgataaggaaa

SEQ ID NO: 404369 - DNA, 4292 bp, Homo sapiens
ctcgacgccagcctaggcaaaaggcaatgtatctaaacgaaaagaaaataggctttctccgctctaccgcctcgggcagccacacctccacacttccggcggtgtaccggccaaatgccgcctgccagcaacttccgtcctcctagctaaaagcggaaaacagaggctcggaaccgctgcgtggttcttgctcttcactcggccgttttaaagggtgactctttcctgtcccggcctgcgtggtgtgggcttgtgggtctttgagacccgaaaattgagagcgttttcgcactccagcggctgctcctggcggctctgcggccgtcaccatgccacagaatgaatatattgaattacaccgtaaacgctatggataccgtttggattaccatgagaaaaagagaaagaaggaaagtcgagaggctcatgaacgttcaaagaaggcaaagaaaatgattggtctgaaggctaagctttaccataaacagcgtcatgctgagaaaatacaaatgaaaaagactatcaagatgcatgaaaagagaaacaccaaacaaaagaatgatgaaaagacaccacagggagcagtacctgcctatctgctggacagagagggacaatctcgagctaaagtactttccaatatgattaaacagaaaagaaaagagaaggcgggaaaatgggaagtccctctgcctaaagtacgtgcccagggagaaacagaagtattaaaagttattcgaacaggaaagagaaagaagaaggcatggaagagaatggttactaaagtgtgctttgttggagatggctttacaagaaaaccacctaaatatgaaagattcatcaggccaatgggcttgcgtttcaagaaagcccatgtaacacatcctgaactgaaagccaccttttgcctaccaatacttggtgtaaagaagaatccctcatccccactgtatacaactttgggtgttattaccaaaggtactgtcattgaagtaaatgtgagcgaattgggccttgtgacacaaggaggcaaagttatttggggaaaatatgcccaggttaccaacaatcctgaaaatgatggatgtataaatgcagtcttactggtttgacagcaatttcatatataattattgaggactacacaccaattgaagaaactgccattactgtgatgtttctgaatactaccaaacagccatacatgtctgcaatgaagagatttattaaattgtaaacattaaagtggtccagttttataaatggtctttattttgaaatacgctttgaccccatgttcataaaactgaatgattgaaaaaaagcaaatatacaaatatcctacttcatcaatatctgcatttgtgagtgggtattcagcaatttcctgaaaaaaccaccagtgttcattgaaaatgcctttcaaaaaggttaatacacaattatgtgtctgagaatttaactgaagtatcttcaaaatctcgttaatcattaatcctaaaaaaggtaggtagcattaatacagatgttaagtttatagtgtttgtttacactagaagtatgtgagaagacactaaaagttcagaaatcttagagaaatcttttcacctgtgaaatccagtacagcaaaggtctagtgaattcacattctaaacatttttttcatctcatttaccatgtataataatacctacttggcactattttctacttgaatcatgaaaatgaaaaaaatatactaaagtctttgtactctcttagcattttctgtattctaaacaatatatttatactttcagaatagtattaagaattagtttaagtaactccagctaagttttaaaaggaaaaagaagactgcactgattccctgaggagaaatttatttgcagttacttagatgatgtaaaaaggtaaggatttacggttgtaacttggtgaaagcacttttgtgatctgttatatgttgtggttttaaggatggcgtatattacattaatctataatcaccacattgttttaaattgtttattttttttttaaagaagtctgtcttcagagtacaaccaatgtgattaattgtgcctttaacaaagtcattcaatgtctaaacaaattcagtatctgaaacatcttcatgaggaaaactgaaggaaaggaatttaaaaacacagaccaggaaacaatcacaaaatataggtttaattactacttttaaacttaaaaaaaaataaaaaccaagaaaacaaacataggtactccagtaagacttgctactctgaataatgtaacattttttctaagttctataaatatatactggaagttttagaacacatacagacgcttaggaaaagaaaggctagttccttggaaatgacgatccaggatgatacaatcacttgatgacagaaggtaagcctttcttacaattagattttagcagataattttaccactaatataaatgggtgatgtgtggatcacaagttctagaaggcgaataaaaatactgactccaggtaatttctggatactacaaaaatgaagtttgcttgttttttttagaaccaaaaatactatcttgtaaggtacaaagaaagcttgatattaagtatgaaaacataagcataacatttgtaactaatcacacccatgaaagacgactagatgacacctgaaacatttttcaaaatactgtaacacagatgagtaatattagtataaattttttatgtacattaagatctgtttcagtttgctggtgtgaccaaaccttagaaggtaatcccaagggataaagcagaacataagagcagatatttagatattagtacaggctcaatttgatgcaatcataaaccttcaagatttctagtcactgaaaccccattgtaggtagtgttctggagtctgctataagtaaatctttaatgactagatgttttccttaccatctacactgaatggaaataccatgaatatagacacattttaagtagaagactgacgttctaaatcatgctgtttgattttataaaaaaatcataatagaccctctcacctttaaaagttgtagaggagctttataataaattcttaaatatactaatttctgtgatgtctagcaattgaataatttaaacttgaaagaactaaaatactaataaccatctgctttatattacacaaggaaatatacacgtatgtacataaaaagtgaactcccttcacaaataagttcacaaaggactatgtgtaatgtgactggacattcaacaactagactagccggttgaaatcacattttcagtcctctgtaattgtgaaattttttctaatgccttgcaaaaactacagataactgattaagttcatgtaggttccttattgaagataaattgtggtataaattctatactcaagttactgaacatgagagttaggtttttccaagtgatctaacttttccctctataatctataaaccccaaaataacaatttctgtcagagagaatctgtaacagaagtgttcttgtgtgctgaacaaaaaacttctaaattgtttacaattcacttactatttaacccaaacaagtttaacaagaataagtttatactgttagcccccaatggtcatatatgattaataaacattttttgtaaactcaactatattcacacatcaagagttgagccagtgagctcaatctttaaaaaactacacttgtctaaagaaagtcttttagtgctcacttcggcagcacatatactaaaattagaacaatacagggaaaattagcatggcccctgtgcaaggatgacacaaattcatgaagcgtttccatgtttaaaataatttgaaaagaaagtattttaaacaaatccaagtaaaaataaaatatctacaagtgttttcaaatctaagaaatgaaacatgtaaagattaagaatttactgaatcttaacagagtatttccctttgtgatattgacagaagtttctcataaaatgtataaaacagcataaatgtttggtagattcactaatagtagtcatacttttttttttttacttagtattagcatttgttgaaaaaataaatggccaaagtgctttaattttcatttagaatgaaataatctggcttacctttgactaattaaagaaaatatagggtaatacaattgttcaaaatctaacacaaataggagcgtttactatttttgtctgctttaagattttaacttgatcgaaaataccaacatccccaaacaaaatttactgacct

SEQ ID NO: 404370 - DNA, 3908 bp, Homo sapiens
  misc_feature (158)..(158): n is a, c, g, or t
gattagaggatacgagacgagatgagatgaagatgaatgaaccagcagcgatgaaagcagcagctctgcacctgcctcagaggatgaggacgatgaggatgacgaagatgatgaggatgacgatgacgatgaggaagatgactctgaagtataaagcnttgagctcaacgctttatacttctgtttctccacagggagcagtacctgcctatctgctggacagagagggacaatctcgagctaaagtactttccaatatgattaaacagaaaagaaaagagaaggcgggaaaatgggaagtccctctgcctaaagtacgtgcccagggagaaacagaagtattaaaagttattcgaacaggaaagagaaagaagaaggcatggaagagaatggttactaaagtgtgctttgttggagatggctttacaagaaaaccacctaaatatgaaagattcatcaggccaatgggcttgcgtttcaagaaagcccatgtaacacatcctgaactgaaagccaccttttgcctaccaatacttggtgtaaagaagaatccctcatccccactgtatacaactttgggtgttattaccaaaggtactgtcattgaagtaaatgtgagcgaattgggccttgtgacacaaggaggcaaagttatttggggaaaatatgcccaggttaccaacaatcctgaaaatgatggatgtataaatgcagtcttactggtttgacagcaatttcatatataattattgaggactacacaccaattgaagaaactgccattactgtgatgtttctgaatactaccaaacagccatacatgtctgcaatgaagagatttattaaattgtaaacattaaagtggtccagttttataaatggtctttattttgaaatacgctttgaccccatgttcataaaactgaatgattgaaaaaaagcaaatatacaaatatcctacttcatcaatatctgcatttgtgagtgggtattcagcaatttcctgaaaaaaccaccagtgttcattgaaaatgcctttcaaaaaggttaatacacaattatgtgtctgagaatttaactgaagtatcttcaaaatctcgttaatcattaatcctaaaaaaggtaggtagcattaatacagatgttaagtttatagtgtttgtttacactagaagtatgtgagaagacactaaaagttcagaaatcttagagaaatcttttcacctgtgaaatccagtacagcaaaggtctagtgaattcacattctaaacatttttttcatctcatttaccatgtataataatacctacttggcactattttctacttgaatcatgaaaatgaaaaaaatatactaaagtctttgtactctcttagcattttctgtattctaaacaatatatttatactttcagaatagtattaagaattagtttaagtaactccagctaagttttaaaaggaaaaagaagactgcactgattccctgaggagaaatttatttgcagttacttagatgatgtaaaaaggtaaggatttacggttgtaacttggtgaaagcacttttgtgatctgttatatgttgtggttttaaggatggcgtatattacattaatctataatcaccacattgttttaaattgtttattttttttttaaagaagtctgtcttcagagtacaaccaatgtgattaattgtgcctttaacaaagtcattcaatgtctaaacaaattcagtatctgaaacatcttcatgaggaaaactgaaggaaaggaatttaaaaacacagaccaggaaacaatcacaaaatataggtttaattactacttttaaacttaaaaaaaaataaaaaccaagaaaacaaacataggtactccagtaagacttgctactctgaataatgtaacattttttctaagttctataaatatatactggaagttttagaacacatacagacgcttaggaaaagaaaggctagttccttggaaatgacgatccaggatgatacaatcacttgatgacagaaggtaagcctttcttacaattagattttagcagataattttaccactaatataaatgggtgatgtgtggatcacaagttctagaaggcgaataaaaatactgactccaggtaatttctggatactacaaaaatgaagtttgcttgttttttttagaaccaaaaatactatcttgtaaggtacaaagaaagcttgatattaagtatgaaaacataagcataacatttgtaactaatcacacccatgaaagacgactagatgacacctgaaacatttttcaaaatactgtaacacagatgagtaatattagtataaattttttatgtacattaagatctgtttcagtttgctggtgtgaccaaaccttagaaggtaatcccaagggataaagcagaacataagagcagatatttagatattagtacaggctcaatttgatgcaatcataaaccttcaagatttctagtcactgaaaccccattgtaggtagtgttctggagtctgctataagtaaatctttaatgactagatgttttccttaccatctacactgaatggaaataccatgaatatagacacattttaagtagaagactgacgttctaaatcatgctgtttgattttataaaaaaatcataatagaccctctcacctttaaaagttgtagaggagctttataataaattcttaaatatactaatttctgtgatgtctagcaattgaataatttaaacttgaaagaactaaaatactaataaccatctgctttatattacacaaggaaatatacacgtatgtacataaaaagtgaactcccttcacaaataagttcacaaaggactatgtgtaatgtgactggacattcaacaactagactagccggttgaaatcacattttcagtcctctgtaattgtgaaattttttctaatgccttgcaaaaactacagataactgattaagttcatgtaggttccttattgaagataaattgtggtataaattctatactcaagttactgaacatgagagttaggtttttccaagtgatctaacttttccctctataatctataaaccccaaaataacaatttctgtcagagagaatctgtaacagaagtgttcttgtgtgctgaacaaaaaacttctaaattgtttacaattcacttactatttaacccaaacaagtttaacaagaataagtttatactgttagcccccaatggtcatatatgattaataaacattttttgtaaactcaactatattcacacatcaagagttgagccagtgagctcaatctttaaaaaactacacttgtctaaagaaagtcttttagtgctcacttcggcagcacatatactaaaattagaacaatacagggaaaattagcatggcccctgtgcaaggatgacacaaattcatgaagcgtttccatgtttaaaataatttgaaaagaaagtattttaaacaaatccaagtaaaaataaaatatctacaagtgttttcaaatctaagaaatgaaacatgtaaagattaagaatttactgaatcttaacagagtatttccctttgtgatattgacagaagtttctcataaaatgtataaaacagcataaatgtttggtagattcactaatagtagtcatacttttttttttttacttagtattagcatttgttgaaaaaataaatggccaaagtgctttaattttcatttagaatgaaataatctggcttacctttgactaattaaagaaaatatagggtaatacaattgttcaaaatctaacacaaataggagcgtttactatttttgtctgctttaagattttaacttgatcgaaaataccaacatccccaaacaaaatttactgacct

SEQ ID NO: 404371 - DNA, 3690 bp, Homo sapiens
tcttactaaatgtgtagagagcgcactcgagctaagtacttccatatgttaacagaaagacagagaggcggaaaatgggaagtccctctgcctaaagtacgtgcccagggagaaacagaagtattaaaagttattcgaacaggaaagagaaagaagaaggcatggaagagaatggttactaaagtgtgctttgttggagatggctttacaagaaaaccacctaaatatgaaagattcatcaggccaatgggcttgcgtttcaagaaagcccatgtaacacatcctgaactgaaagccaccttttgcctaccaatacttggtgtaaagaagaatccctcatccccactgtatacaactttgggtgttattaccaaaggtactgtcattgaagtaaatgtgagcgaattgggccttgtgacacaaggaggcaaagttatttggggaaaatatgcccaggttaccaacaatcctgaaaatgatggatgtataaatgcagtcttactggtttgacagcaatttcatatataattattgaggactacacaccaattgaagaaactgccattactgtgatgtttctgaatactaccaaacagccatacatgtctgcaatgaagagatttattaaattgtaaacattaaagtggtccagttttataaatggtctttattttgaaatacgctttgaccccatgttcataaaactgaatgattgaaaaaaagcaaatatacaaatatcctacttcatcaatatctgcatttgtgagtgggtattcagcaatttcctgaaaaaaccaccagtgttcattgaaaatgcctttcaaaaaggttaatacacaattatgtgtctgagaatttaactgaagtatcttcaaaatctcgttaatcattaatcctaaaaaaggtaggtagcattaatacagatgttaagtttatagtgtttgtttacactagaagtatgtgagaagacactaaaagttcagaaatcttagagaaatcttttcacctgtgaaatccagtacagcaaaggtctagtgaattcacattctaaacatttttttcatctcatttaccatgtataataatacctacttggcactattttctacttgaatcatgaaaatgaaaaaaatatactaaagtctttgtactctcttagcattttctgtattctaaacaatatatttatactttcagaatagtattaagaattagtttaagtaactccagctaagttttaaaaggaaaaagaagactgcactgattccctgaggagaaatttatttgcagttacttagatgatgtaaaaaggtaaggatttacggttgtaacttggtgaaagcacttttgtgatctgttatatgttgtggttttaaggatggcgtatattacattaatctataatcaccacattgttttaaattgtttattttttttttaaagaagtctgtcttcagagtacaaccaatgtgattaattgtgcctttaacaaagtcattcaatgtctaaacaaattcagtatctgaaacatcttcatgaggaaaactgaaggaaaggaatttaaaaacacagaccaggaaacaatcacaaaatataggtttaattactacttttaaacttaaaaaaaaataaaaaccaagaaaacaaacataggtactccagtaagacttgctactctgaataatgtaacattttttctaagttctataaatatatactggaagttttagaacacatacagacgcttaggaaaagaaaggctagttccttggaaatgacgatccaggatgatacaatcacttgatgacagaaggtaagcctttcttacaattagattttagcagataattttaccactaatataaatgggtgatgtgtggatcacaagttctagaaggcgaataaaaatactgactccaggtaatttctggatactacaaaaatgaagtttgcttgttttttttagaaccaaaaatactatcttgtaaggtacaaagaaagcttgatattaagtatgaaaacataagcataacatttgtaactaatcacacccatgaaagacgactagatgacacctgaaacatttttcaaaatactgtaacacagatgagtaatattagtataaattttttatgtacattaagatctgtttcagtttgctggtgtgaccaaaccttagaaggtaatcccaagggataaagcagaacataagagcagatatttagatattagtacaggctcaatttgatgcaatcataaaccttcaagatttctagtcactgaaaccccattgtaggtagtgttctggagtctgctataagtaaatctttaatgactagatgttttccttaccatctacactgaatggaaataccatgaatatagacacattttaagtagaagactgacgttctaaatcatgctgtttgattttataaaaaaatcataatagaccctctcacctttaaaagttgtagaggagctttataataaattcttaaatatactaatttctgtgatgtctagcaattgaataatttaaacttgaaagaactaaaatactaataaccatctgctttatattacacaaggaaatatacacgtatgtacataaaaagtgaactcccttcacaaataagttcacaaaggactatgtgtaatgtgactggacattcaacaactagactagccggttgaaatcacattttcagtcctctgtaattgtgaaattttttctaatgccttgcaaaaactacagataactgattaagttcatgtaggttccttattgaagataaattgtggtataaattctatactcaagttactgaacatgagagttaggtttttccaagtgatctaacttttccctctataatctataaaccccaaaataacaatttctgtcagagagaatctgtaacagaagtgttcttgtgtgctgaacaaaaaacttctaaattgtttacaattcacttactatttaacccaaacaagtttaacaagaataagtttatactgttagcccccaatggtcatatatgattaataaacattttttgtaaactcaactatattcacacatcaagagttgagccagtgagctcaatctttaaaaaactacacttgtctaaagaaagtcttttagtgctcacttcggcagcacatatactaaaattagaacaatacagggaaaattagcatggcccctgtgcaaggatgacacaaattcatgaagcgtttccatgtttaaaataatttgaaaagaaagtattttaaacaaatccaagtaaaaataaaatatctacaagtgttttcaaatctaagaaatgaaacatgtaaagattaagaatttactgaatcttaacagagtatttccctttgtgatattgacagaagtttctcataaaatgtataaaacagcataaatgtttggtagattcactaatagtagtcatacttttttttttttacttagtattagcatttgttgaaaaaataaatggccaaagtgctttaattttcatttagaatgaaataatctggcttacctttgactaattaaagaaaatatagggtaatacaattgttcaaaatctaacacaaataggagcgtttactatttttgtctgctttaagattttaacttgatcgaaaataccaacatccccaaacaaaatttactgacct

SEQ ID NO: 404372 - DNA, 1242 bp, Homo sapiens
ctcgacgccagcctaggcaaaaggcaatgtatctaaacgaaaagaaaataggctttctccgctctaccgcctcgggcagccacacctccacacttccggcggtgtaccggccaaatgccgcctgccagcaacttccgtcctcctagctaaaagcggaaaacagaggctcggaaccgctgcgtggttcttgctcttcactcggccgttttaaagggtgactctttcctgtcccggcctgcgtggtgtgggcttgtgggtctttgagacccgaaaattgagagcgttttcgcactccagcggctgctcctggcggctctgcggccgtcaccatgccacagaatgaatatattgaattacaccgtaaacgctatggataccgtttggattaccatgagaaaaagagaaagaaggaaagtcgagaggctcatgaacgttcaaagaaggcaaagaaaatgattggtctgaaggctaagctttaccataaacagcgtcatgctgagaaaatacaaatgaaaaagactatcaagatgcatgaaaagagaaacaccaaacaaaagaatgatgaaaagacaccacagggagcagtacctgcctatctgctggacagagagggacaatctcgagctaaagtactttccaatatgattaaacagaaaagaaaagagaaggcgggaaaatgggaagtccctctgcctaaagtacgtgcccagggagaaacagaagtattaaaagttattcgaacaggaaagagaaagaagaaggcatggaagagaatggttactaaagtgtgctttgttggagatggctttacaagaaaaccacctaaatatgaaagattcatcaggccaatgggcttgcgtttcaagaaagcccatgtaacacatcctgaactgaaagccaccttttgcctaccaatacttggtgtaaagaagaatccctcatccccactgtatacaactttgggtgttattaccaaaggtactgtcattgaagtaaatgtgagcgaatttgtgacgcagagcaagtattggggaaatatgccaggtacacatctgaaatggaggtgttaatgcgcctacggttgcagcattctttatttgggctaacccattgaaatgctcgggtgttgatataccacaagctaagtgggggagtttaatggcttgggaaaaaaaaaaaacggttttgggaaaaagggttttcctttaagaggcttgttacttaaaaaaaaaataatataaa

SEQ ID NO: 404373 - DNA, 4536 bp, Homo sapiens
ctcgacgccagcctaggcaaaaggcaatgtatctaaacgaaaagaaaataggctttctccgctctaccgcctcgggcagccacacctccacacttccggcggtgtaccggccaaatgccgcctgccagcaacttccgtcctcctagctaaaagcggaaaacagaggctcggaaccgctgcgtggttcttgctcttcactcggccgttttaaagggtgactctttcctgtcccggcctgcgtggtgtgggcttgtgggtctttgagacccgaaaattgagagcgttttcgcactccagcggctgctcctggcggctctgcggccgtcaccatgccacagaatgaatatattgaattacaccgtaaacgctatggataccgtttggattaccatgagaaaaagagaaagaaggaaagtcgagaggctcatgaacgttcaaagaaggcaaagaaaatgattggtctgaaggctaagctttaccataaacagcgtcatgctgagaaaatacaaatgaaaaagactatcaagatgcatgaaaagagaaacaccaaacaaaagaatgatgaaaagacaccacagggagcagtacctgcctatctgctggacagagagggacaatctcgagctaaagtactttccaatatgattaaacagaaaagaaaagagaaggcgggaaaatgggaagtccctctgcctaaagtacgtgcccagggagaaacagaagtattaaaagttattcgaacaggaaagagaaagaagaaggcatggaagagaatggttactaaagtgtgctttgttggagatggctttacaagaaaaccacctaaatatgaaagattcatcaggccaatgcagttcgaaaacttgagtaggactgttttataagagtcaattccagtttgataaggaaagtatctaaatgcttttgaaaatcattgaaaagccgggcgcggtggctcacgcctgtaatcccagcactttgggaggccgatgcaggcagatcacgaggtcaggatggtctcgatctccgtgatccgcccgccttagcctcccaaagtgttggaattacaggcatgagccaccgtgcccggccaacggcttgcgtttcaagaaagcccatgtaacacatcctgaactgaaagccaccttttgcctaccaatacttggtgtaaagaagaatccctcatccccactgtatacaactttgggtgttattaccaaaggtactgtcattgaagtaaatgtgagcgaattgggccttgtgacacaaggaggcaaagttatttggggaaaatatgcccaggttaccaacaatcctgaaaatgatggatgtataaatgcagtcttactggtttgacagcaatttcatatataattattgaggactacacaccaattgaagaaactgccattactgtgatgtttctgaatactaccaaacagccatacatgtctgcaatgaagagatttattaaattgtaaacattaaagtggtccagttttataaatggtctttattttgaaatacgctttgaccccatgttcataaaactgaatgattgaaaaaaagcaaatatacaaatatcctacttcatcaatatctgcatttgtgagtgggtattcagcaatttcctgaaaaaaccaccagtgttcattgaaaatgcctttcaaaaaggttaatacacaattatgtgtctgagaatttaactgaagtatcttcaaaatctcgttaatcattaatcctaaaaaaggtaggtagcattaatacagatgttaagtttatagtgtttgtttacactagaagtatgtgagaagacactaaaagttcagaaatcttagagaaatcttttcacctgtgaaatccagtacagcaaaggtctagtgaattcacattctaaacatttttttcatctcatttaccatgtataataatacctacttggcactattttctacttgaatcatgaaaatgaaaaaaatatactaaagtctttgtactctcttagcattttctgtattctaaacaatatatttatactttcagaatagtattaagaattagtttaagtaactccagctaagttttaaaaggaaaaagaagactgcactgattccctgaggagaaatttatttgcagttacttagatgatgtaaaaaggtaaggatttacggttgtaacttggtgaaagcacttttgtgatctgttatatgttgtggttttaaggatggcgtatattacattaatctataatcaccacattgttttaaattgtttattttttttttaaagaagtctgtcttcagagtacaaccaatgtgattaattgtgcctttaacaaagtcattcaatgtctaaacaaattcagtatctgaaacatcttcatgaggaaaactgaaggaaaggaatttaaaaacacagaccaggaaacaatcacaaaatataggtttaattactacttttaaacttaaaaaaaaataaaaaccaagaaaacaaacataggtactccagtaagacttgctactctgaataatgtaacattttttctaagttctataaatatatactggaagttttagaacacatacagacgcttaggaaaagaaaggctagttccttggaaatgacgatccaggatgatacaatcacttgatgacagaaggtaagcctttcttacaattagattttagcagataattttaccactaatataaatgggtgatgtgtggatcacaagttctagaaggcgaataaaaatactgactccaggtaatttctggatactacaaaaatgaagtttgcttgttttttttagaaccaaaaatactatcttgtaaggtacaaagaaagcttgatattaagtatgaaaacataagcataacatttgtaactaatcacacccatgaaagacgactagatgacacctgaaacatttttcaaaatactgtaacacagatgagtaatattagtataaattttttatgtacattaagatctgtttcagtttgctggtgtgaccaaaccttagaaggtaatcccaagggataaagcagaacataagagcagatatttagatattagtacaggctcaatttgatgcaatcataaaccttcaagatttctagtcactgaaaccccattgtaggtagtgttctggagtctgctataagtaaatctttaatgactagatgttttccttaccatctacactgaatggaaataccatgaatatagacacattttaagtagaagactgacgttctaaatcatgctgtttgattttataaaaaaatcataatagaccctctcacctttaaaagttgtagaggagctttataataaattcttaaatatactaatttctgtgatgtctagcaattgaataatttaaacttgaaagaactaaaatactaataaccatctgctttatattacacaaggaaatatacacgtatgtacataaaaagtgaactcccttcacaaataagttcacaaaggactatgtgtaatgtgactggacattcaacaactagactagccggttgaaatcacattttcagtcctctgtaattgtgaaattttttctaatgccttgcaaaaactacagataactgattaagttcatgtaggttccttattgaagataaattgtggtataaattctatactcaagttactgaacatgagagttaggtttttccaagtgatctaacttttccctctataatctataaaccccaaaataacaatttctgtcagagagaatctgtaacagaagtgttcttgtgtgctgaacaaaaaacttctaaattgtttacaattcacttactatttaacccaaacaagtttaacaagaataagtttatactgttagcccccaatggtcatatatgattaataaacattttttgtaaactcaactatattcacacatcaagagttgagccagtgagctcaatctttaaaaaactacacttgtctaaagaaagtcttttagtgctcacttcggcagcacatatactaaaattagaacaatacagggaaaattagcatggcccctgtgcaaggatgacacaaattcatgaagcgtttccatgtttaaaataatttgaaaagaaagtattttaaacaaatccaagtaaaaataaaatatctacaagtgttttcaaatctaagaaatgaaacatgtaaagattaagaatttactgaatcttaacagagtatttccctttgtgatattgacagaagtttctcataaaatgtataaaacagcataaatgtttggtagattcactaatagtagtcatacttttttttttttacttagtattagcatttgttgaaaaaataaatggccaaagtgctttaattttcatttagaatgaaataatctggcttacctttgactaattaaagaaaatatagggtaatacaattgttcaaaatctaacacaaataggagcgtttactatttttgtctgctttaagattttaacttgatcgaaaataccaacatccccaaacaaaatttactgacct

SEQ ID NO: 404374 - DNA, 385 bp, Homo sapiens
tttctatccagattctgaattttgtgtttgtcatttcagctatttcagactggttaagaaccatttctagggagctagtgatccatttggatgtaaggggatgctgtggttttttgaattgccagagttcttgtgctgattctttctcatctgatagggttggtgttcctttaactgcggggtaagttgagtatggtcagttggattcatttctggatgctttcagagggccagggctctgtacagaatccgcatatgtgggtgaattcttgcacctggtttcacatcttgcatatataattagcatgataattttagtgtggtagtttgtgccgtgatccagtagatggcgcttaagagtaatggccgatagctaggctaacac

SEQ ID NO: 404375 - DNA, 468 bp, Homo sapiens
agtactactttctacccacacagggattggctaaataaaaggaataaatactgaaagtgcaggtatagaggactatttctctccttttttgttaaattgtggtaaaatatgtaacatatagtttcctgtcttcaccatttttaagcttacagttctgtggcattaagtatatccacattgttgtgcagtcgccaccaccatccgtctccagagctcttcatcttgcaaaacagcacctctgtacacattaaacaatagccaccactgtcctcttccccctgcctcatggcagcccccgttccagtttctgtctctgaatttgactactctgggtacctcacaggagtggaatcacacagtcctcatccttttgtgtgtgggttgtttcacttatagtatcttcaaggttcatccgtgttacattgtgtctcagaattcccttcccttttacagcatctcaattcagat

SEQ ID NO: 404376 - DNA, 90 bp, Homo sapiens
cccagcagccatcacggcccagcaaccgagccgctgccctgcctcccaagcccgcccggcccccagccgtgtcaccagccttgacccaaa

SEQ ID NO: 404377 - DNA, 414 bp, Homo sapiens
tgaacccgggaggcagaggttgccgtgagccgagatcgcgccactgcactcctgcccgggcgacagagcaagactccgtctcaaaaaaacaaaacaaacaaaaaaacacacagagagaaccagggcggcacttccgtatttacgattaagaatcaacctgtttctcctgtctatttacatgaagttggttcagcagaaaaatattaagaaccagaaaatgcaaacctagggtctgggggtttttttggtttgtttttttggggcttttttgctttttactaggggaggatatggccaaaatagtttcaggtcttttgcttgggcttgcagatttgaaactatgaagcaaaattctctacagaagaaatttacttcacaagatataaaattagctcaaagtttctattattatca

SEQ ID NO: 404378 - DNA, 409 bp, Homo sapiens
gtatagccatcctagtagatgtgaagtgctatctcattgtggttttaatttgtatttccccaatggctagtgatgttgagcctcttttcatgtgattgttggctatttatatgtctttggagaaatgtctattcagatctcttgcccatttttaaattggattgtctttttgttattgagttgtgatagtattttctttttaattatgaaattggtagttgttttgaccaagtaagtttgctaggtcaaaatctagaagtggttcttatattggagataatattctgcagattaatctaaagatctcttttaagatgtctctttaaaattctatactctagaatggtacatttccaggatcggcaccaattctaggtcgacgcggccgcgaatttagtagtagtagtcg

SEQ ID NO: 404379 - DNA, 1173 bp, Homo sapiens
  misc_feature (429)..(429): n is a, c, g, or t
cctctcttccagggctgccgtccacactctcccggtcagagtcctgggaccacatggggacgctgccatggcttcttgccttcttcattctgggtctccaggcttgggatactcccaccatcgtctcccgcaaggagtggggggcaagaccgctcgcctgcagggccctgctgaccctgcctgtggcctacatcatcacagaccagctcccagggatgcagtgccagcagcagagcgtttgcagccagatgctgcgggggttgcagtcccattccgtctacaccataggctggtgcgacgtggcgtacaacttcctggttggggatgatggcagggtgtatgaaggtgttggctggaacatccaaggcttgcacacccagggctacaacaacatttccctgggcatcgccttctttggcaataagatangcagcagtcccagccctgctgccttatcagctgcagagggtctgatctcctatgccatccagaagggtcacctgtcgcccaggtatattcagccacttcttctgaaagaagagacctgcctggaccctcaacatccagtgatgcccaggaaggtttgccccaacatcatcaaacgatctgcttgggaagccagagagacacactgccctaaaatgaacctcccagccaaatatgtcatcatcatccacaccgctggcacaagctgcactgtatccacagactgccagactgtcgtccgaaacatacagtcctttcacatggacacacggaacttttgtgacattggatatcacttcctggtgggccaggatggtggcgtgtatgaaggggttggatggcacatccaaggctctcacacttatggattcaacgatattgccctaggaattgccttcatcggctactttgtagaaaagcctccaaatgctgcagcgctggaggcggcccaggacctgatccagtgtgccgtggttgaggggtacctgactccaaactacctgctgatgggccacagtgacgtggtcaacatcctgtcccctgggcaggctttgtataacatcatcagcacctggcctcatttcaagcactgaaggaggccccactccctttgagactgccctccctcccctgctgggtctctccaaccctcaccagccaagctggctcagcaccttgtgtccccct

SEQ ID NO: 404380 - DNA, 373 bp, Homo sapiens
tgaggatccccaaaagtgcactcttctatatctacaaccgaaagaacagaattcaagttctagttctgatgtttattatatatgttggatcttgggcaacttacttgatttctcggaaattcatttgttactgtaaacgtgaaagctattaagattcaaatgaatggttttacagcaggtaacatgtgagaagacagctacatatttgtaaagccaaaccaacaaagaaatatagcaaaattcacaggtagatttattacaagaaatgtcctttcatgggggaagtaacattttcactagtgaaaaagcaaaaaacaaaaatagctttaagtgagaaaactaatttgtaaagggcaagagaaaaaagctgatg

SEQ ID NO: 404381 - DNA, 1769 bp, Homo sapiens
  misc_feature (29)..(29): n is a, c, g, or t
taccatcgctaggtcgaggctgggtgttnctctgcccgtcttctgggaagggagaatggcggcgcccgggctgcggctgggagcgggaagactctttgaaatgcctgcggtgctagagcgactgagccgctataatagcacgtcccaagcttttgctgaggtgctgcggctgccgaagcagcagctgaggaagctgctgtacccgctgcaggaagtagagcggttcctcgccccctacgggaggcaagaccttcacctgcgtatctttgacccaagcccggaggacatagccagggcggacaacatcttcacggccactgaacggaaccgcatcgactacgtcagctccgccgtccgtatcgaccacgccccggaccttccgcggccagaggtgtgttttataggcagaagcaatgttggaaaatcatctctaatcaaggctttattttcactggcccctgaggttgaagtcagagtctccaaaaaaccaggacacacaaagaaaatgaattttttcaaagttggaaaacattttacagtggtggacatgccaggttatggctttagagcacctgaagattttgttgacatggtagagacctatctaaaagaacgaaggaacttgaagagaacatttttattagtggatagcgttgttggaattcaaaaaacagacaatattgccatagaaatgtgtgaagaatttgcattaccttatgtgattgtattaacaaaaattgacaaatcttccaagggacatcttttaaaacaagtgcttcagatccagaaatttgttaacatgaaaactcaaggatgttttcctcagttgtttcctgtaagtgctgtgaccttttctggaatccacctgttgagatgctttatagccagtgtaacaggaagtcttgactaatggttcccggtttagctgaagattcaaaaaaaaaaaaaaaagctttatgctaactggagttaaatacctagaagaatttcaacattgttttaaatgttgtgcatctgtaacttcaggaggatcacttgagctttaaaacctgtgccttctcgaaacaagaatttgtgcctgaggtgaaaaaagtttgtaagttattgaattatggtgttcattagaacagctactagctgattcccctattttaacaaactgacaagagcacatccataaaatgaaaacctgttacaactatgtacagaagggtttgacgttttattgggcttttgtcttttaaagaatatgtctactatgggtatttttttttaaatgttaaaatgggctaggtaaaagggggctgcttttctgttaagcatcgataggtaagttgatggataaaagttactatgtaagcctatttttttgagtccttatttgaatattgaaaacattcttgataaaatgtgttagtccatgttggaaacaaccgaaagaacagaattcaagttctagttctgatgtttattatatatgttggatcttgggcaacttacttgatttctcggaaattcatttgttactgtaaacgtgaaagctattaagattcaaatgaatggttttacagcaggtaacatgtgagaagacagctacatatttgtaaagccaaaccaacaaagaaatatagcaaaattcacaggtagatttattacaagaaatgtcctttcatgggggaagtaacattttcactagtgaaaaagcaaaaaacaaaaatagctttaagtgagaaaactaatttgtaaagggcaagagaaaaaagctgatg

SEQ ID NO: 404382 - DNA, 1044 bp, Homo sapiens
  misc_feature (973)..(973): n is a, c, g, or t
gcgtcgcggcagcgggaagtcacgcacgcgcaacccaggccacaggagtaaaatctctctgcccgtcttctgggaagggagaatggcggcgcccgggctgcggctgggagcgggaagactctttgaaatgcctgcggtgctagagcgactgagccgctataatagcacgtcccaagcttttgctgaggtgctgcggctgccgaagcagcagctgaggaagctgctgtacccgctgcaggaagtagagcggttcctcgccccctacgggaggcaagaccttcacctgcgtatctttgacccaagcccggaggacatagccagggcggacaacatcttcacggccactgaacggaaccgcatcgactacgtcagctccgccgtccgtatcgaccacgccccggaccttccgcggccagaggtgtgttttataggcagaagcaatgttggaaaatcatctctaatcaaggctttattttcactggcccctgaggttgaagtcagagtctccaaaaaaccaggacacacaaagaaaatgaattttttcaaagttggaaaacattttacagtggtggacatgccaggttatggctttagagcacctgaagattttgttgacatggtagagacctatctaaaagaacgaaggaacttgaagagaacatttttattagtggatagcgttgttggaattcaaaaaacagacaatattgccatagaaatgtgtgaagaatttgcattaccttatgtgattgtattaacaaaaattgacaaatcttccaagggacatcttttaaaacaagtgcttcagatccagaaatttgttaacatgaaaactcaaggatgttttcctcagttgtttcctgtaagtgctgtgaccttttctggaatccacctgttgagatgctttatagccagtgtaacaggaagtcttgactaatggttcccggtttagctgaagattcaaaaaaaaacncgggttttgtgggggaaaggggaggcggtggtcgcccctggaaagggaatcgccaagggattcaccataga

SEQ ID NO: 404383 - DNA, 1521 bp, Homo sapiens
attttgcggttgtattttctagctttatgttggcgcatatattattttaactcaataggcatatgtcgatgctccctgtacgtggggatacccgagaaacccattgttaagtacaaaatgcagtcaatacccataaacccatggtgtgttttataggcagaagcaatgttggaaaatcatctctaatcaaggctttattttcactggcccctgaggttgaagtcagagtctccaaaaaaccaggacacacaaagaaaatgaattttttcaaagttggaaaacattttacagtggtggacatgccaggttatggctttagagcacctgaagattttgttgacatggtagagacctatctaaaagaacgaaggaacttgaagagaacatttttattagtggatagcgttgttggaattcaaaaaacagacaatattgccatagaaatgtgtgaagaatttgcattaccttatgtgattgtattaacaaaaattgacaaatcttccaagggacatcttttaaaacaagtgcttcagatccagaaatttgttaacatgaaaactcaaggatgttttcctcagttgtttcctgtaagtgctgtgaccttttctggaatccacctgttgagatgctttatagccagtgtaacaggaagtcttgactaatggttcccggtttagctgaagattcaaaaaaaaaaaaaaaagctttatgctaactggagttaaatacctagaagaatttcaacattgttttaaatgttgtgcatctgtaacttcaggaggatcacttgagctttaaaacctgtgccttctcgaaacaagaatttgtgcctgaggtgaaaaaagtttgtaagttattgaattatggtgttcattagaacagctactagctgattcccctattttaacaaactgacaagagcacatccataaaatgaaaacctgttacaactatgtacagaagggtttgacgttttattgggcttttgtcttttaaagaatatgtctactatgggtatttttttttaaatgttaaaatgggctaggtaaaagggggctgcttttctgttaagcatcgataggtaagttgatggataaaagttactatgtaagcctatttttttgagtccttatttgaatattgaaaacattcttgataaaatgtgttagtccatgttggaaacaaccgaaagaacagaattcaagttctagttctgatgtttattatatatgttggatcttgggcaacttacttgatttctcggaaattcatttgttactgtaaacgtgaaagctattaagattcaaatgaatggttttacagcaggtaacatgtgagaagacagctacatatttgtaaagccaaaccaacaaagaaatatagcaaaattcacaggtagatttattacaagaaatgtcctttcatgggggaagtaacattttcactagtgaaaaagcaaaaaacaaaaatagctttaagtgagaaaactaatttgtaaagggcaagagaaaaaagctgatg

SEQ ID NO: 404384 - DNA, 1670 bp, Homo sapiens
  misc_feature (29)..(29): n is a, c, g, or t
taccatcgctaggtcgaggctgggtgttnctctgcccgtcttctgggaagggagaatggcggcgcccgggctgcggctgggagcgggaagactctttgaaatgcctgcggtgctagagcgactgagccgctataatagcacgtcccaagcttttgctgaggtgctgcggctgccgaagcagcagctgaggaagctgctgtacccgctgcaggaagtagagcggttcctcgccccctacgggaggcaagaccttcacctgcgtatctttgacccaagcccggaggacatagccagggcggacaacatcttcacggccactgaacggaaccgcatcgactacgtcagctccgccgtccgtatcgaccacgccccggaccttccgcggccagagggacacacaaagaaaatgaattttttcaaagttggaaaacattttacagtggtggacatgccaggttatggctttagagcacctgaagattttgttgacatggtagagacctatctaaaagaacgaaggaacttgaagagaacatttttattagtggatagcgttgttggaattcaaaaaacagacaatattgccatagaaatgtgtgaagaatttgcattaccttatgtgattgtattaacaaaaattgacaaatcttccaagggacatcttttaaaacaagtgcttcagatccagaaatttgttaacatgaaaactcaaggatgttttcctcagttgtttcctgtaagtgctgtgaccttttctggaatccacctgttgagatgctttatagccagtgtaacaggaagtcttgactaatggttcccggtttagctgaagattcaaaaaaaaaaaaaaaagctttatgctaactggagttaaatacctagaagaatttcaacattgttttaaatgttgtgcatctgtaacttcaggaggatcacttgagctttaaaacctgtgccttctcgaaacaagaatttgtgcctgaggtgaaaaaagtttgtaagttattgaattatggtgttcattagaacagctactagctgattcccctattttaacaaactgacaagagcacatccataaaatgaaaacctgttacaactatgtacagaagggtttgacgttttattgggcttttgtcttttaaagaatatgtctactatgggtatttttttttaaatgttaaaatgggctaggtaaaagggggctgcttttctgttaagcatcgataggtaagttgatggataaaagttactatgtaagcctatttttttgagtccttatttgaatattgaaaacattcttgataaaatgtgttagtccatgttggaaacaaccgaaagaacagaattcaagttctagttctgatgtttattatatatgttggatcttgggcaacttacttgatttctcggaaattcatttgttactgtaaacgtgaaagctattaagattcaaatgaatggttttacagcaggtaacatgtgagaagacagctacatatttgtaaagccaaaccaacaaagaaatatagcaaaattcacaggtagatttattacaagaaatgtcctttcatgggggaagtaacattttcactagtgaaaaagcaaaaaacaaaaatagctttaagtgagaaaactaatttgtaaagggcaagagaaaaaagctgatg

SEQ ID NO: 404385 - DNA, 1796 bp, Homo sapiens
gcgtcgcggcagcgggaagtcacgcacgcgcaacccaggccacaggagtaaaatctctctgcccgtcttctgggaagggagaatggcggcgcccgggctgcggctgggagcgggaagactctttgaaatgcctgcggtgctagagcgactgagccgctataatagcacgtcccaagcttttgctgaggtgctgcggctgccgaagcagcagctgaggaagctgctgtacccgctgcaggaagtagagcggttcctcgccccctacgggaggcaagaccttcacctgcgtatctttgacccaagcccggaggacatagccagggcggacaacatcttcacggccactgaacggaaccgcatcgactacgtcagctccgccgtccgtatcgaccacgccccggaccttccgcggccagaggtgtgttttataggcagaagcaatgttggaaaatcatctctaatcaaggctttattttcactggcccctgaggttgaagtcagagtctccaaaaaaccaggacacacaaagaaaatgaattttttcaaagttggaaaacattttacagtggtggacatgccaggttatggctttagagcacctgaagattttgttgacatggtagagacctatctaaaagaacgaaggaacttgaagagaacatttttattagtggatagcgttgttggaattcaaaaaacagacaatattgccatagaaatgtgtgaagaatttgcattaccttatgtgattgtattaacaaaaattgacaaatcttccaagggacatcttttaaaacaagtgcttcagatccagaaatttgttaacatgaaaactcaaggatgttttcctcagttgtttcctgtaagtgctgtgaccttttctggaatccacctgttgagatgctttatagccagtgtaacaggaagtcttgactaatggttcccggtttagctgaagattcaaaaaaaaaaaaaaaagctttatgctaactggagttaaatacctagaagaatttcaacattgttttaaatgttgtgcatctgtaacttcaggaggatcacttgagctttaaaacctgtgccttctcgaaacaagaatttgtgcctgaggtgaaaaaagtttgtaagttattgaattatggtgttcattagaacagctactagctgattcccctattttaacaaactgacaagagcacatccataaaatgaaaacctgttacaactatgtacagaagggtttgacgttttattgggcttttgtcttttaaagaatatgtctactatgggtatttttttttaaatgttaaaatgggctaggtaaaagggggctgcttttctgttaagcatcgataggtaagttgatggataaaagttactatgtaagcctatttttttgagtccttatttgaatattgaaaacattcttgataaaatgtgttagtccatgttggaaacaaccgaaagaacagaattcaagttctagttctgatgtttattatatatgttggatcttgggcaacttacttgatttctcggaaattcatttgttactgtaaacgtgaaagctattaagattcaaatgaatggttttacagcaggtaacatgtgagaagacagctacatatttgtaaagccaaaccaacaaagaaatatagcaaaattcacaggtagatttattacaagaaatgtcctttcatgggggaagtaacattttcactagtgaaaaagcaaaaaacaaaaatagctttaagtgagaaaactaatttgtaaagggcaagagaaaaaagctgatg

SEQ ID NO: 404386 - DNA, 1842 bp, Homo sapiens
  misc_feature (29)..(29): n is a, c, g, or t
taccatcgctaggtcgaggctgggtgttnctctgcccgtcttctgggaagggagaatggcggcgcccgggctgcggctgggagcgggaagactctttgaaatgcctgcggtgctagagcgactgagccgctataatagcacgtcccaagcttttgctgaggtgctgcggctgccgaagcagcagctgaggaagctgctgtacccgctgcaggaagtagagcggttcctcgccccctacgggaggcaagaccttcacctgcgtatctttgacccaagcccggaggacatagccagggcggacaacatcttcacggccactgaacggaaccgcatcgactacgtcagctccgccgtccgtatcgaccacgccccggaccttccgcggccagaggtgagaggcgattctacggttcacctgcgcgccggcgtcacagcgctaccgcttcctggccgtccggctcgcggtgtgttttataggcagaagcaatgttggaaaatcatctctaatcaaggctttattttcactggcccctgaggttgaagtcagagtctccaaaaaaccaggacacacaaagaaaatgaattttttcaaagttggaaaacattttacagtggtggacatgccaggttatggctttagagcacctgaagattttgttgacatggtagagacctatctaaaagaacgaaggaacttgaagagaacatttttattagtggatagcgttgttggaattcaaaaaacagacaatattgccatagaaatgtgtgaagaatttgcattaccttatgtgattgtattaacaaaaattgacaaatcttccaagggacatcttttaaaacaagtgcttcagatccagaaatttgttaacatgaaaactcaaggatgttttcctcagttgtttcctgtaagtgctgtgaccttttctggaatccacctgttgagatgctttatagccagtgtaacaggaagtcttgactaatggttcccggtttagctgaagattcaaaaaaaaaaaaaaaagctttatgctaactggagttaaatacctagaagaatttcaacattgttttaaatgttgtgcatctgtaacttcaggaggatcacttgagctttaaaacctgtgccttctcgaaacaagaatttgtgcctgaggtgaaaaaagtttgtaagttattgaattatggtgttcattagaacagctactagctgattcccctattttaacaaactgacaagagcacatccataaaatgaaaacctgttacaactatgtacagaagggtttgacgttttattgggcttttgtcttttaaagaatatgtctactatgggtatttttttttaaatgttaaaatgggctaggtaaaagggggctgcttttctgttaagcatcgataggtaagttgatggataaaagttactatgtaagcctatttttttgagtccttatttgaatattgaaaacattcttgataaaatgtgttagtccatgttggaaacaaccgaaagaacagaattcaagttctagttctgatgtttattatatatgttggatcttgggcaacttacttgatttctcggaaattcatttgttactgtaaacgtgaaagctattaagattcaaatgaatggttttacagcaggtaacatgtgagaagacagctacatatttgtaaagccaaaccaacaaagaaatatagcaaaattcacaggtagatttattacaagaaatgtcctttcatgggggaagtaacattttcactagtgaaaaagcaaaaaacaaaaatagctttaagtgagaaaactaatttgtaaagggcaagagaaaaaagctgatg

SEQ ID NO: 404387 - DNA, 1539 bp, Homo sapiens
  misc_feature (29)..(29): n is a, c, g, or t
taccatcgctaggtcgaggctgggtgttnctctgcccgtcttctgggaagggagaatggcggcgcccgggctgcggctgggagcgggaagactctttgaaatgcctgcggtgctagagcgactgagccgctataatagcacgtcccaagcttttgctgaggtgctgcggctgccgaagcagcagctgaggaagctgctgtacccgctgcaggaagtagagcggttcctcgccccctacgggaggcaagaccttcacctgcgtatctttgacccaagcccggaggacatagccagggcggacaacatcttcacggccactgaacggaaccgcatcgactacgtcagctccgccgtccgtatcgaccacgccccggaccttccgcggccagagcttgaagagaacatttttattagtggatagcgttgttggaattcaaaaaacagacaatattgccatagaaatgtgtgaagaatttgcattaccttatgtgattgtattaacaaaaattgacaaatcttccaagggacatcttttaaaacaagtgcttcagatccagaaatttgttaacatgaaaactcaaggatgttttcctcagttgtttcctgtaagtgctgtgaccttttctggaatccacctgttgagatgctttatagccagtgtaacaggaagtcttgactaatggttcccggtttagctgaagattcaaaaaaaaaaaaaaaagctttatgctaactggagttaaatacctagaagaatttcaacattgttttaaatgttgtgcatctgtaacttcaggaggatcacttgagctttaaaacctgtgccttctcgaaacaagaatttgtgcctgaggtgaaaaaagtttgtaagttattgaattatggtgttcattagaacagctactagctgattcccctattttaacaaactgacaagagcacatccataaaatgaaaacctgttacaactatgtacagaagggtttgacgttttattgggcttttgtcttttaaagaatatgtctactatgggtatttttttttaaatgttaaaatgggctaggtaaaagggggctgcttttctgttaagcatcgataggtaagttgatggataaaagttactatgtaagcctatttttttgagtccttatttgaatattgaaaacattcttgataaaatgtgttagtccatgttggaaacaaccgaaagaacagaattcaagttctagttctgatgtttattatatatgttggatcttgggcaacttacttgatttctcggaaattcatttgttactgtaaacgtgaaagctattaagattcaaatgaatggttttacagcaggtaacatgtgagaagacagctacatatttgtaaagccaaaccaacaaagaaatatagcaaaattcacaggtagatttattacaagaaatgtcctttcatgggggaagtaacattttcactagtgaaaaagcaaaaaacaaaaatagctttaagtgagaaaactaatttgtaaagggcaagagaaaaaagctgatg

SEQ ID NO: 404388 - DNA, 1638 bp, Homo sapiens
  misc_feature (29)..(29): n is a, c, g, or t
taccatcgctaggtcgaggctgggtgttnctctgcccgtcttctgggaagggagaatggcggcgcccgggctgcggctgggagcgggaagactctttgaaatgcctgcggtgctagagcgactgagccgctataatagcacgtcccaagcttttgctgaggtgctgcggctgccgaagcagcagctgaggaagctgctgtacccgctgcaggaagtagagcggttcctcgccccctacgggaggcaagaccttcacctgcgtatctttgacccaagcccggaggacatagccagggcggacaacatcttcacggccactgaacggaaccgcatcgactacgtcagctccgccgtccgtatcgaccacgccccggaccttccgcggccagaggtgtgttttataggcagaagcaatgttggaaaatcatctctaatcaaggctttattttcactggcccctgaggttgaagtcagagtctccaaaaaaccacttgaagagaacatttttattagtggatagcgttgttggaattcaaaaaacagacaatattgccatagaaatgtgtgaagaatttgcattaccttatgtgattgtattaacaaaaattgacaaatcttccaagggacatcttttaaaacaagtgcttcagatccagaaatttgttaacatgaaaactcaaggatgttttcctcagttgtttcctgtaagtgctgtgaccttttctggaatccacctgttgagatgctttatagccagtgtaacaggaagtcttgactaatggttcccggtttagctgaagattcaaaaaaaaaaaaaaaagctttatgctaactggagttaaatacctagaagaatttcaacattgttttaaatgttgtgcatctgtaacttcaggaggatcacttgagctttaaaacctgtgccttctcgaaacaagaatttgtgcctgaggtgaaaaaagtttgtaagttattgaattatggtgttcattagaacagctactagctgattcccctattttaacaaactgacaagagcacatccataaaatgaaaacctgttacaactatgtacagaagggtttgacgttttattgggcttttgtcttttaaagaatatgtctactatgggtatttttttttaaatgttaaaatgggctaggtaaaagggggctgcttttctgttaagcatcgataggtaagttgatggataaaagttactatgtaagcctatttttttgagtccttatttgaatattgaaaacattcttgataaaatgtgttagtccatgttggaaacaaccgaaagaacagaattcaagttctagttctgatgtttattatatatgttggatcttgggcaacttacttgatttctcggaaattcatttgttactgtaaacgtgaaagctattaagattcaaatgaatggttttacagcaggtaacatgtgagaagacagctacatatttgtaaagccaaaccaacaaagaaatatagcaaaattcacaggtagatttattacaagaaatgtcctttcatgggggaagtaacattttcactagtgaaaaagcaaaaaacaaaaatagctttaagtgagaaaactaatttgtaaagggcaagagaaaaaagctgatg

SEQ ID NO: 404389 - DNA, 1673 bp, Homo sapiens
atgcgcgggcccgggtatgtggctgaaagatggtaatatcgttgcaacatatggcatactcgtgcctcaaatgcagatagtgtacccgcgtattaatctagcacagttaccaaagcgctctctggcttgaggtgcgtgcggtctgtcgcagcaaacatccagcatgagagatacgctgtgcggtctaccgcagcttgaatggtaatcatacagcgggtcccaatcggcaccctctacgtgagtcggcataaagcttcacctgcgtatctttgacccaagcccggaggacatagccagggcggacaacatcttcacggccactgaacggaaccgcatcgactacgtcagctccgccgtccgtatcgaccacgccccggaccttccgcggccagagggacacacaaagaaaatgaattttttcaaagttggaaaacattttacagtggtggacatgccaggttatggctttagagcacctgaagattttgttgacatggtagagacctatctaaaagaacgaaggaacttgaagagaacatttttattagtggatagcgttgttggaattcaaaaaacagacaatattgccatagaaatgtgtgaagaatttgcattaccttatgtgattgtattaacaaaaattgacaaatcttccaagggacatcttttaaaacaagtgcttcagatccagaaatttgttaacatgaaaactcaaggatgttttcctcagttgtttcctgtaagtgctgtgaccttttctggaatccacctgttgagatgctttatagccagtgtaacaggaagtcttgactaatggttcccggtttagctgaagattcaaaaaaaaaaaaaaaagctttatgctaactggagttaaatacctagaagaatttcaacattgttttaaatgttgtgcatctgtaacttcaggaggatcacttgagctttaaaacctgtgccttctcgaaacaagaatttgtgcctgaggtgaaaaaagtttgtaagttattgaattatggtgttcattagaacagctactagctgattcccctattttaacaaactgacaagagcacatccataaaatgaaaacctgttacaactatgtacagaagggtttgacgttttattgggcttttgtcttttaaagaatatgtctactatgggtatttttttttaaatgttaaaatgggctaggtaaaagggggctgcttttctgttaagcatcgataggtaagttgatggataaaagttactatgtaagcctatttttttgagtccttatttgaatattgaaaacattcttgataaaatgtgttagtccatgttggaaacaaccgaaagaacagaattcaagttctagttctgatgtttattatatatgttggatcttgggcaacttacttgatttctcggaaattcatttgttactgtaaacgtgaaagctattaagattcaaatgaatggttttacagcaggtaacatgtgagaagacagctacatatttgtaaagccaaaccaacaaagaaatatagcaaaattcacaggtagatttattacaagaaatgtcctttcatgggggaagtaacattttcactagtgaaaaagcaaaaaacaaaaatagctttaagtgagaaaactaatttgtaaagggcaagagaaaaaagctgatg

SEQ ID NO: 404390 - DNA, 747 bp, Homo sapiens
cttcgtgtatgtcttttcctgaaccctgtgctgaattttccaaggagcctagttactacattgtctaaaactaagaaagagcagacataatgtaggcccttcggcccccttcctttttggttaactgagttatgccaatttcagcagtatgctgactgtacacttcattgtattttagagaaatctgtttcgctgtgaatgcataaaggctaaggagggaggaacaacccttgtttgctgctgcatctcttgggacttgggcaaattcaactttgcacgtggcagatctcttgggaaagccacttgggttttaaagggaaatattttaaaggtaattccaaggttgttaagtaatttttgttcacatggttgagttttcttcactgtgggactgagactgccgcagattacgttactgtcagttcctcactttttccacttggcaagaaaaaaaaaaagattcggcctggtgtggtggctcacgcctataatcctagcactttgggaggccgatgcgggcagatcacctgaggttggagttggagaccagcttggctaacatagtgaaagcccgtttctactaaaaatacaaaaaattagccgggcgtggtgatgcgtgcctgtaatcccagctacttgggaggctgaggcaggagaatcgcttgaccctgggaggtggaggttgcagtgagctgagattgcgccattgcactccagcttgggcaacaagagcgaaactccgtctcc

SEQ ID NO: 404391 - DNA, 472 bp, Homo sapiens
actatacttatatatttattatacatcgctctcttgatattgccatggattagaagcattagttctcagtacttgaagacaaacttctaaaaagaaaatatatgctctgaacatctgaaatgggctagactttcaagtaaaattgcttcatttctcattaactgaagagctattgatccaagtcatacttgccatttaatgtaaattatttttaaactttgctgtacaaaaccattaagtgtaaaggattcttcatattcttagtatgaagcaaattatgaattttaaaaatgaaatatgtattcctctaaaacccaaacttttatctttccattggtatctttgaattttaagacacttttcttcaaattacaaaacactaaaactcactcctaaacttcactttgagaaacttttttaaccaattataaaaataaaaccatccccatgtgtttcttgcatattctaaaaa

SEQ ID NO: 404392 - DNA, 668 bp, Homo sapiens
ttcatccttgctttccttgattggtggtttttatccctttggggaataatagacctatttgagaatctagtgagagatatagacttcccatgtctacataaagttttccatgtaatatcatggattcatggaccccagatttaataacctcttctttagattaatttaaatcatcttattacccttctacagtgatttggataggaacacaccagccgcatgatgtgagacttcccagaaggactcattcccagaagagatcctcccccttttttccgctcatttttttcttgctttctcttttctatcacttccactggaatggacctcaaagagcagttctgctctggtcctttttgttttcttttaaaaaaaaaaataggccaggcacggtggctctcacctgtaatcccagcacttcgggaagacgaggtaggtgggttgcttgaggccaggagatcgagaccatcctggctaacacggcgaaaccccatctctactaaaaatacaaaaaattagctggcgtggtggtgggtgcctgtagtgccagctactcgggaggctgaggcaggagaatggtgtgaaaccgggagacagagcttgcagtgagctgagatcgcaccactgcactccagcctgggcgacagagcaagactccgtctcaaaaa

SEQ ID NO: 404393 - DNA, 376 bp, Homo sapiens
ttgaacattgtcctcaccacaaaaggaaacttcatgtctattgccatgctccatcatccccctcccctactttaagcagccacttatctactttccatctttttagatttgaggattctgaacatgtcatataaataaatagaattatataatacatgatattttgtaattgacttttccacttagcataatgctttaaagttcatccatgttgttgcatgtatcagtatgtcatttctttttttttgtcaagtaatatttcactgtatggatatctaacattttatgtatctattcattaattgatggacatttggattgtttctactttttggctattgtgaataaagttgccattaaaaatgtctgtataata

SEQ ID NO: 404394 - DNA, 264 bp, Homo sapiens
ggagagagaataaaagggagggcagagggagagagtgtttaactgcatatctaggcctagtgttttagtggtatttataatattgcctatattgttatagacataaggagtaagcagcactctcagctgcgatctctggaccatgattggatacatgattcagtataaatacccttcccatttgctgtccaaaatatctcgcttcacagctggaccctaagaaacagagtgagtgggcctcccccatgtcctaggagagctgag

SEQ ID NO: 404395 - DNA, 518 bp, Homo sapiens
cttttagaagcactgttgatttcaccacagataaatattttgtttgctattcttgaatatgtatactcaaggggagttattgaccagtttgaatgacaacgaagcctttacaaagaaaagatttagctagtgggcagaactgacctggacctggcctgtaacagttacttcaagaagcaggaaaaaaacctaaatgtttctactgtttactacccaggactgaacagaagtagctgtgcaaccaccactagaagccttctgagcgtgttactgaagaggatgaggcaggaggcttccagaggcaacagccaagactaagccatcaaccacagggccaaacccagtaaaaaagaaaaataagaacacttccacttaaagaactgctgcaattatactgttcctttttttttccattaacatgtctttccttttatgatggcgagagttaatattaaggtgtgcgtatatgtttgttaaacgatctcattttgcaattaaaagtttgcacttatattaat

SEQ ID NO: 404396 - DNA, 584 bp, Homo sapiens
aggatgacgtggcctttgccattgctgagaacccattttgcacgcaatgttttcccggataataaatgacacagctgggatttattcaggtgttctgactccaaagtccttgctcctgatcaccatgcgctaccgactttgagcagtgatgtctcacagatgggaatgattcctctgaagattgaatagagaatgccaccatgtgaagtgatatttgagctggaacctgagtgaatgatggaatggagaagtcaggtacagagctgtggggatagcatcacaggactgaacagaagtagctgtgcaaccaccactagaagccttctgagcgtgttactgaagaggatgaggcaggaggcttccagaggcaacagccaagactaagccatcaaccacagggccaaacccagtaaaaaagaaaaataagaacacttccacttaaagaactgctgcaattatactgttcctttttttttccattaacatgtctttccttttatgatggcgagagttaatattaaggtgtgcgtatatgtttgttaaacgatctcattttgcaattaaaagtttgcacttatattaat

SEQ ID NO: 404397 - DNA, 376 bp, Homo sapiens
ttgtatgttctcactcataagtgggagctaagctatgaggatgcaaaggcataagaatgacacaatggactttgaagactcagggggaaagggtagaaagggggtgagggataaaagactacaaatagggtgcagcgtatactgctcgggtgatgggtgcaccaaaatctcacaaatcaccactaaagaacttactcacatagccaaacaccatctgttcctcaataacctatggaaactttaaaaaaaatgaaaaataaaaaataaaaaatcatctaaattggaaaaacaaagaccgttaacaacgtctgactctgaagagtgtactttaataaggtgggggtaggagttaggataggtgaggggttggagggag

SEQ ID NO: 404398 - DNA, 887 bp, Homo sapiens
tgactacctctttgctgtatgaatatcttaattttctaatacctcagtttcatgagaactgtatgtacatttttgtaaataaaataatttaccatatactaggagaaggacctgcttttaaagaaattgtgtaaagacatttgttattggatgtgttacatagtaaatcaatttgaaatttcttaaaaacgtttataagacttttctggtctccttgaccgagggattttagtataagtatttagtgagatttgtattctaggaagtgtgtgccgtcacttgttcatttacaactgcaaagattgtatgtctcctatgttttcctttcatgccaaagaaactcaccctttttaaaagccagcaggttgcacaaaccaaaaacaaaatattttgccccttaaataggcattttaagaagttttatttcctggtacttaaatattgtgtagagggaaagctagttgtaataatttgtaaaaatgcgtgtatttttaggaatgcgctatttccagtaagggaagtattgacatttttaaggaactgtgctgcattaaaatccacagttgcatgaaacttttaaaagtttaagatataaagtaattgctaaaatttgtgaactactcagaggactcaatgccctaacatgtaggggattgatcattgcgatgtttaggccaggatttctcatgattgtatatggttattgatcatttttaaggggctgaacctgctgcctttatacttttgacacctccctccctccctccctccaaactgtggctgtaaacagtgactctgcatagtcagcgttatacttgatttctttgtgaatgcaaataaaataaaatttgtaagtccaccaaatattgacttaactaggtaaatgt

SEQ ID NO: 404399 - DNA, 251 bp, Homo sapiens
catacacctgctcacacacacacgtgctcacaaattacatacacatgctcacacatacatgctcacaaacacgactacatacacctactcacacacacatgctcacacaattacatacaccgactcacgcacacatgctcacacaattacatacacctgctcacccatacacacatgctcacatgattacacatgctcccacatacatacatgctcacacacattacatacacatgctcacacacgctcac

SEQ ID NO: 404400 - DNA, 569 bp, Homo sapiens
accattccccctctaaacatcccacacacaccccattccccctctaaacatcccacaccgcggtactcaagcagtgtttgcctggctttggttgagagttcccggcaacaatgagggctgcagtctaattatacttagaaggaaatattgatcttggtttccatgatttatagtacaagtcatttccactttaatttgagttaccaagaatggacacattagtgcaggatggaattgaaatgtattgggcactatagaaattactttggtctctggctttgttttttcacctcagaaatgtgtatttttttcttcctgccattgcagttctaattttctgtgttgtgtctctgggaggagtgagttggtgcacctgctcatcctgattcatgattttcttgtgcctgtcagtctgagacaggccacactgatgtgtttgcatcgggttgaaggctgagaattctgactcagacctggcgaccctggcctctcctttttgcagaccttagaaaagtgagtgactcactgtagaacccagggctacgcagccccttgccttcctggaggaa

SEQ ID NO: 404401 - DNA, 422 bp, Homo sapiens
gagagaaattatttcttgcttggggatattgggaggaagggctatggtgtggtgagaaaagcgtgagctgtgtgcggtggtaagtgcctggagtccctgctatttgggaggctgaggcaggaggatcgctggagcccaggaatttgaggctgtaatgtgctataatcacacctgtgaatggccactacactccagcctagcaacacagacttcatctcttaaatttaaaaaagcatgacctaaacgtgaatttcaatcctatgtttgttgcctaaccttggcaaatgtacttgccctctctatgactcagttttatcacccgtaagatgggaataatagcaataatatgcctaatagagtttttgtgagaattaaatgagattatatatagacattgggcttagcaaagggcctggcacttc

SEQ ID NO: 404402 - DNA, 213 bp, Homo sapiens
agtccatagaaataagttttctcatacagtgatagtgacagattttaggtgaaattattgctatttagatagctaagtcattcagccaaggcacatcttctccaggatgtgtctctgtgtggtggaactgggaacactctgcccatctctgatcatctccgcagatgcccaccttcaagtgccctctgaaggccagctccacttatgaaggag

SEQ ID NO: 404403 - DNA, 242 bp, Homo sapiens
gcactgactgtacttaagactcattgtattacagggctggcaagtggagagtgaagacttggaagcagccagcacagggccacatgatccttgacccctgctgtggaccactacagcacaggcacaaggcgatggccagcatctgacttcatgggcagccccaggcagctctggggtgtgggcggtcagcagtgctgacttattagtcagcgtaagtcagcgctgagagatgctacaccctc

SEQ ID NO: 404404 - DNA, 443 bp, Homo sapiens
ctcattcccttttatttagagtaaggatatataggtacagaactagtgggctatcttgaccaccaggaaatacagctgcattcactatcaatctgaattttgccaggtggggtgaagacacagtccaccccgttaggcccatagcaattccgacataaaggttgaaaggtaagtttcttgcttaagaatgattcctgtttctagcacctgcagtctccaaccactgccccaggctggaaaaaaaaagaaaagttgaggtgactggagaaatcattttgtagtttgtaccagtgtcctcctctatcccttctccagatccaccataaaagaatttgtcaagtggggacccactcttgtccccctcatgttgaatgtgcatacacatgaaggtatatatgtcagcccttcctgcctttatcaccccctattttagacaaaaaaaa

SEQ ID NO: 404405 - DNA, 293 bp, Homo sapiens
tgttcaagggtcaaccatgctcctgccttccctctcagtgtcctcctcttcctcccctcatcctgtgccctgcctttgtctcttcctaaaagattaggtttgccacttgtttccctgatagaaagtgttcggttctggagcattagctgagtaagtagcagtcagggccacttgagtggccagaagtgccaggaagacaaagagagaaagaggctttttccttccttgcagcttcgagggctacaagcagagccatgtcttccactgtgcctcacacaactggggatcctcaa

SEQ ID NO: 404406 - DNA, 7186 bp, Homo sapiens
  misc_feature (1531)..(1531): n is a, c, g, or t
  misc_feature (5636)..(5636): n is a, c, g, or t
ttttgtaatagttttatttagggaattactgggaaaataaagtcattatacccaacttgaatgtaaagctatgcttgctgatttttggagaataaaatgtctgggctaaatgttggcttttaataaagtggagctgcccattgtcattacccttgggtcttaggtaacctgggacccagaagaagctagaaataaacactacctgttctcactacagcaagtttagctttactcaggaagacaatttgaccactgggaaagcattttattaaaacgtttgtttctattggcccaaaggataatgcgtgcatcagtaggcttctcagtgcttacaggtggtgttttggcaaaaactgagtggagggatttttttaactcttctacaacctagctgtattgtttgcagatttgaatgtattcacttaatatattaaatatttaatattaaatatcaattaacttaaaatgtttagtttttttatttttttgagacggagtctccctctgtcacccaggctggaatgcagtggcacaatctcggctcgctacaacctctgcttcccgggttcaagcgatcctcctgcctcagcctcccgagtagctgggacttcaggcccagtagagacagggtttcaccatgttagccaggatggtctccatctcctgacctcgtgatttgcccgcctcggcctcccaaagtgctgggattacaggcgtgagtcaccgcgcccggccaaaatatttaaagacagtatgacaggagagtggggttggcctgacacgtagaccagcctcctgggttcgcagagggtgcatttggtcttctgctctcactgcccgaccccatgggggaaagaggtgcatctccatttttaaattcctcctttgagctatagtggcaaactcagcaactaagtagatcccaagcctggtagtttcttttttcttctgggccttgagagctcatgtccccgcacctggaatctttcaaggatgtccgggccatccgggaattactgcgtgtgcacacacacaaaaacacgcccctaacaccagaggctggctgtatgattctgttttcgagcctgctgtattcacctgtctgcccgtcagctacttctaggagcgtcaaagggcctcacccagagactacagaccctccggtggagaagtgtactaggccgtgtctgcagctggagccctcggcctgaaatgttctggctttagcaaagcggcgacagtgtccaaccccagtccccgaggagggatgtcagccctgggcccctgtgagcgctgcagattcgtcccaggaaagggtgaccggggtcgctgctccgggattaccagctaaatacctgtattagcatcctcagcacgcactgggagacgcagctcaagtccgctccccttcttgcaccctcatatatatttggtgcaaaatggagaaccttttcccctacgtttgtgtaaaaatatatgtaaataaagccttaaaatagtgttaccgacccccttttccactcgcaataanattgactataaatgctgataattccaaaagaatctcgactcttccttgagtagtctggagctagcaggtgcaagtttagaaacaataactcatcactgagggaggcactgaaaattttataactgttaactggaatctaaatttccatgtaaatgggctgtctctggtcccgtgtcaagagactaatatttttccagaagcctgaaaatatgcttttatgatgttgggagtctcaaacgtaaaaacggactcctaaccctctggatgtttcggctgaactctcaactgtccaccagctccccctacacgtggctccttagaaagcgtggaaaagggaaaaatgaaaagagaaactgccaggacttaagatgtctgcttaaagactccctcgaactgcagtgaagggtcctacccgcttccaaaatgtccacccgcattcctgacgtcactggatcggctccatcaagccagaaaacgagagtgcgctccaatcagggctcagtccccgcccttgccttgcgtcacttccggtggtgcagcagccattttgtcagtcgccagcggatcccgcgcgctggagaagtgcagttccccctggttaccaactcgcccgcttttccttcggactaagggagccgtcgaagagcgctcgccaaaggcgcagccgtttctccctacggtgccgccgctcctcctgcagccgcccgtaggtagcgggccgttttcctcacctgtccctgacaggcgccctcagggagccgcggtccgcgatgtcaagcgaggaaagctaccgggccatcctgcgttacctgacgaacgagcgcgagccgtatgcgccgggcaccgagggcaatgtcaagcgtaaaatccgaaaagctgccgcctgctacgtggtgcgcggcgggactctgtattaccagcggcggcagcggcaccgcaagaccttcgcggagctggaggtggtgctgcagccggagcgacgccgggacctcatcgaggcggcgcacctgggtcccggcggcactcaccacacccggcatcagacctggcactacttgtccaagacgtactggtggcgaggtatattgaagcaagtcaaagattacattaaacagtgtagcaaatgccaggagaaactagatcgatcccgtccaatatcagatgtttcagaaatgttggaagaattgggactagaccttgaatctggagaagaaagtaatgaatcggaagatgacctgagcaactttacttcatctccaactacagcatccaagcctgcaaaaaagaagccagtatccaaacatgaacttgtgtttgttgacaccaaaggagtggtaaaacgttcttctccaaaacattgtcaggctgtcttaaaacagctgaacgaacagagactttccaaccagttctgtgatgttactttgttaattgaaggagaagagtacaaagctcataaatctgttttgtcagcaaatagcgagtattttcgagatctttttattgagaaaggagctgtttccagtcatgaggctgtggtggatctttctggtttttgtaaggccagcttccttcctttactggaatttgcctatacttctgtactaagttttgatttctgtagcatggctgatgtagccatcttagctcgtcatcttttcatgtcagaagtcttagagatttgtgaaagtgtacataagctaatggaagagaagcagctaacagtatataagaagggcgaagtacaaacagttgcatccacccaggacttacgagtacagaatggaggtacagcacctcctgttgctagcagtgagggaaccacaacaagtttacctactgaacttggggattgtgaaattgtactactggtaaatggagaattgccagaagctgagcagaatggagaggtaggacgacagcctgagccccaggtttcttcagaggctgaatctgccctgtcatcagtaggatgtatagctgattcccatcctgaaatggagtctgttgatttaataacaaaaaacaaccagacagaactagaaacttcaaacaacagagaaaataacacagtttctaatatacaccctaaactttcaaaagagaatgtaattagtagctcgccagaggatagtggtatgggaaatgatatatcagctgaggatatttgtgccgaagacattccaaaacataggcagaaagttgaccaacctttaaaagatcaggaaaatctagttgcatcaacagcaaagacagactttggccctgatgatgatacttatagaagcaggcttcgacaacgttctgttaatgaaggggcatatattcgactacacaagggaatggagaaaaagctgcagaaacggaaagccgttcccaagtcagcagttcaacaggtggctcagaagttagttcaaagaggaaaaaagatgaaacagccaaaaagagatgctaaagagaacacagaagaagcatctcataaatgtggggaatgtggaatggtttttcagagacgatacgcccttataatgcacaaactgaaacatgaaagagctagagattacaaatgtccattgtgtaaaaaacagtttcagtacagtgcctctttgcgagcacatcttattcgtcataccagaaaagatgcaccctcttcatcctcgtccaattccacgtctaatgaagcatcgggaacatcatctgagaagggcagaaccaagcgggaatttatatgttccatatgtggaagaacattacctaaattatattctctccgaatacatatgttaaagcacacaggtgtaaagccacatgcatgccaggtctgtggaaagacttttatctataagcatggtctaaaattacatcagagtcttcatcaatcacagaagcagttccagtgtgaactgtgtgttaagtcatttgttaccaaacggagtcttcaagaacatatgagtattcacacaggagagtccaagtacctttgctcagtttgtggaaagtcttttcataggggctctggactcagcaagcacttcaagaaacaccaaccaaagcctgaggttcgaggctatcattgtactcaatgtgaaaaaagtttctttgaagctagagatcttcgccagcacatgaacaaacatcttggtgtgaagccattccagtgccaattttgtgataagtgctatagttggaagaaagattggtattcccatgtgaagtctcattctgtcactgagccttataggtgtaatatatgtggcaaagaattttatgaaaaagctttgttcagaaggcatgtaaagaaagctacccatgggaagaaaggaagagcaaagcaaaacctggaacgggtgtgtgaaaaatgtggaagaaaattcactcagctaagagagtataggagacacatgaacaaccatgaaggagttaagccatttgagtgcttaacatgtggagtagcttgggctgatgcccgatctctaaaacgccatgtcagaacacatactggtgaacggccctatgtctgtcctgtatgtagcgaagcctacatagatgctcgaacactccgtaaacatatgactaaattccacagagactatgtgccttgcaaaattatgctggaaaaagacacccttcagtttcataaccaaggaactcaagtggcacatgctgttagcatcttaacagcaggcatgcaggaacaagaaagcagtggtcctcaagaacttgagactgtggtagtgacaggagaaactatggaagctctggaagctgttgcagctactgaagagtatccatcggtatctacactttctgaccaaagtattatgcaagtggttaattatgtattagcacaacagcaaggacagaagctatctgaagttgcagaagctattcaaactgttaaagtagaggtagcacatatttcaggaggagaatgagtatgttaatgaagataaaaagaagtgacatctcttgtacactgaactcacagaacatttgtttacaattctgtgtgactgtctgcttggagtttacatatcaaagttctgggctgtttggtaacgtaacgtttccaaacattttgtctggccaatgggttctatagaaaagnccgtttagtgtagagaaattgaaaacagatctattaggttggtgcaattgcttttgcaccaacctaatatttgatggcagtggtttatcatgatataccttttatgaattaatgtttataaatgactgtactgaatttaaaaccgtacagtttcatttgcattttgacattactttattatacattttgcatttaaaaggctgcaccagttggcttttcttctgttttattctcaaaatatagagattctgtgatttatttgccctgtttatggattaaaaagaaaattctaatataaagcatttcaataggatgcataggtatattacgttttttaaatgctttagatctgtgattcttgacttactatttattttatccccttttaagtcagggatgctttattctattttaaagcacttatgagttacatgttgtaatcaagtttgcacaatatatttatctatatgaggaacccataaatgaatagctaatttttaaaatgccattaaaatgcatgaaatgcttattaaaaccttactatactatttcttcaaggcaagtaaattgaccatgagaaaagaacacagttattaaacactgttgacaggaaaattctccttgataacataggacaattaatggaaaaaaaaattctcattatttgcaaagaatgaacaagttaatgaacaaacaaactagatttggtatgttttcagcttttgtatcatgtttaattgtttaatttggttgaaaaactgcagttgagaaatcagatagcaatatagacattcacagcagctctgtggataccatgtaattgtcaggtaatttcagaatgttgaaaattattcagtgcagccctcatagtatcatacttgaagaaattgattacagttccactaaattgttgaagataaattatttttaaaggttatgaaaactaagttatattaattcatatgtttgatttttaaatcccacctcctcaagctatccaattttctgactttgaaaataaccatgagagatgccacatttctctctgggaaactaccactcaaagaataattgttaaaaattaagcttttaggtattagaagctgttataaagtataaaattaagatataagcagatcacatgtaaatcattcctaaagcacaagaaaagaatgtgccttgatgtacatatattactaagttgcctctcccagtttactttaaaaatggctttaaggataaagaataaatgtgatagctgtgcatgcattatatatttgcatttgcaaatttcccattgttttaacagctgtgtggctgactttcaattttaagacgtgaattgacatacagcccataactttataatggctgctcatttatcttatctttcagttagtggaaaaacatttcaacctgactaaaatttggaattgtgtcttttatgttccatcctctgttgttactagatttagtttaaaaattgtgtatgaccattaatgtatgtcataaacatgtaaataaaagatgttgaatcttgttgaaaagca

SEQ ID NO: 404407 - DNA, 703 bp, Homo sapiens
  misc_feature (703)..(703): n is a, c, g, or t
tgtggctgctacagctcccagacaacttggccacccggaggcaacaggatccagtcttttagataaacaggccactgggcgtcgacatggccgcaaagtttgagtaggacactctgggaagacaaagttgggccttcttggctgagacccgatacccaagctcctaaaggagtcctgtaccggccggtattcatttgttccgggtttctggaccagcaaaaatggagtattccaggtggactgacacggtatacgatccctctcttcagaggtgaaaaggattaaaaggagttgctgacaatcatcccagaacagtcctaaatccattaggcatgaaacaatgaagtaggcattctgtggactacagtgagtttctgaaactgaggtaagagacggagtctccctctgtcaccattgcactccagtctgggcaacagagtgagattccgtctcaagaaaaaaaaaggaaagggaaaaaaaaatagctttatacctcttcctggtctcaacggccaggaaaattctggaacattccaaattcagtggaataatccaaaacaaaatttataaggtttaaaataatttgacttctaatagtaataagtatacctttaaagaggcctcaggggtatataatcttctaaacaggtaccaatttcagggcagtaccatttaaccagtagggtcctctagttggggaacn

SEQ ID NO: 404408 - DNA, 730 bp, Homo sapiens
  misc_feature (730)..(730): n is a, c, g, or t
ggtggctgactacagcgtcgccacgagcaagttgggcagccggaggcacaggatccatatctgattacgattaacaggtcacatggccgctctgcttttacacaggcaatgtttgaggtaggtacagctctgtggcaacgacaaaacgttgggactcttctctggcatgagaccctgattacccaagctcctaaaggagtcctgtaccggccggtattcatttgttccgggtttctggaccagcaaaaatggagtattccaggtggactgacacggtatacgatccctctcttcagaggtgaaaaggattaaaaggagttgctgacaatcatcccagaacagtcctaaatccattaggcatgaaacaatgaagtaggcattctgtggactacagtgagtttctgaaactgaggtaagagacggagtctccctctgtcaccattgcactccagtctgggcaacagagtgagattccgtctcaagaaaaaaaaaggaaagggaaaaaaaaatagctttatacctcttcctggtctcaacggccaggaaaattctggaacattccaaattcagtggaataatccaaaacaaaatttataaggtttaaaataatttgacttctaatagtaataagtatacctttaaagaggcctcaggggtatataatcttctaaacaggtaccaatttcagggcagtaccatttaaccagtagggtcctctagttggggaacn

SEQ ID NO: 404409 - DNA, 426 bp, Homo sapiens
aggatggggtgcagtggcgtgatctgatctcagctcactgcaacctctgcctcccgggttcaagtgatactcctgcctcagcctcccgagtagctgggagtacaggtgcagtagagacagggtttcaccatgtcggacaggctggtcttgaactcttgacctcaggtgatctgcccacctcagcctcccaaagtgctggggttacaagtgtgagccactgagcccggctggaaaatttattttcagtctaaattgtgataaatgaaagtttcacagttttaaggtattgaatgcaaggctcaattggaaatgatgtttgtaaccaattacttggccaatggttcaggtctccagagaggtggtcctctccataagccaaagcatgtgttactgttaggaactgggaaaaataaaggttggcctttt

SEQ ID NO: 404410 - DNA, 376 bp, Homo sapiens
tactactactaaattcgcggccgcgtcgacctttaaggataaagaataaatgtgatagctgtgcatgcattatatatttgcatttgcaaatttcccattgttttaacagctgtgtggctgactttcaattttaagacgtgaattgacatacagcccataactttataatggctgctcatttatcttatctttcagttagtggaaaaacatttcaacctgactaaaatttggaattgtgtcttttatgttccatcctctgttgttactagatttagtttaaaaattgtgtatgaccattaatgtatgtcataaacatgtaaataaaagatgttgaatcttgttgaaaagcaaaaaaaaagtcgacgcggccgcgaat

SEQ ID NO: 404411 - DNA, 3596 bp, Homo sapiens
  misc_feature (1531)..(1531): n is a, c, g, or t
ttttgtaatagttttatttagggaattactgggaaaataaagtcattatacccaacttgaatgtaaagctatgcttgctgatttttggagaataaaatgtctgggctaaatgttggcttttaataaagtggagctgcccattgtcattacccttgggtcttaggtaacctgggacccagaagaagctagaaataaacactacctgttctcactacagcaagtttagctttactcaggaagacaatttgaccactgggaaagcattttattaaaacgtttgtttctattggcccaaaggataatgcgtgcatcagtaggcttctcagtgcttacaggtggtgttttggcaaaaactgagtggagggatttttttaactcttctacaacctagctgtattgtttgcagatttgaatgtattcacttaatatattaaatatttaatattaaatatcaattaacttaaaatgtttagtttttttatttttttgagacggagtctccctctgtcacccaggctggaatgcagtggcacaatctcggctcgctacaacctctgcttcccgggttcaagcgatcctcctgcctcagcctcccgagtagctgggacttcaggcccagtagagacagggtttcaccatgttagccaggatggtctccatctcctgacctcgtgatttgcccgcctcggcctcccaaagtgctgggattacaggcgtgagtcaccgcgcccggccaaaatatttaaagacagtatgacaggagagtggggttggcctgacacgtagaccagcctcctgggttcgcagagggtgcatttggtcttctgctctcactgcccgaccccatgggggaaagaggtgcatctccatttttaaattcctcctttgagctatagtggcaaactcagcaactaagtagatcccaagcctggtagtttcttttttcttctgggccttgagagctcatgtccccgcacctggaatctttcaaggatgtccgggccatccgggaattactgcgtgtgcacacacacaaaaacacgcccctaacaccagaggctggctgtatgattctgttttcgagcctgctgtattcacctgtctgcccgtcagctacttctaggagcgtcaaagggcctcacccagagactacagaccctccggtggagaagtgtactaggccgtgtctgcagctggagccctcggcctgaaatgttctggctttagcaaagcggcgacagtgtccaaccccagtccccgaggagggatgtcagccctgggcccctgtgagcgctgcagattcgtcccaggaaagggtgaccggggtcgctgctccgggattaccagctaaatacctgtattagcatcctcagcacgcactgggagacgcagctcaagtccgctccccttcttgcaccctcatatatatttggtgcaaaatggagaaccttttcccctacgtttgtgtaaaaatatatgtaaataaagccttaaaatagtgttaccgacccccttttccactcgcaataanattgactataaatgctgataattccaaaagaatctcgactcttccttgagtagtctggagctagcaggtgcaagtttagaaacaataactcatcactgagggaggcactgaaaattttataactgttaactggaatctaaatttccatgtaaatgggctgtctctggtcccgtgtcaagagactaatatttttccagaagcctgaaaatatgcttttatgatgttgggagtctcaaacgtaaaaacggactcctaaccctctggatgtttcggctgaactctcaactgtccaccagctccccctacacgtggctccttagaaagcgtggaaaagggaaaaatgaaaagagaaactgccaggacttaagatgtctgcttaaagactccctcgaactgcagtgaagggtcctacccgcttccaaaatgtccacccgcattcctgacgtcactggatcggctccatcaagccagaaaacgagagtgcgctccaatcagggctcagtccccgcccttgccttgcgtcacttccggtggtgcagcagccattttgtcagtcgccagcggatcccgcgcgctggagaagtgcagttccccctggttaccaactcgcccgcttttccttcggactaagggagccgtcgaagagcgctcgccaaaggcgcagccgtttctccctacggtgccgccgctcctcctgcagccgcccgtaggtagcgggccgttttcctcacctgtccctgacaggcgccctcagggagccgcggtccgcgatgtcaagcgaggaaagctaccgggccatcctgcgttacctgacgaacgagcgcgagccgtatgcgccgggcaccgagggcaatgtcaagcgtaaaatccgaaaagctgccgcctgctacgtggtgcgcggcgggactctgtattaccagcggcggcagcggcaccgcaagaccttcgcggagctggaggtggtgctgcagccggagcgacgccgggacctcatcgaggcggcgcacctgggtcccggcggcactcaccacacccggcatcagacctggcactacttgtccaagacgtactggtggcgaggtatattgaagcaagtcaaagattacattaaacagtgtagcaaatgccaggagaaactagatcgatcccgtccaatatcagatgtttcagaaatgttggaagaattgggactagaccttgaatctggagaagaaagtaatgaatcggaagatgacctgagcaactttacttcatctccaactacagcatccaagcctgcaaaaaagaagccagtatccaaacatgaacttgtgtttgttgacaccaaaggagtggtaaaacgttcttctccaaaacattgtcaggctgtcttaaaacagctgaacgaacagagactttccaaccagttctgtgatgttactttgttaattgaaggagaagagtacaaagctcataaatctgttttgtcagcaaatagcgagtattttcgagatctttttattgagaaaggagctgtttccagtcatgaggctgtggtggatctttctggtaagggttttgtattactcttgctttttgtttgtaatgacattctagaagagggggatatgtatgtcttccacacacggactttatgccaaagtaagagaagcccactgacaacagtagactaagctgtactgaaaaggttctttttagcaagatttctgtggtagagttatggaaaagggtgtcatttcctttcactacgtcttaagtgagacaattatagcagaaaaagaatttctaggatttaaactgttaaaaacagtttgagtgaaatccataagtgcaacaaaattattacattaaatgaatatgttatttaaaaattgattgtttaagctaggtgtggtggtgcccgcctgtagtcccacctacttgggaggctgggatgtgaggatctgcttaaggtcaggagttccaggctgtggtgtgtcattgtacctgtgaatacccactgctctccagacggggcaatataacaagaccctgcctctaaaaataaaaagcaaataaaaattga

SEQ ID NO: 404412 - DNA, 4755 bp, Homo sapiens
  misc_feature (1531)..(1531): n is a, c, g, or t
ttttgtaatagttttatttagggaattactgggaaaataaagtcattatacccaacttgaatgtaaagctatgcttgctgatttttggagaataaaatgtctgggctaaatgttggcttttaataaagtggagctgcccattgtcattacccttgggtcttaggtaacctgggacccagaagaagctagaaataaacactacctgttctcactacagcaagtttagctttactcaggaagacaatttgaccactgggaaagcattttattaaaacgtttgtttctattggcccaaaggataatgcgtgcatcagtaggcttctcagtgcttacaggtggtgttttggcaaaaactgagtggagggatttttttaactcttctacaacctagctgtattgtttgcagatttgaatgtattcacttaatatattaaatatttaatattaaatatcaattaacttaaaatgtttagtttttttatttttttgagacggagtctccctctgtcacccaggctggaatgcagtggcacaatctcggctcgctacaacctctgcttcccgggttcaagcgatcctcctgcctcagcctcccgagtagctgggacttcaggcccagtagagacagggtttcaccatgttagccaggatggtctccatctcctgacctcgtgatttgcccgcctcggcctcccaaagtgctgggattacaggcgtgagtcaccgcgcccggccaaaatatttaaagacagtatgacaggagagtggggttggcctgacacgtagaccagcctcctgggttcgcagagggtgcatttggtcttctgctctcactgcccgaccccatgggggaaagaggtgcatctccatttttaaattcctcctttgagctatagtggcaaactcagcaactaagtagatcccaagcctggtagtttcttttttcttctgggccttgagagctcatgtccccgcacctggaatctttcaaggatgtccgggccatccgggaattactgcgtgtgcacacacacaaaaacacgcccctaacaccagaggctggctgtatgattctgttttcgagcctgctgtattcacctgtctgcccgtcagctacttctaggagcgtcaaagggcctcacccagagactacagaccctccggtggagaagtgtactaggccgtgtctgcagctggagccctcggcctgaaatgttctggctttagcaaagcggcgacagtgtccaaccccagtccccgaggagggatgtcagccctgggcccctgtgagcgctgcagattcgtcccaggaaagggtgaccggggtcgctgctccgggattaccagctaaatacctgtattagcatcctcagcacgcactgggagacgcagctcaagtccgctccccttcttgcaccctcatatatatttggtgcaaaatggagaaccttttcccctacgtttgtgtaaaaatatatgtaaataaagccttaaaatagtgttaccgacccccttttccactcgcaataanattgactataaatgctgataattccaaaagaatctcgactcttccttgagtagtctggagctagcaggtgcaagtttagaaacaataactcatcactgagggaggcactgaaaattttataactgttaactggaatctaaatttccatgtaaatgggctgtctctggtcccgtgtcaagagactaatatttttccagaagcctgaaaatatgcttttatgatgttgggagtctcaaacgtaaaaacggactcctaaccctctggatgtttcggctgaactctcaactgtccaccagctccccctacacgtggctccttagaaagcgtggaaaagggaaaaatgaaaagagaaactgccaggacttaagatgtctgcttaaagactccctcgaactgcagtgaagggtcctacccgcttccaaaatgtccacccgcattcctgacgtcactggatcggctccatcaagccagaaaacgagagtgcgctccaatcagggctcagtccccgcccttgccttgcgtcacttccggtggtgcagcagccattttgtcagtcgccagcggatcccgcgcgctggagaagtgcagttccccctggttaccaactcgcccgcttttccttcggactaagggagccgtcgaagagcgctcgccaaaggcgcagccgtttctccctacggtgccgccgctcctcctgcagccgcccgtaggtagcgggccgttttcctcacctgtccctgacaggcgccctcagggagccgcggtccgcgatgtcaagcgaggaaagctaccgggccatcctgcgttacctgacgaacgagcgcgagccgtatgcgccgggcaccgagggcaatgtcaagcgtaaaatccgaaaagctgccgcctgctacgtggtgcgcggcgggactctgtattaccagcggcggcagcggcaccgcaagaccttcgcggagctggaggtggtgctgcagccggagcgacgccgggacctcatcgaggcggcgcacctgggtcccggcggcactcaccacacccggcatcagacctggcactacttgtccaagacgtactggtggcgaggtatattgaagcaagtcaaagattacattaaacagtgtagcaaatgccaggagaaactagatcgatcccgtccaatatcagatgtttcagaaatgttggaagaattgggactagaccttgaatctggagaagaaagtaatgaatcggaagatgacctgagcaactttacttcatctccaactacagcatccaagcctgcaaaaaagaagccagtatccaaacatgaacttgtgtttgttgacaccaaaggagtggtaaaacgttcttctccaaaacattgtcaggctgtcttaaaacagctgaacgaacagagactttccaaccagttctgtgatgttactttgttaattgaaggagaagagtacaaagctcataaatctgttttgtcagcaaatagcgagtattttcgagatctttttattgagaaaggagctgtttccagtcatgaggctgtggtggatctttctggtttttgtaaggccagcttccttcctttactggaatttgcctatacttctgtactaagttttgatttctgtagcatggctgatgtagccatcttagctcgtcatcttttcatgtcagaagtcttagagatttgtgaaagtgtacataagctaatggaagagaagcagctaacagtatataagaagggcgaagtacaaacagttgcatccacccaggacttacgagtacagaatggaggtacagcacctcctgttgctagcagtgagggaaccacaacaagtttacctactgaacttggggattgtgaaattgtactactggtaaatggagaattgccagaagctgagcagaatggagaggtaggacgacagcctgagccccaggtttcttcagaggctgaatctgccctgtcatcagtaggatgtatagctgattcccatcctgaaatggagtctgttgatttaataacaaaaaacaaccagacagaactagaaacttcaaacaacagagaaaataacacagtttctaatatacaccctaaactttcaaaagagaatgtaattagtagctcgccagaggatagtggtatgggaaatgatatatcagctgaggatatttgtgccgaagacattccaaaacataggcagaaagttgaccaacctttaaaagatcaggaaaatctagttgcatcaacagcaaagacagactttggccctgatgatgatacttatagaagcaggcttcgacaacgttctgttaatgaaggggcatatattcgactacacaagggaatggagaaaaagctgcagaaacggaaagccgttcccaagtcagcagttcaacaggtggctcagaagttagttcaaagaggaaaaaagatgaaacagccaaaaagagatgctaaagagaacacagaagaagcatctcataaatgtggggaatgtggaatggtttttcagagacgatacgcccttataatgcacaaactgaaacatgaaagagctagagattacaaatgtccattgtgtaaaaaacagtttcagtacagtgcctctttgcgagcacatcttattcgtcataccagaaaagatgcaccctcttcatcctcgtccaattccacgtctaatgaagcatcgggaacatcatctgagaagggcagaaccaagcgggaatttatatgttccatatgtggaagaacattacctaaattatattctctccgaatacatatgttaaagcacacaggtgtaaagccacatgcatgccaggtctgtggaaagacttttatctataagcatggtctaaaattacatcagagtcttcatcaatcacagaagcagttccagtgtgaactgtgtgttaagtcatttgttaccaaacggagtcttcaagaacatatgagtattcacacaggtaatgagaaatttatattgacatagttacatttcataaactattaatgattatgctttaattataccagaaattatattgataaactgatagtcgtgtgtgctcaattttgtattgagacagtattttaaattaaaagtgcaggctgggcgcggtggctcacgcctgtaatccccagcactttgggaggccgaggcaggcagatcatgaggtcaggagattgagaccatcctggctaacacggtgaaaccgtttctctacta

SEQ ID NO: 404413 - DNA, 4037 bp, Homo sapiens
  misc_feature (1531)..(1531): n is a, c, g, or t
  misc_feature (3932)..(3932): n is a, c, g, or t
  misc_feature (3945)..(3945): n is a, c, g, or t
  misc_feature (3975)..(3975): n is a, c, g, or t
  misc_feature (4003)..(4003): n is a, c, g, or t
  misc_feature (4020)..(4020): n is a, c, g, or t
ttttgtaatagttttatttagggaattactgggaaaataaagtcattatacccaacttgaatgtaaagctatgcttgctgatttttggagaataaaatgtctgggctaaatgttggcttttaataaagtggagctgcccattgtcattacccttgggtcttaggtaacctgggacccagaagaagctagaaataaacactacctgttctcactacagcaagtttagctttactcaggaagacaatttgaccactgggaaagcattttattaaaacgtttgtttctattggcccaaaggataatgcgtgcatcagtaggcttctcagtgcttacaggtggtgttttggcaaaaactgagtggagggatttttttaactcttctacaacctagctgtattgtttgcagatttgaatgtattcacttaatatattaaatatttaatattaaatatcaattaacttaaaatgtttagtttttttatttttttgagacggagtctccctctgtcacccaggctggaatgcagtggcacaatctcggctcgctacaacctctgcttcccgggttcaagcgatcctcctgcctcagcctcccgagtagctgggacttcaggcccagtagagacagggtttcaccatgttagccaggatggtctccatctcctgacctcgtgatttgcccgcctcggcctcccaaagtgctgggattacaggcgtgagtcaccgcgcccggccaaaatatttaaagacagtatgacaggagagtggggttggcctgacacgtagaccagcctcctgggttcgcagagggtgcatttggtcttctgctctcactgcccgaccccatgggggaaagaggtgcatctccatttttaaattcctcctttgagctatagtggcaaactcagcaactaagtagatcccaagcctggtagtttcttttttcttctgggccttgagagctcatgtccccgcacctggaatctttcaaggatgtccgggccatccgggaattactgcgtgtgcacacacacaaaaacacgcccctaacaccagaggctggctgtatgattctgttttcgagcctgctgtattcacctgtctgcccgtcagctacttctaggagcgtcaaagggcctcacccagagactacagaccctccggtggagaagtgtactaggccgtgtctgcagctggagccctcggcctgaaatgttctggctttagcaaagcggcgacagtgtccaaccccagtccccgaggagggatgtcagccctgggcccctgtgagcgctgcagattcgtcccaggaaagggtgaccggggtcgctgctccgggattaccagctaaatacctgtattagcatcctcagcacgcactgggagacgcagctcaagtccgctccccttcttgcaccctcatatatatttggtgcaaaatggagaaccttttcccctacgtttgtgtaaaaatatatgtaaataaagccttaaaatagtgttaccgacccccttttccactcgcaataanattgactataaatgctgataattccaaaagaatctcgactcttccttgagtagtctggagctagcaggtgcaagtttagaaacaataactcatcactgagggaggcactgaaaattttataactgttaactggaatctaaatttccatgtaaatgggctgtctctggtcccgtgtcaagagactaatatttttccagaagcctgaaaatatgcttttatgatgttgggagtctcaaacgtaaaaacggactcctaaccctctggatgtttcggctgaactctcaactgtccaccagctccccctacacgtggctccttagaaagcgtggaaaagggaaaaatgaaaagagaaactgccaggacttaagatgtctgcttaaagactccctcgaactgcagtgaagggtcctacccgcttccaaaatgtccacccgcattcctgacgtcactggatcggctccatcaagccagaaaacgagagtgcgctccaatcagggctcagtccccgcccttgccttgcgtcacttccggtggtgcagcagccattttgtcagtcgccagcggatcccgcgcgctggagaagtgcagttccccctggttaccaactcgcccgcttttccttcggactaagggagccgtcgaagagcgctcgccaaaggcgcagccgtttctccctacggtgccgccgctcctcctgcagccgcccgtaggtagcgggccgttttcctcacctgtccctgacaggcgccctcagggagccgcggtccgcgatgtcaagcgaggaaagctaccgggccatcctgcgttacctgacgaacgagcgcgagccgtatgcgccgggcaccgagggcaatgtcaagcgtaaaatccgaaaagctgccgcctgctacgtggtgcgcggcgggactctgtattaccagcggcggcagcggcaccgcaagaccttcgcggagctggaggtggtgctgcagccggagcgacgccgggacctcatcgaggcggcgcacctgggtcccggcggcactcaccacacccggcatcagacctggcactacttgtccaagacgtactggtggcgaggtatattgaagcaagtcaaagattacattaaacagtgtagcaaatgccaggagaaactagatcgatcccgtccaatatcagatgtttcagaaatgttggaagaattgggactagaccttgaatctggagaagaaagtaatgaatcggaagatgacctgagcaactttacttcatctccaactacagcatccaagcctgcaaaaaagaagccagtatccaaacatgaacttgtgtttgttgacaccaaaggagtggtaaaacgttcttctccaaaacattgtcaggctgtcttaaaacagctgaacgaacagagactttccaaccagttctgtgatgttactttgttaattgaaggagaagagtacaaagctcataaatctgttttgtcagcaaatagcgagtattttcgagatctttttattgagaaaggagctgtttccagtcatgaggctgtggtggatctttctggtttttgtaaggccagcttccttcctttactggaatttgcctatacttctgtactaagttttgatttctgtagcatggctgatgtagccatcttagctcgtcatcttttcatgtcagaagtcttagagatttgtgaaagtgtacataagctaatggaagagaagcagctaacagtatataagaagggcgaagtacaaacagttgcatccacccaggacttacgagtacagaatggaggtacagcacctcctgttgctagcagtgagggaaccacaacaagtttacctactgaacttggggattgtgaaattgtactactggtaaatggagaattgccagaagctgagcagaatggagaggtaggacgacagcctgagccccaggtttcttcagaggctgaatctgccctgtcatcagtaggatgtatagctgattcccatcctgaaatggagtctgttgatttaataacaaaaaacaaccagacagaactagaaacttcaaacaacagagaaaataacacagtttctaatatacaccctaaactttcaaaagagaatgtaattagtagctcgccagaggatagtggtatgggaaatgatatatcagctgaggatatttgtgccgaagacattccaaaacataggcagaaagttgaccaacctttaaaagatcaggaaaatctagttgcatcaacagcaaagacagactttggccctgatgatgatacttatagaagcaggcttcgacaacgttctgttaatgaaggggcatatattcgactacacaagggaatggagaaaaagctgcagaaacggaaagccgttcccaagtcagcagttcaacaggtggctcngaagttagttctngaggaccactgctttcttgttcctgcatgnctgctgttaagatgctaacagcatgtgncacttgagttccttggntatgaaactgaagggtg

SEQ ID NO: 404414 - DNA, 191 bp, Homo sapiens
gagtttcagttaacattttgtaatggaaatacatttagagagaattttatttttcttttagttgtgtaaaaaacagtttcagtacagtgcctctttgcgagcacatcttattcgtcataccagaaaagatgcaccctcttcatcctcgtccaattccacgtctaatgaagcatcgggaacatcatctgaga

SEQ ID NO: 404415 - DNA, 2811 bp, Homo sapiens
  misc_feature (1531)..(1531): n is a, c, g, or t
  misc_feature (2811)..(2811): n is a, c, g, or t
ttttgtaatagttttatttagggaattactgggaaaataaagtcattatacccaacttgaatgtaaagctatgcttgctgatttttggagaataaaatgtctgggctaaatgttggcttttaataaagtggagctgcccattgtcattacccttgggtcttaggtaacctgggacccagaagaagctagaaataaacactacctgttctcactacagcaagtttagctttactcaggaagacaatttgaccactgggaaagcattttattaaaacgtttgtttctattggcccaaaggataatgcgtgcatcagtaggcttctcagtgcttacaggtggtgttttggcaaaaactgagtggagggatttttttaactcttctacaacctagctgtattgtttgcagatttgaatgtattcacttaatatattaaatatttaatattaaatatcaattaacttaaaatgtttagtttttttatttttttgagacggagtctccctctgtcacccaggctggaatgcagtggcacaatctcggctcgctacaacctctgcttcccgggttcaagcgatcctcctgcctcagcctcccgagtagctgggacttcaggcccagtagagacagggtttcaccatgttagccaggatggtctccatctcctgacctcgtgatttgcccgcctcggcctcccaaagtgctgggattacaggcgtgagtcaccgcgcccggccaaaatatttaaagacagtatgacaggagagtggggttggcctgacacgtagaccagcctcctgggttcgcagagggtgcatttggtcttctgctctcactgcccgaccccatgggggaaagaggtgcatctccatttttaaattcctcctttgagctatagtggcaaactcagcaactaagtagatcccaagcctggtagtttcttttttcttctgggccttgagagctcatgtccccgcacctggaatctttcaaggatgtccgggccatccgggaattactgcgtgtgcacacacacaaaaacacgcccctaacaccagaggctggctgtatgattctgttttcgagcctgctgtattcacctgtctgcccgtcagctacttctaggagcgtcaaagggcctcacccagagactacagaccctccggtggagaagtgtactaggccgtgtctgcagctggagccctcggcctgaaatgttctggctttagcaaagcggcgacagtgtccaaccccagtccccgaggagggatgtcagccctgggcccctgtgagcgctgcagattcgtcccaggaaagggtgaccggggtcgctgctccgggattaccagctaaatacctgtattagcatcctcagcacgcactgggagacgcagctcaagtccgctccccttcttgcaccctcatatatatttggtgcaaaatggagaaccttttcccctacgtttgtgtaaaaatatatgtaaataaagccttaaaatagtgttaccgacccccttttccactcgcaataanattgactataaatgctgataattccaaaagaatctcgactcttccttgagtagtctggagctagcaggtgcaagtttagaaacaataactcatcactgagggaggcactgaaaattttataactgttaactggaatctaaatttccatgtaaatgggctgtctctggtcccgtgtcaagagactaatatttttccagaagcctgaaaatatgcttttatgatgttgggagtctcaaacgtaaaaacggactcctaaccctctggatgtttcggctgaactctcaactgtccaccagctccccctacacgtggctccttagaaagcgtggaaaagggaaaaatgaaaagagaaactgccaggacttaagatgtctgcttaaagactccctcgaactgcagtgaagggtcctacccgcttccaaaatgtccacccgcattcctgacgtcactggatcggctccatcaagccagaaaacgagagtgcgctccaatcagggctcagtccccgcccttgccttgcgtcacttccggtggtgcagcagccattttgtcagtcgccagcggatcccgcgcgctggagaagtgcagttccccctggttaccaactcgcccgcttttccttcggactaagggagccgtcgaagagcgctcgccaaaggcgcagccgtttctccctacggtgccgccgctcctcctgcagccgcccgtaggtagcgggccgttttcctcacctgtccctgacaggcgccctcagggagccgcggtccgcgatgtcaagcgaggaaagctaccgggccatcctgcgttacctgacgaacgagcgcgagccgtatgcgccgggcaccgagggcaatgtcaagcgtaaaatccgaaaagctgccgcctgctacgtggtgcgcggcgggactctgtattaccagcggcggcagcggcaccgcaagaccttcgcggagctggaggtggtgctgcagccggagcgacgccgggacctcatcgaggcggcgcacctgggtcccggcggcactcaccacacccggcatcagacctggcactacttgtccaagacgtactggtggcgaggtgagacctagcccgcggcgagggggcgggctggcgactcgttgcctgggcaaggctcgctggcgaggcctatgcgtacccacgagtcggagggtctcggacgcctctgggcggcggagctgctgccaggcggagccgagagggtgggggacgcgaaaggagccgcacttcccaccctcggccgattcaccacccagccn

SEQ ID NO: 404416 - DNA, 4896 bp, Homo sapiens
  misc_feature (3346)..(3346): n is a, c, g, or t
ttggcagtttcatatagttcctcttgcatgaaaacattgcaactcacatgaaaatgggtggagctatatagtcatcttatgattagagaaacaaataactgggaataaataaaaaaaattacctcagcaggagaacatcatttataactttatattttttgggaaaaaagtatattttacattctaataaactctacatattttatgggacatgaatgtctgcacatatgtactgaaatgtgttaatgtgcacagactaaataatatattctgttttcagttaacagtattaaatttgacttgttaatattttcattgtaggtatattgaagcaagtcaaagattacattaaacagtgtagcaaatgccaggagaaactagatcgatcccgtccaatatcagatgtttcagaaatgttggaagaattgggactagaccttgaatctggagaagaaagtaatgaatcggaagatgacctgagcaactttacttcatctccaactacagcatccaagcctgcaaaaaagaagccagtatccaaacatgaacttgtgtttgttgacaccaaaggagtggtaaaacgttcttctccaaaacattgtcaggctgtcttaaaacagctgaacgaacagagactttccaaccagttctgtgatgttactttgttaattgaaggagaagagtacaaagctcataaatctgttttgtcagcaaatagcgagtattttcgagatctttttattgagaaaggagctgtttccagtcatgaggctgtggtggatctttctggtttttgtaaggccagcttccttcctttactggaatttgcctatacttctgtactaagttttgatttctgtagcatggctgatgtagccatcttagctcgtcatcttttcatgtcagaagtcttagagatttgtgaaagtgtacataagctaatggaagagaagcagctaacagtatataagaagggcgaagtacaaacagttgcatccacccaggacttacgagtacagaatggaggtacagcacctcctgttgctagcagtgagggaaccacaacaagtttacctactgaacttggggattgtgaaattgtactactggtaaatggagaattgccagaagctgagcagaatggagaggtaggacgacagcctgagccccaggtttcttcagaggctgaatctgccctgtcatcagtaggatgtatagctgattcccatcctgaaatggagtctgttgatttaataacaaaaaacaaccagacagaactagaaacttcaaacaacagagaaaataacacagtttctaatatacaccctaaactttcaaaagagaatgtaattagtagctcgccagaggatagtggtatgggaaatgatatatcagctgaggatatttgtgccgaagacattccaaaacataggcagaaagttgaccaacctttaaaagatcaggaaaatctagttgcatcaacagcaaagacagactttggccctgatgatgatacttatagaagcaggcttcgacaacgttctgttaatgaaggggcatatattcgactacacaagggaatggagaaaaagctgcagaaacggaaagccgttcccaagtcagcagttcaacaggtggctcagaagttagttcaaagaggaaaaaagatgaaacagccaaaaagagatgctaaagagaacacagaagaagcatctcataaatgtggggaatgtggaatggtttttcagagacgatacgcccttataatgcacaaactgaaacatgaaagagctagagattacaaatgtccattgtgtaaaaaacagtttcagtacagtgcctctttgcgagcacatcttattcgtcataccagaaaagatgcaccctcttcatcctcgtccaattccacgtctaatgaagcatcgggaacatcatctgagaagggcagaaccaagcgggaatttatatgttccatatgtggaagaacattacctaaattatattctctccgaatacatatgttaaagcacacaggtgtaaagccacatgcatgccaggtctgtggaaagacttttatctataagcatggtctaaaattacatcagagtcttcatcaatcacagaagcagttccagtgtgaactgtgtgttaagtcatttgttaccaaacggagtcttcaagaacatatgagtattcacacaggagagtccaagtacctttgctcagtttgtggaaagtcttttcataggggctctggactcagcaagcacttcaagaaacaccaaccaaagcctgaggttcgaggctatcattgtactcaatgtgaaaaaagtttctttgaagctagagatcttcgccagcacatgaacaaacatcttggtgtgaagccattccagtgccaattttgtgataagtgctatagttggaagaaagattggtattcccatgtgaagtctcattctgtcactgagccttataggtgtaatatatgtggcaaagaattttatgaaaaagctttgttcagaaggcatgtaaagaaagctacccatgggaagaaaggaagagcaaagcaaaacctggaacgggtgtgtgaaaaatgtggaagaaaattcactcagctaagagagtataggagacacatgaacaaccatgaaggagttaagccatttgagtgcttaacatgtggagtagcttgggctgatgcccgatctctaaaacgccatgtcagaacacatactggtgaacggccctatgtctgtcctgtatgtagcgaagcctacatagatgctcgaacactccgtaaacatatgactaaattccacagagactatgtgccttgcaaaattatgctggaaaaagacacccttcagtttcataaccaaggaactcaagtggcacatgctgttagcatcttaacagcaggcatgcaggaacaagaaagcagtggtcctcaagaacttgagactgtggtagtgacaggagaaactatggaagctctggaagctgttgcagctactgaagagtatccatcggtatctacactttctgaccaaagtattatgcaagtggttaattatgtattagcacaacagcaaggacagaagctatctgaagttgcagaagctattcaaactgttaaagtagaggtagcacatatttcaggaggagaatgagtatgttaatgaagataaaaagaagtgacatctcttgtacactgaactcacagaacatttgtttacaattctgtgtgactgtctgcttggagtttacatatcaaagttctgggctgtttggtaacgtaacgtttccaaacattttgtctggccaatgggttctatagaaaagnccgtttagtgtagagaaattgaaaacagatctattaggttggtgcaattgcttttgcaccaacctaatatttgatggcagtggtttatcatgatataccttttatgaattaatgtttataaatgactgtactgaatttaaaaccgtacagtttcatttgcattttgacattactttattatacattttgcatttaaaaggctgcaccagttggcttttcttctgttttattctcaaaatatagagattctgtgatttatttgccctgtttatggattaaaaagaaaattctaatataaagcatttcaataggatgcataggtatattacgttttttaaatgctttagatctgtgattcttgacttactatttattttatccccttttaagtcagggatgctttattctattttaaagcacttatgagttacatgttgtaatcaagtttgcacaatatatttatctatatgaggaacccataaatgaatagctaatttttaaaatgccattaaaatgcatgaaatgcttattaaaaccttactatactatttcttcaaggcaagtaaattgaccatgagaaaagaacacagttattaaacactgttgacaggaaaattctccttgataacataggacaattaatggaaaaaaaaattctcattatttgcaaagaatgaacaagttaatgaacaaacaaactagatttggtatgttttcagcttttgtatcatgtttaattgtttaatttggttgaaaaactgcagttgagaaatcagatagcaatatagacattcacagcagctctgtggataccatgtaattgtcaggtaatttcagaatgttgaaaattattcagtgcagccctcatagtatcatacttgaagaaattgattacagttccactaaattgttgaagataaattatttttaaaggttatgaaaactaagttatattaattcatatgtttgatttttaaatcccacctcctcaagctatccaattttctgactttgaaaataaccatgagagatgccacatttctctctgggaaactaccactcaaagaataattgttaaaaattaagcttttaggtattagaagctgttataaagtataaaattaagatataagcagatcacatgtaaatcattcctaaagcacaagaaaagaatgtgccttgatgtacatatattactaagttgcctctcccagtttactttaaaaatggctttaaggataaagaataaatgtgatagctgtgcatgcattatatatttgcatttgcaaatttcccattgttttaacagctgtgtggctgactttcaattttaagacgtgaattgacatacagcccataactttataatggctgctcatttatcttatctttcagttagtggaaaaacatttcaacctgactaaaatttggaattgtgtcttttatgttccatcctctgttgttactagatttagtttaaaaattgtgtatgaccattaatgtatgtcataaacatgtaaataaaagatgttgaatcttgttgaaaagca

SEQ ID NO: 404417 - DNA, 5183 bp, Homo sapiens
  misc_feature (1531)..(1531): n is a, c, g, or t
ttttgtaatagttttatttagggaattactgggaaaataaagtcattatacccaacttgaatgtaaagctatgcttgctgatttttggagaataaaatgtctgggctaaatgttggcttttaataaagtggagctgcccattgtcattacccttgggtcttaggtaacctgggacccagaagaagctagaaataaacactacctgttctcactacagcaagtttagctttactcaggaagacaatttgaccactgggaaagcattttattaaaacgtttgtttctattggcccaaaggataatgcgtgcatcagtaggcttctcagtgcttacaggtggtgttttggcaaaaactgagtggagggatttttttaactcttctacaacctagctgtattgtttgcagatttgaatgtattcacttaatatattaaatatttaatattaaatatcaattaacttaaaatgtttagtttttttatttttttgagacggagtctccctctgtcacccaggctggaatgcagtggcacaatctcggctcgctacaacctctgcttcccgggttcaagcgatcctcctgcctcagcctcccgagtagctgggacttcaggcccagtagagacagggtttcaccatgttagccaggatggtctccatctcctgacctcgtgatttgcccgcctcggcctcccaaagtgctgggattacaggcgtgagtcaccgcgcccggccaaaatatttaaagacagtatgacaggagagtggggttggcctgacacgtagaccagcctcctgggttcgcagagggtgcatttggtcttctgctctcactgcccgaccccatgggggaaagaggtgcatctccatttttaaattcctcctttgagctatagtggcaaactcagcaactaagtagatcccaagcctggtagtttcttttttcttctgggccttgagagctcatgtccccgcacctggaatctttcaaggatgtccgggccatccgggaattactgcgtgtgcacacacacaaaaacacgcccctaacaccagaggctggctgtatgattctgttttcgagcctgctgtattcacctgtctgcccgtcagctacttctaggagcgtcaaagggcctcacccagagactacagaccctccggtggagaagtgtactaggccgtgtctgcagctggagccctcggcctgaaatgttctggctttagcaaagcggcgacagtgtccaaccccagtccccgaggagggatgtcagccctgggcccctgtgagcgctgcagattcgtcccaggaaagggtgaccggggtcgctgctccgggattaccagctaaatacctgtattagcatcctcagcacgcactgggagacgcagctcaagtccgctccccttcttgcaccctcatatatatttggtgcaaaatggagaaccttttcccctacgtttgtgtaaaaatatatgtaaataaagccttaaaatagtgttaccgacccccttttccactcgcaataanattgactataaatgctgataattccaaaagaatctcgactcttccttgagtagtctggagctagcaggtgcaagtttagaaacaataactcatcactgagggaggcactgaaaattttataactgttaactggaatctaaatttccatgtaaatgggctgtctctggtcccgtgtcaagagactaatatttttccagaagcctgaaaatatgcttttatgatgttgggagtctcaaacgtaaaaacggactcctaaccctctggatgtttcggctgaactctcaactgtccaccagctccccctacacgtggctccttagaaagcgtggaaaagggaaaaatgaaaagagaaactgccaggacttaagatgtctgcttaaagactccctcgaactgcagtgaagggtcctacccgcttccaaaatgtccacccgcattcctgacgtcactggatcggctccatcaagccagaaaacgagagtgcgctccaatcagggctcagtccccgcccttgccttgcgtcacttccggtggtgcagcagccattttgtcagtcgccagcggatcccgcgcgctggagaagtgcagttccccctggttaccaactcgcccgcttttccttcggactaagggagccgtcgaagagcgctcgccaaaggcgcagccgtttctccctacggtgccgccgctcctcctgcagccgcccgtaggtagcgggccgttttcctcacctgtccctgacaggcgccctcagggagccgcggtccgcgatgtcaagcgaggaaagctaccgggccatcctgcgttacctgacgaacgagcgcgagccgtatgcgccgggcaccgagggcaatgtcaagcgtaaaatccgaaaagctgccgcctgctacgtggtgcgcggcgggactctgtattaccagcggcggcagcggcaccgcaagaccttcgcggagctggaggtggtgctgcagccggagcgacgccgggacctcatcgaggcggcgcacctgggtcccggcggcactcaccacacccggcatcagacctggcactacttgtccaagacgtactggtggcgaggtatattgaagcaagtcaaagattacattaaacagtgtagcaaatgccaggagaaactagatcgatcccgtccaatatcagatgtttcagaaatgttggaagaattgggactagaccttgaatctggagaagaaagtaatgaatcggaagatgacctgagcaactttacttcatctccaactacagcatccaagcctgcaaaaaagaagccagtatccaaacatgaacttgtgtttgttgacaccaaaggagtggtaaaacgttcttctccaaaacattgtcaggctgtcttaaaacagctgaacgaacagagactttccaaccagttctgtgatgttactttgttaattgaaggagaagagtacaaagctcataaatctgttttgtcagcaaatagcgagtattttcgagatctttttattgagaaaggagctgtttccagtcatgaggctgtggtggatctttctggtttttgtaaggccagcttccttcctttactggaatttgcctatacttctgtactaagttttgatttctgtagcatggctgatgtagccatcttagctcgtcatcttttcatgtcagaagtcttagagatttgtgaaagtgtacataagctaatggaagagaagcagctaacagtatataagaagggcgaagtacaaacagttgcatccacccaggacttacgagtacagaatggaggtacagcacctcctgttgctagcagtgagggaaccacaacaagtttacctactgaacttggggattgtgaaattgtactactggtaaatggagaattgccagaagctgagcagaatggagaggtaggacgacagcctgagccccaggtttcttcagaggctgaatctgccctgtcatcagtaggatgtatagctgattcccatcctgaaatggagtctgttgatttaataacaaaaaacaaccagacagaactagaaacttcaaacaacagagaaaataacacagtttctaatatacaccctaaactttcaaaagagaatgtaattagtagctcgccagaggatagtggtatgggaaatgatatatcagctgaggatatttgtgccgaagacattccaaaacataggcagaaagttgaccaacctttaaaagatcaggaaaatctagttgcatcaacagcaaagacagactttggccctgatgatgatacttatagaagcaggcttcgacaacgttctgttaatgaaggggcatatattcgactacacaagggaatggagaaaaagctgcagaaacggaaagccgttcccaagtcagcagttcaacaggtggctcagaagttagttcaaagaggaaaaaagatgaaacagccaaaaagagatgctaaagagaacacagaagaagcatctcataaatgtggggaatgtggaatggtttttcagagacgatacgcccttataatgcacaaactgaaacatgaaagagctagagattacaaatgtccattgtgtaaaaaacagtttcagtacagtgcctctttgcgagcacatcttattcgtcataccagaaaagatgcaccctcttcatcctcgtccaattccacgtctaatgaagcatcgggaacatcatctgagaagggcagaaccaagcgggaatttatatgttccatatgtggaagaacattacctaaattatattctctccgaatacatatgttaaagcacacaggtgtaaagccacatgcatgccaggtctgtggaaagacttttatctataagcatggtctaaaattacatcagagtcttcatcaatcacagaagcagttccagtgtgaactgtgtgttaagtcatttgttaccaaacggagtcttcaagaacatatgagtattcacacaggagagtccaagtacctttgctcagtttgtggaaagtcttttcataggggctctggactcagcaagcacttcaagaaacaccaaccaaagcctgaggttcgaggctatcattgtactcaatgtgaaaaaagtttctttgaagctagagatcttcgccagcacatgaacaaacatcttggtgtgaagccattccagtgccaattttgtgataagtgctatagttggaagaaagattggtattcccatgtgaagtctcattctgtcactgagccttataggtgtaatatatgtggcaaagaattttatgaaaaagctttgttcagaaggcatgtaaagaaagctacccatgggaagaaaggaagagcaaagcaaaacctggaacgggtgtgtgaaaaatgtggaagaaaattcactcagctaagagagtataggagacacatgaacaaccatgaagaacagtcctaaatccattaggcatgaaacaatgaagtaggcattctgtggactacagtgagtttctgaaactgaggtaagtttgcccgttcaccatatggaatgtattatgctacactggatcaagagtttatttatggagaaaaagaagatgctccaagagatggccttgattaacagttaagaaagcaggacacagagctagaatggggagaaaaaaagtcgaacacagactgaca

SEQ ID NO: 404418 - DNA, 441 bp, Homo sapiens
aggtatattgaagcaagtcaaagattacattaaacagtgtagcaaatgccaggagaaactagatcgatcccgtccaatatcagatgtttcagaaatgttggaagaattgggactagaccttgaatctggagaagaaagtaatgaatcggaagatgacctgagcaactttacttcatctccaactacagcatccaagcctgcaaaaaagaagccagtatccaaacatgaacttgtgtttgtaagtggtactctccagtcagctttaagatttgtaactagtgtactagtatttgcagccttggtgacttatttttctcaaaccactaagactgcttattgaataagacaaaatggcagtgtactgtgttatataagctgaactgcctcttcatttatcataaatgttcctgttattttttcagaatgaacttaataattacc

SEQ ID NO: 404419 - DNA, 877 bp, Homo sapiens
tgataaaagaatggacatcctttggatgggtaagtagaaatgaagaagatggaagtggggccattccattctgaaaagatacagaacacaggatttttgcatcagcaacaataagtcaaatcttctggttagagatagaagtatcctatcctatcaatgaggaggcattaaaaagtttaaaagtaaaattgtaatcattctgtagaggatcttggatgcccagaaaaatgacaacaagctatgcaaaatttctgaactgagaagtgataattaagaaatacaaatgcagcagcttgccacgttgagaatttcaaagacacattaagtactggttttctctttatactctgtcctggatttctctacaaaagatgtcagcagagggaataaaagacatcatgaagggagactgaatgaaggatttgtctctaattagatgtaaaaagaaaaaaaaacaaagatgaacttgagcttttcagtctggtgaaaaacaatgattcggatcttaaatacgtcttccaggtagtcatgagtcaatagcaactgtgaattcaaattgcaactggaagaataccgagactggaattacgaagttgatgtacagtttcctagggctgccctaacaaattactgtgactgggtggctaaaaacaacacaaatgtattcttccacagttctgaaatacagaaatctgaaatcaaggtgttggcggagtcatgctccctttgaaggcattagggagaaccctcccttgcctcttccagcttccactgactcctggtaatggttcgctgtggcagcataatgccaatttctgcctgtcttcacacgaccttctctgtgtctctctgcctgtgtgtctcctcttcttataag

SEQ ID NO: 404420 - DNA, 778 bp, Homo sapiens
aagcattcagctacagacttgccagtaaaatgtactcaacataaaatttcaataaaaataaggatactggtgcttattaaacaggtagattttataacggtataaaatgttgccaggctacacagctgaaagaaattacctttgaaatcctgaggatgtaaaaaaattttggattgtcactcttattataacacttgtagatgggtcttaagagtagggaatgtcttgattattgagatgtacaattcaagtttctatggccatcaccatcatctggacatattttgttgaaaatcacatgggaaaatggtgtaaccagaaacaagacatggctatccaaaggatcaaactcaccaggacaccataaagactggtaaattttaggatgaaatgcaaatgtattctatatattaaaactaaaaaccattttagtaagttatttttaaatgtacctgatagcaaaggggctctgtatgtgccacgtgagggctacgtgaggactgttcatgaaagcataaagtagaaggcaacccaaatacccatcaagcagtaaatggataaataaaaccgtggcgtgcccatggaatgaaacaataagcaccaattcaaaaagacatcaatccatattatcgccatgggaaaacaagaccttaacatggataaaaacaatataaagcacaactcaaaatagtatctcacttatataaaatgttttgaaacctacctacaaaacaatttataagtgtgtacgtgtgtgtgtgtgtgtgtaagtatatag

SEQ ID NO: 404421 - DNA, 688 bp, Homo sapiens
ggaagactaattttaaactcaggctataggtcaaatctcaacttaatatgaagaaagctctcaaaaggaaaccttttcagtgtgcagactaagaactgtccgctctaagtgaagcaaatgcaccagtagcatttacttaccctaaatattctataggatttgagacacagtttctggatacaggatctaaaaatagttaaaggggcaatacctgctaatttctctatcattgatggctttaacaacttctttcatccactattccctctatataccaggaccctagcccaagggagacacagtagaaaaccatttaaaaccaaatactacattggaagatgaacttctttgttgaactgagagtatacatacactttcaaacagccccagcaaaaatgtttgctaatcagcaagcaaagcactgtcttaagagctttcagagatgataaggaggatgttgatgatagtggttaacatttaaaaagctcttctcacacaacaggtactgtgctagctaccttgtagtagtcactgaatctatgaagtagacactactggtatatccatattacagataaacaacctgagacagtgaagattaagtaatctgtccaagatcacatatctgatacacaacagaagccaagatagggaaggtatctctgactttaaagactacataattaac

SEQ ID NO: 404422 - DNA, 437 bp, Homo sapiens
agagatctgttgtgagatctgcaacagaatgtaagggctcttccatagctctcattctaattaaatgtgttaccaattaattcacttaggatgcttacagcagacagaagcataggtatatgcaggttaaaataaaagcagtaaggccgggtgcagtggctcatgcctgtaatctcaccactttgggaggctgaggtgggtggatcacctgagctcaggagtttgagacctgcctggccaacatggcgaaatcctgtctctactaaaaatacaaaaattagctgggcatgtggtgcatgcttgtaatcccagctactcaggaggctgaggcaggagaattgcttgaacctgggaggtagaggttgcagtgagccgagattgcgccactgcactccatcctgggcaacagagcaagactccatttcaaaaaaaaaaaa

SEQ ID NO: 404423 - DNA, 320 bp, Homo sapiens
caggggcattatgggcagtttcatatggggtacaataagatctccaattctatagggaggctgaagctgacctcctaggagccatctcctaaggaaagtgggggtctatccagaggggcttaggggtcgggcttctcttgagacacagcggcagtccacaggggtgtcttgttccagtgagtcgtcagcctgcacagccaccgacacattatgtgggcttgcggtgtggtggggagagaggaaaggccaggagggctgggagaagggagagcagtgggcgaatggaagagagatgaagaggaggaaagtgtttggttttc

SEQ ID NO: 404424 - DNA, 365 bp, Homo sapiens
aactttacaaatcatctagtgcagaaacaataatgaaaaccgaacccaaacctcagaattcttttttaaaaaaatcaatgttaacattctttctacactaagaccatgtacctgtattttcccacacacgcgttcagtttgtgatcatatgtgtgacatgttttccttcattctgatcatagtttaggaatatattcgggtatgtaatttatttcactttctattataagcatgttaatgtgttgctacataatcaacattttattttgattattgaacaataccctaaagcttgactgcaagacttacatttactactgttgtttgatatttttatcactgcaataaacaccttttattatagt

SEQ ID NO: 404425 - DNA, 435 bp, Homo sapiens
tgagccagtcttaccttctccagacaccctctctcttagcaggttttttattgttggtttttgtcagccaaaatatttgtgagtctccataactgaatgtgatcccttcttctagggatgctggtgctttacttgcaagatggatatggtgatagtagaatctcaggcactgtaatgagcctggctactatggaaagaacttcagcatgagcaggagtctaatctggcattgctaggacttttggtagccatgatataaaacagttgcagagtaggcttgtcccagcggggaaatctggaagggcttcgtggcagtgacatttactaggcccttgaggactgtgaggattttgcctagcagagagagggcaggtagagaccactgtgatcctggaagcttttgaccctgtttggaatacaaatttataccaaaaa

SEQ ID NO: 404426 - DNA, 379 bp, Homo sapiens
cattcagagagaatctcagagaaaaatgtctacacagagaaaaaagttcaaaccaaagcactttgaatagcaaaaaggggtctaaaatatttaaatcatgattttgaagtatttcttggttgaaaaattggtttattttattgcggaactgtaaaataattatctttaaagctttttagaaataagatttgttgtaaaaatttaaataacatatgcatgtacattaaagcaaatagcttttaaaaatcgattacctcaattattttgccctatttatttgttgtagttgaaaaaacattacatttatcatcctaacaatttttaagcatatagttcaatagtgttaaatatattcatgttgttgtatagcagatctcta

SEQ ID NO: 404427 - DNA, 458 bp, Homo sapiens
acctcccccacttttgaccatgtgccaggcactgttctagtgctgggaatactgtactggacaagaaaagtccctgtattcatggagcttaccttttattgggcttgggggcagacacataattttaagtaaataaacagaaaatttaaaatggtggtaagcgtcatgaagaagataacatggtaatgagatagagcagtggttctcagaggcgatccccagacctgcagcatcagcatcacgtgggaacttatttgaaacacacattctcaggcctgatgagcaaggtgggagatgagtgagaaggtggctggggccagagtatctagagctgtggttctcaatcatggctgcacgttagaatcacctgaagagcttcaaaccaatccccaaggtttagcgtcagaaattctgatttaattggtctgatgtggggtttgagcatcgttaaaaaaaaa

SEQ ID NO: 404428 - DNA, 475 bp, Homo sapiens
ttaaggtcttcttggccaaccacagttatcttcggaaaactttacttgctatccctttaaaacatcaatgcattattttgaggccgtatcattgtcatgttgaagatctagtggacttggtggtttttgtctcatattggttattcctttttctccctctggcatggcctgtgtgatagccctagttttctcacagtctgctgtctgcaaaagggagatactaccagcaaagaatctcaaaacaacattttcacctttgtcattggtaaaaataatttaacttccagttaaagacaaagtttgcagtaaacaatttgtttattctttatgagttaatctttaaaaccgcaagtggtagataactggtgaactgaattagctttattagaaaaaaataaaacaagctgtaaagactacatatgattattaccatgaaaattcttcctagaatccaatgaggaagttaaaggaaaaa

SEQ ID NO: 404429 - DNA, 3012 bp, Homo sapiens
  misc_feature (1806)..(1806): n is a, c, g, or t
cacacgcacacacacacacacaaacacacgcgcacgcaaacagcagtgaggaagagaaaagcagagataagcaaggctccgcagcagcctcctttctaacttgaccctcgccagaccctggccagcatggttgtcctgaatccaatgactttgggaatttatcttcagcttttcttcctctctatcgtgtctcagccgactttcatcaacagcgttcttccaatctcagcagcccttcccagcctggatcagaagaagcgtggtggccacaaagcatgctgcctgctgacgcctcctccaccaccactgttcccaccaccattcttcagaggtggccgaagtccgcttctctccccagacatgaagaatctcatgctggaactggagacctcgcagtccccgtgcatgcaaggctcgctaggctcccctgggcctcccggcccccagggtccaccggggcttcctggcaagacaggaccaaagggagaaaagggggagcttggccgaccaggaaggaagggtagacctggccccccaggtgttcctggcatgcctgggcccatcggttggccaggccctgaaggacccaggggtgaaaaaggtgacctgggtatgatgggcttgccagggtcaagaggaccaatgggctccaagggctaccctggatccagaggggaaaagggatccagaggtgaaaagggtgacctgggtcccaaaggagaaaagggtttcccaggatttcctggaatgttggggcagaaaggtgaaatgggtccaaaaggtgaacctgggatagcaggacaccgaggacccacaggaagaccaggaaaacgaggcaagcagggacagaaaggggatagtggagttatgggcccaccaggcaagcctgggccttctggtcaacctggccgtccggggcccccaggccccccacctgcaggacaacttataatgggacccaaaggggaaagaggatttcccgggcctccaggaagatgtctttgtggacccactatgaatgtgaataacccttcctacggggaatctgtgtatgggcccagttccccgcgagttcctgtgatttttgtggtcaacaaccaggaggagcttgagaggctgaacacccaaaacgccattgccttccgcagagaccagagatctctgtacttcaaggacagccttggctggctccccatccagctgacccctttctaccctgtggattacactgcagaccagcacggcacctgtggggatgggctcctgcagcctggggaggagtgtgacgacggtaacagcgatgtgggtgacgactgcatccgtgactgtcaccgtgcctactgtggagatggtcaccggcatgagggtgtggaggactgtgacggctctgactttggctacctgacatgcgagacctatctccctgggtcatatggagacctgcaatgcacccagtactgctacatcgactccacgccctgccgctacttcacctgagggccgtgagagaaggtgggctgcgccacaggaactggcagcagcttctccactgtcatcaaactggccatgtcctggccccgtctccaccaacctttgtgtgacaaaaacaaggacaaattcctgctactaagacatgctgttaactcagtctgactggaagaatttaggaccactgcatcctgtcttaatccaaggtactggaaaaccttccacatgcccaacctgagacctgttccccatcgctaccatttggccaaacaaccggctacaatggctcttcctcttctggaatgttgctgacccagngccgtggacttgggctggagcactgtttagacacacatagacctgcaggcctgttttagtatgttttgatctctttggggaatctggagtacaggcctctccgcccctgaccaccgaaacgtgcaggcattctcactcacactgggcagcccgctgtcgggtctctctaggcctatgaaccacaaagcagggaagtgggcacgttctctcggggtggctcacagctttgaacctgccaaaggacccctcgactggccacagcccagcccagcctgacgtggatgtggctgcccaggaaaagacttaactgtgaaaaagtactgagaacccacctgacccaggcttgccccaagcagaggctagagaagaggctcctcttctcagtgtttcccaaaggggcggctcttgtggtttcaaaatctctggcaccatcttgacctcttggctctctctgcactttgccccctgtctcaaaaatgtccctcatgtccatttcctgtccaggagactcatgaggactgtgtgacctgcacaagcccacacctgggcaggctgttggtgtctccttggtccttaggcagatactcccctgagtccccgatctagggccagctgcagagggctctctctaggcagagcgttcctggccagagctctacctctttgcctcctgctgacccctgacagcgtcccgtggcatttctttcatgtctgcatattgcatagccttgtcctcctgtgtgcctgagctcctcccttttcaataagattattagtcgtgcatgtctgtgagctgcctttcatcaccatttttcctgagtagggcttagttttattctggaaagacatctccaaggtgaggtccacccccacagcagacctcaagtagaaattgcccaatttttaccagctggagggacacccttgggtttttgtacgaagctatttaatgagcctgtgtcttggggactcagcaggctggagcttggggcctggtggaccatcacctggtgtctgtaggtggacccggtctcccacaggtgacatcaacctgagggtggcgtctttagagacaggcacatgggcagctctgttcccttcgcctctactgcgaggcctggggagatgttgttttcatgctgcttccaccatcacactggggtttctggatgggaaataaaaaaataaaggcagttcatttcccca

SEQ ID NO: 404430 - DNA, 738 bp, Homo sapiens
cacacgcacacacacacacacaaacacacgcgcacgcaaacagcagtgaggaagagaaaagcagagataagcaaggctccgcagcagcctcctttctaacttgaccctcgccagaccctggccagcatggttgtcctgaatccaatgactttgggaatttatcttcagcttttcttcctctctatcgtgtctcagccgactttcatcaacagcgttcttccaatctcagcagcccttcccagcctggatcagaagaagcgtggtggccacaaagcatgctgcctgctgacgcctcctccaccaccactgttcccaccaccattcttcagaggtggccgaagtccgcttctctccccagacatgaagaatctcatgctggaactggagacctcgcagtccccgtgcatgcaaggctcgctaggctcccctgggcctcccggcccccagggtccaccggggcttcctggcaagacaggaccaaagggagaaaagggggagcttggccgaccaggaaggaaggtatggtctgcgctgttctgagcaggagcctgctactgccaggcattcagacttcttccgggggctgccaagcctggccaaattccacccctctcacttcccgccccaaccccagaccatctcactctgctacccatcagagaaacccttcatagctccaaccagtgacattgaatgactgtcactctctgtttgattaaatttgaataaagtgccaga

SEQ ID NO: 404431 - DNA, 1351 bp, Homo sapiens
  misc_feature (145)..(145): n is a, c, g, or t
acaagttggatgaagacgcctcccctaacgaggagacgggggacgtccccaaagacacactggatgacctgttccccatcgctaccatttggccaaacaaccggctacaatggctcttcctcttctggaatgttgctgacccagngccgtggacttgggctggagcactgtttagacacacatagacctgcaggcctgttttagtatgttttgatctctttggggaatctggagtacaggcctctccgcccctgaccaccgaaacgtgcaggcattctcactcacactgggcagcccgctgtcgggtctctctaggcctatgaaccacaaagcagggaagtgggcacgttctctcggggtggctcacagctttgaacctgccaaaggacccctcgactggccacagcccagcccagcctgacgtggatgtggctgcccaggaaaagacttaactgtgaaaaagtactgagaacccacctgacccaggcttgccccaagcagaggctagagaagaggctcctcttctcagtgtttcccaaaggggcggctcttgtggtttcaaaatctctggcaccatcttgacctcttggctctctctgcactttgccccctgtctcaaaaatgtccctcatgtccatttcctgtccaggagactcatgaggactgtgtgacctgcacaagcccacacctgggcaggctgttggtgtctccttggtccttaggcagatactcccctgagtccccgatctagggccagctgcagagggctctctctaggcagagcgttcctggccagagctctacctctttgcctcctgctgacccctgacagcgtcccgtggcatttctttcatgtctgcatattgcatagccttgtcctcctgtgtgcctgagctcctcccttttcaataagattattagtcgtgcatgtctgtgagctgcctttcatcaccatttttcctgagtagggcttagttttattctggaaagacatctccaaggtgaggtccacccccacagcagacctcaagtagaaattgcccaatttttaccagctggagggacacccttgggtttttgtacgaagctatttaatgagcctgtgtcttggggactcagcaggctggagcttggggcctggtggaccatcacctggtgtctgtaggtggacccggtctcccacaggtgacatcaacctgagggtggcgtctttagagacaggcacatgggcagctctgttcccttcgcctctactgcgaggcctggggagatgttgttttcatgctgcttccaccatcacactggggtttctggatgggaaataaaaaaataaaggcagttcatttcccca

SEQ ID NO: 404432 - DNA, 4154 bp, Homo sapiens
  misc_feature (39)..(39): n is a, c, g, or t
  misc_feature (171)..(171): n is a, c, g, or t
  misc_feature (861)..(861): n is a, c, g, or t
  misc_feature (1195)..(1195): n is a, c, g, or t
  misc_feature (1385)..(1385): n is a, c, g, or t
  misc_feature (2282)..(2282): n is a, c, g, or t
  misc_feature (2943)..(2943): n is a, c, g, or t
  misc_feature (3549)..(3549): n is a, c, g, or t
  misc_feature (3874)..(3874): n is a, c, g, or t
tgagacacagtttgctctgtcacccaggctggagtacantggcactatcttggctcactgcaacctccacctcccaggttcaagagattcttctgtctcagcctcccagtagctaggactacaagtgtgtgccaccacaccctgctaatttttgtatttttagtagagacngggtttcaccacattggccaggctggtctcgaacttctgacgtcaagtgatccacccgactcggcctctcaaagtgctgggattacaggcgtgggccgccgcacccggccatttgcttttgattttactggctcataggtggaagggacttgccttgcctcagatgaaactttggactttgactttcaagttaatactggaataagttaagactttgggggactgttgctaaggcacaattttgttttgaaatgtataaagaacataatatctgggaggggccaggggcagaatgatatggtttggctctgtgtccacacctgaatatcatctcaaattgtaatcccagtaatccccatatgttgagggcaggacccagggcaaggtgactggatcatgggagcggtttcccccatgctgttctcgtgatagtgagtgaattctcacaagatctgatggttttataagtgtttggcaagttcctgctccacaccatctctctcttctgccgccatttgagaaggtccaagtttgcttccccttcgccttccaccatgactgtaagtttcctgaggcctccccagcaatgtggaagttccatcgatagaagagtggctgtgacccgaaggaatgtctgacccccacagcagtcctctcctgccagagccactttccagcagatacaaactntacgaggcagagtttaccagcccgagctggccctcgacatccccggatactcacccagctctgcccctcctggaaatgcctgaagaaaaggatctccggtcttccaatgaagacagtcacattgtgaagatcgaaaagctcaatgaaaggagtaaaaggaaagacgacggggtggcccatcgggactcagcaggccaaaggtgcatctgcctctccaaagcagtgggctacctcacgggcgacatgaaggagtacaggatctggctgaaagacaagcaccttgccctccagttcatagactgggtcctgagagggaccgctcaggtgatgttcntcaacaatcctctcagcggcctcatcatcttcatagggctgctgatccagaatccctggtggacaatcactgggggcctggggacagtggtctcgaccttaacagctctcgccttgggccaagacaggtctgccattgcctcaggactccatgggtacaacgggatgctggtgggactgctgatggccgngttctcggagaagttagactactactggtggcttctgtttcctgtgaccttcacagccatgtcctgcccagttctttctagtgccttgaattccatcttcagcaagtgggacctcccggtcttcactctgcccttcaacattgcagtcaccttgtaccttgcagccacaggccactacaacctcttcttccccacaacactggtagagcctgtgtcttcagtgcccaatatcacctggacagagatggaaatgcccctgctgttacaagccatccctgttggggtcggccaggtgtatggctgtgacaatccctggacaggcggcgtgttcctggtggctctgttcatctcctcgccactcatctgcttgcatgcagccattggctcaatcgtggggctgctagcagccctgtcagtggccacacccttcgagaccatctacacaggcctctggagctacaactgcgtcctctcctgcatcgccatcggaggcatgttctatgccctcacctggcagactcacctgctggccctcatctgtgccctgttctgtgcatacatggaagcagccatctccaacatcatgtcagtggtgggcgtgccaccaggcacctgggccttctgccttgccaccatcatcttcctgctcctgacgacaaacaacccagccatcttcagactcccactcagcaaagtcacctaccccgaggccaaccgcatctactacctgacagtgaaaagcggtgaagaagagaaggcccccagcggaggcggtggggagcatccacccacagcaggcccaaaggtggaggagggctcggaggctgtgctctccaagcacaggagtgtatttcacatcgagtggtcatccattcggaggaggagcaaagtgttccnggaaaaggcgaacaccaggaaagacaaaacaaagacccatttccctatcgataccggaatgcccacagtcgagctgcttgatctggacaccatggaggagagctctgagataaaagtggaaacaaacatttccaagacatcctggattcggagttccatggctgccagtgggaaaagggtcagcaaagccctcagctacatcacaggagagatgaaggagtgtggagagggacttaaagacaagtccccagtgttccagttctttgactgggtcctccgaggcacatctcaagtgatgtttgtgaacaaccccctcagcggcatcctcatcatcctcggcctcttcatccagaacccctggtgggcgatctcaggctgcctgggtaccatcatgtccaccttgacagccctcatcctgagtcaggacaagtcggccatcgctgcaggatttcacggctacaatggggtgctggtggggctgctgatggccgtgttctcagacaaaggtgactactactggtggctgttgctacccgtcatcatcatgtccatgtcttgccccatcctctccagtgccctgggtaccatcttcagcaagtgggacctcccagtcttcacactgcccttcaatatcactgtgactttgtacctggcagccacnggccactacaaccttttcttccccacaacgctgctgcagcctgcatccgccatgcccaacatcacctggtcagaggtccaagtgcccttgcttttgagagccatccccgttggaattggccaagtgtacggctgtgataacccctggactggaggcatcttcctcatagctctgttcatatcctcacctctcatttgcttgcatgcagcaattggatccaccatggggatgctagcagcactcactattgcgacgccctttgactccatctacttcggcctgtgtggcttcaacagcaccctcgcatgcatagcgataggaggcatgttctacgtcatcacctggcagacgcacctcctcgccatcgcctgcgcactgtttgctgcctacctgggtgctgccctggctaacatgttatctgtgtttggattgccgccctgcacttggcccttctgtctctcagctctcaccttcctgctcctgacgaccaataaccccgccatctacaagctcccgctcagcaaagtcacctacccagaggccaaccgcatctactacctgtcccaggagagaaacagaagggcatcaatcataacaaagtatcangcctacgatgtctcctaagtttccctgtctaaaacacatcagtgtaaattcaggcttcagcacgccgtccagatccccaggataagagaccacttagccttccctttggtctgttctgtgactctctccccaaacacaaagaagcgtgtatgtagtcaccattccagaacctctcttttctaagatgcacaacacttatcaaagatatgtttagtttagactttatacccttagctttcccataagagctccctttgtggggaacttgccctcttctgcgaaataagcctcatccttaaagagaagtcaccggccgggcacggtngctcacgcctgtaatcccagcactttgggaggccgaggcgggtggatcacgaggtcaggagatcgagaccatcctggcgaacatggtgagaccccatctctactaaaaatacaaaaaattagccaggcatggtggcgggcacctgtagtcccagctacttgggaggctgaggcaggagaatggcgtgaacccgggaggtggagcttgcagtgagccaagatcacgccactgcactccagcctgggcaacggagtgagactctgtctcaaaaaaaaaaccg

SEQ ID NO: 404433 - DNA, 2055 bp, Homo sapiens
  misc_feature (183)..(183): n is a, c, g, or t
  misc_feature (844)..(844): n is a, c, g, or t
  misc_feature (1450)..(1450): n is a, c, g, or t
  misc_feature (1775)..(1775): n is a, c, g, or t
tccggagacacagtgggatccaaaaaagtaccatgtaataacatacatgatttctgcagcaaaatgttacactaagcaggacaaagatgtaaagtccctcacacatcaattgaggttattgtgctgccctatcaatttacttaaacttccaggggattttcagttttaacactgaatgttccnggaaaaggcgaacaccaggaaagacaaaacaaagacccatttccctatcgataccggaatgcccacagtcgagctgcttgatctggacaccatggaggagagctctgagataaaagtggaaacaaacatttccaagacatcctggattcggagttccatggctgccagtgggaaaagggtcagcaaagccctcagctacatcacaggagagatgaaggagtgtggagagggacttaaagacaagtccccagtgttccagttctttgactgggtcctccgaggcacatctcaagtgatgtttgtgaacaaccccctcagcggcatcctcatcatcctcggcctcttcatccagaacccctggtgggcgatctcaggctgcctgggtaccatcatgtccaccttgacagccctcatcctgagtcaggacaagtcggccatcgctgcaggatttcacggctacaatggggtgctggtggggctgctgatggccgtgttctcagacaaaggtgactactactggtggctgttgctacccgtcatcatcatgtccatgtcttgccccatcctctccagtgccctgggtaccatcttcagcaagtgggacctcccagtcttcacactgcccttcaatatcactgtgactttgtacctggcagccacnggccactacaaccttttcttccccacaacgctgctgcagcctgcatccgccatgcccaacatcacctggtcagaggtccaagtgcccttgcttttgagagccatccccgttggaattggccaagtgtacggctgtgataacccctggactggaggcatcttcctcatagctctgttcatatcctcacctctcatttgcttgcatgcagcaattggatccaccatggggatgctagcagcactcactattgcgacgccctttgactccatctacttcggcctgtgtggcttcaacagcaccctcgcatgcatagcgataggaggcatgttctacgtcatcacctggcagacgcacctcctcgccatcgcctgcgcactgtttgctgcctacctgggtgctgccctggctaacatgttatctgtgtttggattgccgccctgcacttggcccttctgtctctcagctctcaccttcctgctcctgacgaccaataaccccgccatctacaagctcccgctcagcaaagtcacctacccagaggccaaccgcatctactacctgtcccaggagagaaacagaagggcatcaatcataacaaagtatcangcctacgatgtctcctaagtttccctgtctaaaacacatcagtgtaaattcaggcttcagcacgccgtccagatccccaggataagagaccacttagccttccctttggtctgttctgtgactctctccccaaacacaaagaagcgtgtatgtagtcaccattccagaacctctcttttctaagatgcacaacacttatcaaagatatgtttagtttagactttatacccttagctttcccataagagctccctttgtggggaacttgccctcttctgcgaaataagcctcatccttaaagagaagtcaccggccgggcacggtngctcacgcctgtaatcccagcactttgggaggccgaggcgggtggatcacgaggtcaggagatcgagaccatcctggcgaacatggtgagaccccatctctactaaaaatacaaaaaattagccaggcatggtggcgggcacctgtagtcccagctacttgggaggctgaggcaggagaatggcgtgaacccgggaggtggagcttgcagtgagccaagatcacgccactgcactccagcctgggcaacggagtgagactctgtctcaaaaaaaaaaccg

SEQ ID NO: 404434 - DNA, 146 bp, Homo sapiens
gagatgacttttcacagtagataatatgactactaccagaatgcaagtctcttgccctacagaccagtgctgtttccactatccccatctgccacattcagaacagcagttagttgcagcagttatcgattacaggcaaagcagac

SEQ ID NO: 404435 - DNA, 450 bp, Homo sapiens
agaagtgtgcccaaggtcacaccacagagcctgagctagaacacagatgggctacattgtggtcttgctccatcctcccagcataagttagctccctctccctccatggggacacatcccaactcctgttagtcctaccaggcccagggctcttttcagggccctgactcccccctgagaaatggaggcatagtagaggatcagataaaggaataggggagcatctcagagttgtaacaactgtcaccaggtctacttctgttcatccaagtcaccatcaatctcccatgacacaggtgaagcaagtgaggtgtgtggcccgcaatccagggttagtggcagatttgaggcttggccttgccttgcttctttaactccctgtaagtcatgttctcacctatggctcatcctctggcagcagaaagccccccaagtggcaaaccccactca

SEQ ID NO: 404436 - DNA, 501 bp, Homo sapiens
gaggtattggggtgcttcttacagtctttcaagaatggactttaggactccttcttcagcctttgatgatgtaaatggagttagggcctcagtttttctgtgatatttggctggagtagagcagttattgtctaagtgttttctctcttgctgggctgccccttttctagtcctttggccagagagagcaggcttttgtctcttctctttttatctgtgcatactggcatttctgggttgctggttcttcagtttcatgccatggatataggaagggaaaagaaaactgagggaacccactaccacgttttcccttgggaaacgtttgttttttagaaaatgacctgggcttttagtagtgcttagtgggaggattaggggaaaggatgtttactccatcttattggaagcagaattcttctgagctatttttaactggttaagacttcatgtatttaatggtcttgtctagtaaaatttctactatatggtattcggata

SEQ ID NO: 404437 - DNA, 367 bp, Homo sapiens
acatctaggattttgccactacactatgctacccaacactgcagttactaaatacagtgcttgatggcttctaagttttccttcaatatgagacagagagagaaagattcctccccagcaaaaaggaatttttttcttagcctttatttctagagttcagatttttttcatttgtactcctgaatttttttttttttttttttttttttttttttttttggggaggggggctcccttttgcccccaaggggggggccccctttggggtgggggcaggcccccccccccgggtcccccccttttttttgtctcccccccccaaaaaggggggaattgggggcccccgcccccccccaaaccttttttt

SEQ ID NO: 404438 - DNA, 535 bp, Homo sapiens
ggaggaatctgtaaggacttcattgatgaggtggcatttgcaaagagaattgaaggatgggtcagattacaccagatatttttgagagagttggtaagcagtcgtacatgaaacagagtcccagaagtaagaagtcttacaggataatttatcgtttctagttcaaaaagagcatggtaaggtcaagattggacacaggcgtaaaactgacaaagcaatttgagactacatcttggggacttggaatctttagtgtattgagcgacagggaactgtggaaggagttcaaaagaggacccacatagcagctcatttgggaatattcacttggaaatgttctgtaagatagtttcaagtcttaggagtccagaggtgaagctgccaggcagcagacagatgtaacagtttgggccgaggtaataaggcctaagcgaaaaagagatgaaaagataatggatatgacagttctatgtatcaaacatttcaaagttcaattcacaggaattagcaagtgattgcatagataaaggagaga

SEQ ID NO: 404439 - DNA, 505 bp, Homo sapiens
tgtgaggtgctgagtagatactggctgaatttgctcttaaacccgtccactctatcacagctgctcttgtcaaggttgtcagcggtttctgtgccatgggtcagccttggtgttggtctcactgaacacatcaacagcaccagcccagtcgatctcctcctcctgtcggcactcgacctccaggcctccacacacccttggtcataagcctctccttctccgttgcctttgctcgcccccctttgccccagctcattagtgtgagagtgcacagggccctccctccatctccacgcacccagcgtgcagcactcccagctccatgcctcggcccgcgtccagctgttgactccccggaggtccagtgggcatctcacactgaacgctgagcacttggatcttttcgccgacgtgctccaccactggctttcccatctcggccgatggcagctccacccttccagtggctcaggccccaaaccatgcaggcacccttgctcctctt

SEQ ID NO: 404440 - DNA, 435 bp, Homo sapiens
ctacttttaaggcagtggtgtaaggtagggatccgccccttatcccccttttgggtaatcaattgccctggaactatttatgaatacagtatctttccccgtgatttataatgacatttctgtcttgcactaagattccactaatgtttgggagcttctgggcttactgatctgtcctacttatttttatcctggccaatagcaccctgttttaattactgcacttaattaatgctgctacgtttagcaagactttatttatcaccttgacttggttactcttggctctttaagtcttgcttgcaaattttaggatcagcaagccacatttaacaacaaatcctgtcagaattctgcctggaatgacactgaatctgtaagcatcagtcctcacattcatttaaagtataatcattcattttgctggtcttcttt

SEQ ID NO: 404441 - DNA, 330 bp, Homo sapiens
ttataaaaatgggaacagatttcagggaacaccaggatggattaatagaacatgttgactcagtgggcaatagggaaaatggtgcttccttccgctaaacagaaataagaatgtcaataagagctggtcggggatggggaagaagaaaatgagtttggttcgggacaagctgaatttgaggtggcaggtggagatttacagaggatacttgggaatgagtctagtgtctgagagaggaatgcagagtcatcctcgcaaggacagctggagctctgagaacagtgaaagagcacctggggagtgtggagatgtgggagaagaggagaggaa

SEQ ID NO: 404442 - DNA, 444 bp, Homo sapiens
caaggattcgactcgtagctctagtattgactggctaaatgtccttgggtgacttaatctttgagcctcagttttctggtgtgatacctactttgagggattgctatagagtttagaaatagtatatgacaattgcatctaatacggtaactagaacattgggagttttaccgagtggtaggtggtagtatttattggttttttgtttgttgttgttttttttaaagacaggctcactctcgcccaggctggagtgcagtggcacaatctcagctcactgcaacgtccacctcccaggttcaagtgattctcgtgcctcagctactcgggaggctgaggcaggagaatggcgtgaacccgggaggcggagcttgcagtgagccgagattgcgccactgcagtccgcagtccggcctgggcgacagagcgagactccgtctcaaa

SEQ ID NO: 404443 - DNA, 528 bp, Homo sapiens
atgatgcaattgtaaaaatgcaaaaatgcctgaatcctaattttcagtgatatcctaggagcaaacgaaaaatacaaataaagtcatttgagaaaaacatgcaaattcatcagttattacataaatcccactcaccaaattacattcttaagagtataggttgctagttgccttatataaaactgccagctgttttcaattttgtaggcaaactgctctaaatgggcccctgggaactcccactacatgttgaattccatccttttcagtcctctgaaaagcatgtaatccaacaaatcaatcaaaatatttcatgtatagaaacaaagtttttcaggagggcatatatccccaaaatatttttaatcaagtatcttaatattcttagaactctggtccaaattctcttctactaatcccttgactacagccaatgcctagagtttacactaatttgtggatattttgctgttggaaaaatttaaaagtacatttttttaaatgtagaataaaaagtccttaaagatt

SEQ ID NO: 404444 - DNA, 821 bp, Homo sapiens
tccctggggcctcccctgcaactcttctctcgggctacagcagaaaagagcctgagccgctctcaggaaggacttccctggctcccagctgactctagtggtccccggagaagcccaggaatcctagcctgttctccccagccctctaatacaagatccagcagaggcccggactctgacatcgggagagtcaggccactaggtccagctcaggcacctggtctcaaggaccaacgcggaggctgccctctggtggcacgttttggaatggcgggtgtccttaaatggaaggatatgggtaaaggtcccacggagagggtaccctggtcccggaggctggccccacaggatgcagggctgggaacccctggaaggagaggagatcccggttccagatcagaagtccaagccctaccttctcgtgttccctactgggctgcacagggccgtgaatgcagtggcttcaggggaggacatgggataataggaagatacaagaaacctggcctccctgacaggtcaccccctcctccatgccccttttaggaccccaggacctggggagcaagaaaggcgagttcaggcaaactgcccgtccaacagctgtgggcagcgagggatcacatgctgcccttttcctctccacctcacagggaaaaactgagacgctccatgtccagtctgtaagtcaatggcagagccgggaccagaacctgcatctcgcagctcgtgaggcagacacttggaacctccatggagaacctgtgatgtgctgggggcaaggccaggtctctgcctttgagcctggggaggtggcaatg

SEQ ID NO: 404445 - DNA, 588 bp, Homo sapiens
atactctactcaaacatgtattgagaaccttttgtgcaccaggcactgtgccaggtgctggcagagcaccagatccacccagtctctacccttgaggagtccctctaatgggggaagacacacatacacagacaatgtcacagacagtgtgacaagggatactggtggcgagtggggacatttaatccagacttagtggcacttttagctgagcctggatgatgagtaggagttgatcagagggtaaagtaaatgccatgtctggaaaaattagtcagaaagcaatgagagaggttgagattgctggaatttagataaggctagagatgcaagcagagcctaggtctcggagggcattacaagtcaggtcaaggaatttggacttatcctaaatacaatgtggagccactgttagtttaaagtcttctggaaacaaaatgaggctttcattttgaaaagatcgctgtgggctgggcgtggcacctcacgcctataatcccaacacttttaggaggtcaaggtggaaggatctctttgagccccgcagttcgagaatagcctgggcaacaaagtgagaccccagctcta

SEQ ID NO: 404446 - DNA, 553 bp, Homo sapiens
gatatgggacctatccagagtggcggatttccgtttgacttttgccataatgctttgtccacctcaagtgagagcgaacagtaagtattggtagaacagcaaatagcttcatctgagtagggtgtttgggactcatgcacatgacaagattggaaaggcagattgggtatagggtaccttggggccaggtttaggagtttggaatttatcttataggctaccctttcctggaagcttcctcagaacctcagggcaatgagatgtttcacaagagaacgttccagggtcaggtaagtttgagaactacacatgctatatccctccctcttgaaaattcacaccatataattgcataataaaagctgaggagttctgtatttaaaaaaactggttaaacttaatgcaggactcctccctggattatagctgttaggaggtatacacttcagaaggtgctttagggggagccagtggaggtctgtgaaaagagttatgtaagcatatgttttcgaaaggtttatctgaaaacaatgtacaatctagattaaaattt

SEQ ID NO: 404447 - DNA, 270 bp, Homo sapiens
taaccactattaaagtttgcttccggatcttttcggtatgcttatatgcactctgattttaagcacaaatggttacatcttctatgtagtggttttcaactttaattttcctgcaattaaaaattaaaccgagttttgatcctgaataatatcacatcttgtagcatactttattcaactacatctctccttccttccttccttccttccttccttccttccttccttccttctttttctttttctttttttttttttttttgagacagt

SEQ ID NO: 404448 - DNA, 339 bp, Homo sapiens
ctaagcttcttgaggtaaagggtcttattgtattcttcctctgcggcctttgtagcctggaatagtgttgaatagataatccttgctctgaaaaagatttctggttgatcaaaattacaagacttgagattatccattaatgatgataaaagaattataactcatggtaccatttttgtagctgtgttagctgctctcaaagggagaatttcatggcagaggaagaggtggttgctaaggaaatgacagaaaaaaagatctggttggaggcaaatttggaaatcagcggatacaggtgtagctgaagctaagggcctgggagaagtacctgtctgagag

SEQ ID NO: 404449 - DNA, 332 bp, Homo sapiens
tgaaacagagtcttgctttgtcgccaggctgaagtgcaatggcacgatctcggctcactgcaacctccgcctcccaggttcaagcaattcttctgcctcagcctcccgagtagcagggactacaggcacacatcaccatgcctggctaattttttgtattttagtagagacagggcttccccatgttggccaggctggtctcgaactcctgacctcgtgatctacctgccttggcctcccaaagtgctgggattataggtgtgagccactgcacccagccaataaaatttatttttaactccattttcaagttgtgcactgttgcaactata

SEQ ID NO: 404450 - DNA, 631 bp, Homo sapiens
tcacaatggctgatgcaacattagcctccatggggcttcaccaactgtatttattacatttgaagacatatatgtgctttcagtggttttaatctttatagcatttaaatactcttctgaaaaagtaaaaatcttaagctacttgaattcattgtgcaaatagattaagagcaagagtcgtgataagactgggctcaaacccagattctgtcacctattggatgtgagactgtgagcagctcacttagtctctttttatctttgtttatccatctagaaaaggagtgcagtaaatagtacccagcccataaggtcattatgagaattaattgaatttagacagatagcatttagaacactgcttatcatgtggcaagtcacatgtaggtgtttggtactttagatgggaaggggttatttttacaatattactttgttccctagctctactgattattttttaaatttctaatcatgactcaatataataattatagatagacattttgatattgtgtagacatatggaggcaaatgtcggggttattgaagtcattcgaactatttgtttcaataattagaggctaaaatggatgcttttgtaagctcttgtttttgctgtgtgtatgtg

SEQ ID NO: 404451 - DNA, 393 bp, Homo sapiens
gacacaaggaaagttatatatgacagattcacagctagtaccatactaaatgggggaaaaataagtatttcctctaagatgtgaaaaaaataaggatgcccccttacaccactgttggtgggaatgtaaattaatacagccactgtagaactgagaacagaatggagcttccacaaaaaactaaaaataaaactactgtatgatccagtaatcccactattgggtatatatccaaaagaaaggaaattaatatattgaagagatatctgcactcccacattcattgcagcattatacacaatagccaagatttggaagcaccctaagtgtccatcgacagatgaatggataaacaaaatgtggtacatatacacaatggagaactactcagcc

SEQ ID NO: 404452 - DNA, 447 bp, Homo sapiens
gacaggtgtcattgcagccctggtctcattttcatctgctctggtgatggtacacagcaggaagttagctgtttgattgctaacccaaatcactcttctgttttctctacttgactgctgacaagtttaacaaagtgtgtggctcttctccttcctgcttgggtaagaataaaggtgttaaaactcatataatcccttcctttgcatgtttgttctctgtgtcttccaatgcattttttaattaaaaaaaatacatgtcttttgctttttcagaacatatataatccaaaaagattagtgacgttttgacagtcgtcagaacactaaccattagtactgcattggagtgatgctcacttttttcagagtagcatctctaaagtactttctaaaaataaaaaggtccctgctttggcctgatttttgcttctggatcatcaggtgctt

SEQ ID NO: 404453 - DNA, 441 bp, Homo sapiens
aacctctgcctcctgggttcaagtgattctcctgcctcagcctcctgagtagctgggattacaggtgtgtgccaccatgcccaggttttgactggaatgccaggcttaacgttgctcagaagttgcttctatgaggacgtctcccagcagctgtcaagtgtttccaatgagtcatcgccagcccctgcaatgagcctctcaggctggtttcccaaaccactccttatgatccagtgaatattcaagagagctacatttgaagcctgtacaaaagcttatccctgtaacacatgtgccataatatacaaacttctactttcgtcagtccttaacatctacctctctgaattttcatgaatttctatttcacaagggtaattgttttatatacactggcagcagcatacaataaaacttagtatgaaactttaaaaaaaaaaa

SEQ ID NO: 404454 - DNA, 3108 bp, Homo sapiens
agcgggacgcgcagcaggccccgcccacccaggcggtaggaacccactccggcccgctagacctgctgctatgtcccggccgcagcttcgacgctggcgtctcgtctctagcccgccgagcggcgtcccgggtctagcgctgctggcgctgctggcgctgctggcgctgcggctcgcggccgggaccgactgcccatgcccggagcctgagctctgccgcccgattcgccaccatccagatttcgaggtctttgtgtttgatgttggacagaaaacttggaaatcttatgattggtcacagattacaactgtggcaacatttggaaaatatgactcagaacttatgtgctacgctcattcaaaaggagccagagtagtacttaaaggagatgtatccttaaaggatatcattgatcctgctttcagagcatcctggatagctcaaaaacttaatttggccaaaacacaatatatggatggaattaatatagatatagagcaagaagttaattgtttatcacctgaatatgatgcattaactgctttagtcaaagaaactacagactctttccatcgtgaaattgagggatcacaggtaacctttgatgtagcttggtctccaaagaacatagacagaagatgctataattatactggaatcgcagatgcttgtgacttcctctttgtgatgtcttatgatgaacaaagtcagatctggtcagaatgtattgcagcagccaatgctccctataatcagacattaactggatataatgactacatcaagatgagcattaatcctaagaaacttgtaatgggtgttccttggtatggttatgattatacctgcctgaatctgtctgaggatcatgtttgtaccattgcaaaagtccctttccggggggctccttgtagtgacgctgcaggacgtcaggtgccctacaaaacgatcatgaagcaaataaatagttctatttctggaaacctatgggataaagatcagcgggctccttattataactataaagatcctgctggccactttcatcaagtatggtatgataaccctcagagtatttctttaaaggcaacatatatacaaaactatcgcttacggggcattggcatgtggaatgcaaactgtcttgactactctggagatgctgtagccaaacagcaaactgaagaaatgtgggaagtcttaaagccaaagctgttacagagatgaacatcttttgtcaaaccattaagagttagaaagatgatctgtatcaacagatctagtttcttgcatttttattatgttgctatatacttttgttatccgtatactaaaaaaaaagaataaataaatgttttgattgtttgaatttgaaaaatacacacgaatgtcctcagtatccaggaacataaaggcaagaagcaagtcaacttacctattaaatattcctctattagatgtttcaacactataatttaattgggaaaaattgctttcagaattttattatgccatatttcccttcattatagtaaaatatatgctcacgaatcaatgctgatttttaaaatatgtataatctgaagtggaaattgtttgcttagagtttttaaaaacctagtctttgaaaagcagtttgtgctatacttttcccccaaccctccaataaatcttaaatttaaaacctacaatgtagtgtctcccctttaggttcatcaaactgatgaaaataatttttctgcttcctgactccatatagtatttatgttctctgaggtacttgaactaaatctttggacagtgagtgagaattaaaaagaatccagaagattaaatgtattcacaaaatagaagaatgtaacagtaatattttgaattggtaagttagaactacctaatattttccaactacattatttttatgaggctcatttgtaaaatttttaataataggaataacttgcagttgaacttgattctgttcactgtcacacttctaattattcatttcttcatttatggacatatataatttatttcttggctagcttgcttacatggttaaatttttctttctacatctgcaatgtatcttttttatttttattttttgtagagacagggtctcgctatgttgtccagatgggtctccaactcctgggctcaagcactcctcctgccttggcttcctaaagagctgggattacaggcatgagctgcattgtgcttttaatgatctaaagacactgattagcttctcaactagttctctttctaaaagatcaattttatacaaataagttttctaaatgtaataaagtctgttttctttctccagggaattaagaacaacattgtgctgcccttattagttcctaattacagattaaaaatctgtatctttgaactctagatttacataaatcctggcttccctgcacattttgcccctgtaaattggaatacatgatgattgaaccatctgttatgagaatattacatttcctatttacacaattgtttgtgacagagtaaaaaccattttcatagtatatgttggatcactgttgtcttcatatttctaaaataaatgaattaaaaaatttaaattcttagatgcttatctctatcatagctcagaatgcaacttcaatacccccattcttttatatttccagatttcttttaattaagatataatgaacaaattaagttaaatgaagtctgtattttcatgcaaatatattagtattcattaatatacatttattctttgcaaatagattttagttatattagctcttaaattgttaaataaattattattgaattttattattaaattattaaaatgaaaattataaaattagcactgtaaaataatatgtaaaggacttggaatgttaaaaataaccattcatcattttgctttatattacatctaatatttcctgaaacattttgtaatacccacatggaaagtggagaaagagaaaccttgtgctttttataaaacattgccaaggagaataatggttaaacaaatctgttcaaatacatatttaaatttttttacaaataaaagttttaaattaacatacctaatt

SEQ ID NO: 404455 - DNA, 2371 bp, Homo sapiens
agcgggacgcgcagcaggccccgcccacccaggcggtaggaacccactccggcccgctagacctgctgctatgtcccggccgcagcttcgacgctggcgtctcgtctctagcccgccgagcggcgtcccgggtctagcgctgctggcgctgctggcgctgctggcgctgcggctcgcggccgggaccgactgcccatgcccggagcctgagctctgccgcccgattcgccaccatccagatttcgaggtctttgtgtttgatgttggacagaaaacttggaaatcttatgattggtcacagattacaactgtggcaacatttggaaaatatgactcagaacttatgtgctacgctcattcaaaaggagccagagtagtacttaaaggagatgtatccttaaaggatatcattgatcctgctttcagagcatcctggatagctcaaaaacttaatttggccaaaacacaatatatggatggaattaatatagatatagagcaagaagttaattgtttatcacctgaatatgatgcattaactgctttagtcaaagaaactacagactctttccatcgtgaaattgagggatcacaggtaacctttgatgtagcttggtctccaaagaacatagacagaagatgctataattatactggaatcgcagatgcttgtgacttcctctttgtgatgtcttatgatgaacaaagtcagatctggtcagaatgtattgcagcagccaatgctccctataatcagacattaactggatataatgactacatcaagatgagcattaatcctaagaaacttgtaatgggtgttccttggtatggttatgattatacctgcctgaatctgtctgaggatcatgtttgtaccattgcaaaagtccctttccggggggctccttgtagtgacgctgcaggacgtcaggtgccctacaaaacgatcatgaagcaaataaatagttctatttctggaaacctatgggataaagatcagcgggctccttattataactataaagatcctgctggccactttcatcaagtatggtatgataaccctcagagtatttctttaaaggcaacatatatacaaaactatcgcttacggggcattggcatgtggaatgcaaactgtcttgactactctggagatgctgtagccaaacagcaaactgaagaaatgtgggaagtcttaaagccaaagctgttacagagatgaacatcttttgtcaaaccattaagagttagaaagatgatctgtatcaacagatctagtttcttgcatttttattatgttgctatatacttttgttatccgtatactaaaaaaaaagaataaataaatgttttgattgtttgaatttgaaaaatacacacgaatgtcctcagtatccaggaacataaaggcaagaagcaagtcaacttacctattaaatattcctctattagatgtttcaacactataatttaattgggaaaaattgctttcagaattttattatgccatatttcccttcattatagtaaaatatatgctcacgaatcaatgctgatttttaaaatatgtataatctgaagtggaaattgtttgcttagagtttttaaaaacctagtctttgaaaagcagtttgtgctatacttttcccccaaccctccaataaatcttaaatttaaaacctacaatgtagtgtctcccctttaggttcatcaaactgatgaaaataatttttctgcttcctgactccatatagtatttatgttctctgaggtacttgaactaaatctttggacagtgagtgagaattaaaaagaatccagaagattaaatgtattcacaaaatagaagaatgtaacagtaatattttgaattgagacagggtctcgctatgttgtccagatgggtctccaactcctgggctcaagcactcctcctgccttggcttcctaaagagctgggattacaggcatgagctgcattgtgcttttaatgatctaaagacactgattagcttctcaactagttctctttctaaaagatcaattttatacaaataagttttctaaatgtaataaagtctgttttctttctccagggaattaagaacaacattgtgctgcccttattagttcctaattacagattaaaaatctgtatctttgaactctagatttacataaatcctggcttccctgcacattttgcccctgtaaattggaatacatgatgattgaaccatctgttatgagaatattacatttcctatttacacaattgtttgtgacagagtaaaaaccattttcatagtatatgttggatcactgttgtcttcatatttctaaaataaatgaattaaaaaattta

SEQ ID NO: 404456 - DNA, 2899 bp, Homo sapiens
agcgggacgcgcagcaggccccgcccacccaggcggtaggaacccactccggcccgctagacctgctgctatgtcccggccgcagcttcgacgctggcgtctcgtctctagcccgccgagcggcgtcccgggtctagcgctgctggcgctgctggcgctgctggcgctgcggctcgcggccgggaccgactgcccatgcccggagcctgagctctgccgcccgattcgccaccatccagatttcgaggtctttgtgtttgatgttggacagaaaacttggaaatcttatgattggtcacagattacaactgtggcaacatttggaaaatatgactcagaacttatgtgctacgctcattcaaaaggagccagagtagtacttaaaggtaacctttgatgtagcttggtctccaaagaacatagacagaagatgctataattatactggaatcgcagatgcttgtgacttcctctttgtgatgtcttatgatgaacaaagtcagatctggtcagaatgtattgcagcagccaatgctccctataatcagacattaactggatataatgactacatcaagatgagcattaatcctaagaaacttgtaatgggtgttccttggtatggttatgattatacctgcctgaatctgtctgaggatcatgtttgtaccattgcaaaagtccctttccggggggctccttgtagtgacgctgcaggacgtcaggtgccctacaaaacgatcatgaagcaaataaatagttctatttctggaaacctatgggataaagatcagcgggctccttattataactataaagatcctgctggccactttcatcaagtatggtatgataaccctcagagtatttctttaaaggcaacatatatacaaaactatcgcttacggggcattggcatgtggaatgcaaactgtcttgactactctggagatgctgtagccaaacagcaaactgaagaaatgtgggaagtcttaaagccaaagctgttacagagatgaacatcttttgtcaaaccattaagagttagaaagatgatctgtatcaacagatctagtttcttgcatttttattatgttgctatatacttttgttatccgtatactaaaaaaaaagaataaataaatgttttgattgtttgaatttgaaaaatacacacgaatgtcctcagtatccaggaacataaaggcaagaagcaagtcaacttacctattaaatattcctctattagatgtttcaacactataatttaattgggaaaaattgctttcagaattttattatgccatatttcccttcattatagtaaaatatatgctcacgaatcaatgctgatttttaaaatatgtataatctgaagtggaaattgtttgcttagagtttttaaaaacctagtctttgaaaagcagtttgtgctatacttttcccccaaccctccaataaatcttaaatttaaaacctacaatgtagtgtctcccctttaggttcatcaaactgatgaaaataatttttctgcttcctgactccatatagtatttatgttctctgaggtacttgaactaaatctttggacagtgagtgagaattaaaaagaatccagaagattaaatgtattcacaaaatagaagaatgtaacagtaatattttgaattggtaagttagaactacctaatattttccaactacattatttttatgaggctcatttgtaaaatttttaataataggaataacttgcagttgaacttgattctgttcactgtcacacttctaattattcatttcttcatttatggacatatataatttatttcttggctagcttgcttacatggttaaatttttctttctacatctgcaatgtatcttttttatttttattttttgtagagacagggtctcgctatgttgtccagatgggtctccaactcctgggctcaagcactcctcctgccttggcttcctaaagagctgggattacaggcatgagctgcattgtgcttttaatgatctaaagacactgattagcttctcaactagttctctttctaaaagatcaattttatacaaataagttttctaaatgtaataaagtctgttttctttctccagggaattaagaacaacattgtgctgcccttattagttcctaattacagattaaaaatctgtatctttgaactctagatttacataaatcctggcttccctgcacattttgcccctgtaaattggaatacatgatgattgaaccatctgttatgagaatattacatttcctatttacacaattgtttgtgacagagtaaaaaccattttcatagtatatgttggatcactgttgtcttcatatttctaaaataaatgaattaaaaaatttaaattcttagatgcttatctctatcatagctcagaatgcaacttcaatacccccattcttttatatttccagatttcttttaattaagatataatgaacaaattaagttaaatgaagtctgtattttcatgcaaatatattagtattcattaatatacatttattctttgcaaatagattttagttatattagctcttaaattgttaaataaattattattgaattttattattaaattattaaaatgaaaattataaaattagcactgtaaaataatatgtaaaggacttggaatgttaaaaataaccattcatcattttgctttatattacatctaatatttcctgaaacattttgtaatacccacatggaaagtggagaaagagaaaccttgtgctttttataaaacattgccaaggagaataatggttaaacaaatctgttcaaatacatatttaaatttttttacaaataaaagttttaaattaacatacctaatt

SEQ ID NO: 404457 - DNA, 1407 bp, Homo sapiens
agcgggacgcgcagcaggccccgcccacccaggcggtaggaacccactccggcccgctagacctgctgctatgtcccggccgcagcttcgacgctggcgtctcgtctctagcccgccgagcggcgtcccgggtctagcgctgctggcgctgctggcgctgctggcgctgcggctcgcggccgggaccgactgcccatgcccggagcctgagctctgccgcccgattcgccaccatccagatttcgaggtctttgtgtttgatgttggacagaaaacttggaaatcttatgattggtcacagattacaactgtggcaacatttggaaaatatgactcagaacttatgtgctacgctcattcaaaaggagccagagtagtacttaaaggagatgtatccttaaaggatatcattgatcctgctttcagagcatcctggatagctcaaaaacttaatttggccaaaacacaatatatggatggaattaatatagatatagagcaagaagttaattgtttatcacctgaatatgatgcattaactgctttagtcaaagaaactacagactctttccatcgtgaaattgagggatcacaggtaacctttgatgtagcttggtctccaaagaacatagacagaagatgctataattatactggaatcgcagatgcttgtgacttcctctttgtgatgtcttatgatgaacaaagtcagatctggtcagaatgtattgcagcagccaatgctccctataatcagacattaactggatataatgactacatcaagatgagcattaatcctaagaaacttgtaatgggtgttccttggtatggttatgattatacctgcctgaatctgtctgaggatcatgtttgtaccattgcaaaagtccctttccggggggctccttgtagtgacgctgcaggacgtcaggtgccctacaaaacgatcatgaagcaaataaatagttctatttctggaaacctatgggataaagatcagcgggctccttattataactataaagtttcccaggcagctgcagacttgaaacagttctgtctgcagaatgctcaacatgaccctctgctgactggagtatcttcaagtacaaatcccttcagaccccagaaagtctgttcctttttgtagtaaaatgaatctttcaaaggtttcccaaaccactccttatgatccagtgaatattcaagagagctacatttgaagcctgtacaaaagcttatccctgtaacacatgtgccataatatacaaacttctactttcgtcagtccttaacatctacctctctgaattttcatgaatttctatttcacaagggtaattgttttatatacactggcagcagcatacaataaaacttagtatgaaactttaaaaaaaaaaa

SEQ ID NO: 404458 - DNA, 2464 bp, Homo sapiens
gttaaaagtgccataagcaataatacctagaaagtacagatgttccttgatttatgattgtattgtgtcctaataaacccataaacatatgataagttgaaaatgaacgaaataccctgataaatccatcgtaaagtctaaaaattgtaagttgaaccattgtaagtcagggaccatttgtatcaaatatagaaccatggaattatagaataggaaagtgttatgccctaaaatttttatttcattgtatcctttttgaataattggatttaggaaacttttttccctcttactgtactgtatacttcttttatttttccctttcctgtggtgctgaattgtactaaatactttaaaatctccattttaatttatttatataggatcctgctggccactttcatcaagtatggtatgataaccctcagagtatttctttaaaggcaacatatatacaaaactatcgcttacggggcattggcatgtggaatgcaaactgtcttgactactctggagatgctgtagccaaacagcaaactgaagaaatgtgggaagtcttaaagccaaagctgttacagagatgaacatcttttgtcaaaccattaagagttagaaagatgatctgtatcaacagatctagtttcttgcatttttattatgttgctatatacttttgttatccgtatactaaaaaaaaagaataaataaatgttttgattgtttgaatttgaaaaatacacacgaatgtcctcagtatccaggaacataaaggcaagaagcaagtcaacttacctattaaatattcctctattagatgtttcaacactataatttaattgggaaaaattgctttcagaattttattatgccatatttcccttcattatagtaaaatatatgctcacgaatcaatgctgatttttaaaatatgtataatctgaagtggaaattgtttgcttagagtttttaaaaacctagtctttgaaaagcagtttgtgctatacttttcccccaaccctccaataaatcttaaatttaaaacctacaatgtagtgtctcccctttaggttcatcaaactgatgaaaataatttttctgcttcctgactccatatagtatttatgttctctgaggtacttgaactaaatctttggacagtgagtgagaattaaaaagaatccagaagattaaatgtattcacaaaatagaagaatgtaacagtaatattttgaattggtaagttagaactacctaatattttccaactacattatttttatgaggctcatttgtaaaatttttaataataggaataacttgcagttgaacttgattctgttcactgtcacacttctaattattcatttcttcatttatggacatatataatttatttcttggctagcttgcttacatggttaaatttttctttctacatctgcaatgtatcttttttatttttattttttgtagagacagggtctcgctatgttgtccagatgggtctccaactcctgggctcaagcactcctcctgccttggcttcctaaagagctgggattacaggcatgagctgcattgtgcttttaatgatctaaagacactgattagcttctcaactagttctctttctaaaagatcaattttatacaaataagttttctaaatgtaataaagtctgttttctttctccagggaattaagaacaacattgtgctgcccttattagttcctaattacagattaaaaatctgtatctttgaactctagatttacataaatcctggcttccctgcacattttgcccctgtaaattggaatacatgatgattgaaccatctgttatgagaatattacatttcctatttacacaattgtttgtgacagagtaaaaaccattttcatagtatatgttggatcactgttgtcttcatatttctaaaataaatgaattaaaaaatttaaattcttagatgcttatctctatcatagctcagaatgcaacttcaatacccccattcttttatatttccagatttcttttaattaagatataatgaacaaattaagttaaatgaagtctgtattttcatgcaaatatattagtattcattaatatacatttattctttgcaaatagattttagttatattagctcttaaattgttaaataaattattattgaattttattattaaattattaaaatgaaaattataaaattagcactgtaaaataatatgtaaaggacttggaatgttaaaaataaccattcatcattttgctttatattacatctaatatttcctgaaacattttgtaatacccacatggaaagtggagaaagagaaaccttgtgctttttataaaacattgccaaggagaataatggttaaacaaatctgttcaaatacatatttaaatttttttacaaataaaagttttaaattaacatacctaatt

SEQ ID NO: 404459 - DNA, 569 bp, Homo sapiens
tctcaaaaaaaaaaaaaaaaaaaaaaagagctcactatttgacttaagtcttcaattattatatagtatcttcttttgaagcaagagaagtactgttttattgtaagtacaatatttccaaagattgagaaaaccttcattaaaatgttctcaccatctggcacttccccccctctttgttatgtataggtttcccaggcagctgcagacttgaaacagttctgtctgcagaatgctcaacatgaccctctgctgactggagtatcttcaagtacaaatcccttcagaccccagaaagtctgttcctttttgtagtaaaatgaatctttcaaaggtttcccaaaccactccttatgatccagtgaatattcaagagagctacatttgaagcctgtacaaaagcttatccctgtaacacatgtgccataatatacaaacttctactttcgtcagtccttaacatctacctctctgaattttcatgaatttctatttcacaagggtaattgttttatatacactggcagcagcatacaataaaacttagtatgaaactttaaaaaaaaaaa

SEQ ID NO: 404460 - DNA, 2608 bp, Homo sapiens
agcgggacgcgcagcaggccccgcccacccaggcggtaggaacccactccggcccgctagacctgctgctatgtcccggccgcagcttcgacgctggcgtctcgtctctagcccgccgagcggcgtcccgggtctagcgctgctggcgctgctggcgctgctggcgctgcggctcgcggccgggaccgactgcccatgcccggagcctgagctctgccgcccgattcgccaccatccagatttcgaggtctttgtgtttgatgttggacagaaaacttggaaatcttatgattggtcacagattacaactgtggcaacatttggaaaatatgactcagaacttatgtgctacgctcattcaaaaggagccagagtagtacttaaaggagatgtatccttaaaggatatcattgatcctgctttcagagcatcctggatagctcaaaaacttaatttggccaaaacacaatatatggatggaattaatatagatatagagcaagaagttaattgtttatcacctgaatatgatgcattaactgctttagtcaaagaaactacagactctttccatcgtgaaattgagggatcacaggtaacctttgatgtagcttggtctccaaagaacatagacagaagatgctataattatactggaatcgcagatgcttgtgacttcctctttgtgatgtcttatgatgaacaaagtcagatctggtcagaatgtattgcagcagccaatgctccctataatcagacattaactggatataatgactacatcaagatgagcattaatcctaagaaacttgtaatgggtgttccttggtatggttatgattatacctgcctgaatctgtctgaggatcatgtttgtaccattgcaaaagtccctttccggggggctccttgtagtgacgctgcaggacgtcaggtgccctacaaaacgatcatgaagcaaataaatagttctatttctggaaacctatgggataaagatcagcgggctccttattataactataaagatcctgctggccactttcatcaagtatggtatgataaccctcagagtatttctttaaaggcaacatatatacaaaactatcgcttacggggcattggcatgtggaatgcaaactgtcttgactactctggagatgctgtagccaaacagcaaactgaagaaatgtgggaagtcttaaagccaaagctgttacagagatgaacatcttttgtcaaaccattaagagttagaaagatgatctgtatcaacagatctagtttcttgcatttttattatgttgctatatacttttgttatccgtatactaaaaaaaaagaataaataaatgttttgattgtttgaatttgaaaaatacacacgaatgtcctcagtatccaggaacataaaggcaagaagcaagtcaacttacctattaaatattcctctattagatgtttcaacactataatttaattgggaaaaattgctttcagaattttattatgccatatttcccttcattatagtaaaatatatgctcacgaatcaatgctgatttttaaaatatgtataatctgaagtggaaattgtttgcttagagtttttaaaaacctagtctttgaaaagcagtttgtgctatacttttcccccaaccctccaataaatcttaaatttaaaacctacaatgtagtgtctcccctttaggttcatcaaactgatgaaaataatttttctgcttcctgactccatatagtatttatgttctctgaggtacttgaactaaatctttggacagtgagtgagaattaaaaagaatccagaagattaaatgtattcacaaaatagaagaatgtaacagtaatattttgaattggtaagttagaactacctaatattttccaactacattatttttatgaggctcatttgtaaaatttttaataataggaataacttgcagttgaacttgattctgttcactgtcacacttctaattattcatttcttcatttatggacatatataatttatttcttggctagcttgcttacatggttaaatttttctttctacatctgcaatgtatcttttttatttttattttttgtagagacagggtctcgctatgttgtccagatgggtctccaactcctgggctcaagcactcctcctgccttggcttcctaaagagctgggattacaggcatgagctgcattgtgcttttaatgatctaaagacactgattagcttctcaactagttctctttctaaaagatcaattttatacaaataagttttctaaatgtaataaagtctgttttctttctccagggaattaagaacaacattgtgctgcccttattagttcctaattacagattaaaaatctgtatctttgaactctagatttacataaatcctggcttccctgcacattttgcccctgtaaattggaatacatgatgattgaaccatctgttatgagaatattacatttcctatttacacaattgtttgtgacagagtaaaaaccattttcatagtatatgttggatcactgttgtcttcatatttctaaaataaatgaattaaaaaattta

SEQ ID NO: 404461 - DNA, 3222 bp, Homo sapiens
agcgggacgcgcagcaggccccgcccacccaggcggtaggaacccactccggcccgctagacctgctgctatgtcccggccgcagcttcgacgctggcgtctcgtctctagcccgccgagcggcgtcccgggtctagcgctgctggcgctgctggcgctgctggcgctgcggctcgcggccgggaccgactgcccatgcccggagcctgagctctgccgcccgattcgccaccatccagatttcgaggtcagcgccttcctctgctcctctaggtctgggcttcagggcacgaagagaagttagggtagaacggagccctaaggagaggtgccgtgggcgtcgaaaccagctttgaccactcgatgagggccttcctgtttacggatccttcaatttatagatgaggaagctcgggctcagagaagttgagtaactcctcaggcctcacagcctgtaagtgcctgcgtaggcaggcgagagttcaaaccagatctgcctcctaaggcaagctcctttcattcccctgctgtgcctctgcggaagcactctgggtgtaaaaagcaaacaaggtctttgtgtttgatgttggacagaaaacttggaaatcttatgattggtcacagattacaactgtggcaacatttggaaaatatgactcagaacttatgtgctacgctcattcaaaaggagccagagtagtacttaaaggtaacctttgatgtagcttggtctccaaagaacatagacagaagatgctataattatactggaatcgcagatgcttgtgacttcctctttgtgatgtcttatgatgaacaaagtcagatctggtcagaatgtattgcagcagccaatgctccctataatcagacattaactggatataatgactacatcaagatgagcattaatcctaagaaacttgtaatgggtgttccttggtatggttatgattatacctgcctgaatctgtctgaggatcatgtttgtaccattgcaaaagtccctttccggggggctccttgtagtgacgctgcaggacgtcaggtgccctacaaaacgatcatgaagcaaataaatagttctatttctggaaacctatgggataaagatcagcgggctccttattataactataaagatcctgctggccactttcatcaagtatggtatgataaccctcagagtatttctttaaaggcaacatatatacaaaactatcgcttacggggcattggcatgtggaatgcaaactgtcttgactactctggagatgctgtagccaaacagcaaactgaagaaatgtgggaagtcttaaagccaaagctgttacagagatgaacatcttttgtcaaaccattaagagttagaaagatgatctgtatcaacagatctagtttcttgcatttttattatgttgctatatacttttgttatccgtatactaaaaaaaaagaataaataaatgttttgattgtttgaatttgaaaaatacacacgaatgtcctcagtatccaggaacataaaggcaagaagcaagtcaacttacctattaaatattcctctattagatgtttcaacactataatttaattgggaaaaattgctttcagaattttattatgccatatttcccttcattatagtaaaatatatgctcacgaatcaatgctgatttttaaaatatgtataatctgaagtggaaattgtttgcttagagtttttaaaaacctagtctttgaaaagcagtttgtgctatacttttcccccaaccctccaataaatcttaaatttaaaacctacaatgtagtgtctcccctttaggttcatcaaactgatgaaaataatttttctgcttcctgactccatatagtatttatgttctctgaggtacttgaactaaatctttggacagtgagtgagaattaaaaagaatccagaagattaaatgtattcacaaaatagaagaatgtaacagtaatattttgaattggtaagttagaactacctaatattttccaactacattatttttatgaggctcatttgtaaaatttttaataataggaataacttgcagttgaacttgattctgttcactgtcacacttctaattattcatttcttcatttatggacatatataatttatttcttggctagcttgcttacatggttaaatttttctttctacatctgcaatgtatcttttttatttttattttttgtagagacagggtctcgctatgttgtccagatgggtctccaactcctgggctcaagcactcctcctgccttggcttcctaaagagctgggattacaggcatgagctgcattgtgcttttaatgatctaaagacactgattagcttctcaactagttctctttctaaaagatcaattttatacaaataagttttctaaatgtaataaagtctgttttctttctccagggaattaagaacaacattgtgctgcccttattagttcctaattacagattaaaaatctgtatctttgaactctagatttacataaatcctggcttccctgcacattttgcccctgtaaattggaatacatgatgattgaaccatctgttatgagaatattacatttcctatttacacaattgtttgtgacagagtaaaaaccattttcatagtatatgttggatcactgttgtcttcatatttctaaaataaatgaattaaaaaatttaaattcttagatgcttatctctatcatagctcagaatgcaacttcaatacccccattcttttatatttccagatttcttttaattaagatataatgaacaaattaagttaaatgaagtctgtattttcatgcaaatatattagtattcattaatatacatttattctttgcaaatagattttagttatattagctcttaaattgttaaataaattattattgaattttattattaaattattaaaatgaaaattataaaattagcactgtaaaataatatgtaaaggacttggaatgttaaaaataaccattcatcattttgctttatattacatctaatatttcctgaaacattttgtaatacccacatggaaagtggagaaagagaaaccttgtgctttttataaaacattgccaaggagaataatggttaaacaaatctgttcaaatacatatttaaatttttttacaaataaaagttttaaattaacatacctaatt

SEQ ID NO: 404462 - DNA, 556 bp, Homo sapiens
aattataaaagaaattcttatccaaatagtaatgttctaattgatcatataagaaagcaaagcatagacattagaattataagtcagcagtggtctgttcaagaacaatcaacatttttagaaaatagtaggacaaaattaggaaataattatcaccaagaggatctagttcatgactttctattatctcaattagattgctcaatcatcagccttcctatactaaactctgattcaggaccaagaaaggcatagtctgactctggaaatgcgctgttggaagccaaataacatcaatactcttgttctataattgaatatcaaataagacaaattaccattaatttaatgactgtggagttaattgtataccagcatttcagcaaatcatcatcaatagtattacattagcaatttatgcaattaaaagggctttgtaaaactttgaatagattttattgtcattagtagctgttggaacttcattattatataatgtttttgcaaactttaacttttttctaaattgttaaataaaagaataactatccttaat

SEQ ID NO: 404463 - DNA, 158 bp, Homo sapiens
tctggatgcttagaggaaggaaggaagcagggatgagagcaacttcaatgttttaattcattgatcttattaataaatcacattcccagccgggcgcggtggctcatgcctgtaatcccaacactttgggaggccgaggcgggcggatcacaaggtca

SEQ ID NO: 404464 - DNA, 388 bp, Homo sapiens
tgccaacctgctgactcactttagactaggtcagtgcccacaggcctgatcagcacttggaggatggtagagtttacaggcaaggaagcatcataaatcaccctgtgggtatgtgccgccttactccctggtgaggaaagcaaaaaaaacaaaacatagcttggatgtgtggttcccagatgtagcaaaaataaagagaaacaataaaagccaaggcaagcaaactgggcaacatagcaagaccccatctgtataaaaagtggaaacatttttagcccaggcgtggtgggacgtgcttgtagttccagctatgcaggaggctgacataggaggatcacttgaacccaggaggtggaggttgtagtgagccaagactgtaccactgcac

SEQ ID NO: 404465 - DNA, 434 bp, Homo sapiens
ttcaaacccactataagcttcttgcatccatggtcactgactgttttcttactgttagctgtcctgttggacagtgtaacagtgagagagcatatacagattagcattgaaaaggataaagtgacatgtgtaagggttttgaaaaagtattatacaaatgcaaggcagatatattgaaataaatgcttattggcaaaatttcaggccagataggttggagtagtgcttcacaaactataatgtgcacatgaacaactcagggattttgttcaagtgttgatttcaattctgtagctggagttgggtggggtagaaaggatatctgagatcctgcatttctaataagctcccaggtaatgttgagtctgtaggtccttgaaccacactttaagtattaaagggttagaaagcttatactgtaactgagaaaaaaa

SEQ ID NO: 404466 - DNA, 687 bp, Homo sapiens
agcggcatatgttgttctttgtatcacaaattccaggaacatgaagataatgggtgagggtcatattgtgcaacttgtgatagcattttgggtaatttatcagccagtctggaaactacatggaaggaaagaaagaacaaaatgcctttaaacaattgttcctaggcatgattctctggggaggggtgggtgtgactgaagattcattctctgaagattgtgtctctctggacctgataaattttgcataccacacatttttcagacttctctgagctacttctctttctcacttcagtgttcattttaaaaatagtaacccattatttcacagatgcaatgtgttatttctctaaagcatgcatttcagtagagaaggggtctctaagaggggcagtaattgtcccccaagggggcaaaaattggttctttggggattgacaagagaatgttttatataacagtgatctgtggccttcaaaaactcaaccctatccaacaaaatcatattcattcttctagagttgaagtgtctttgcctgggctggagtgcagtggcgtgatcacagctcacctcagcctggaactcctgggctcaagtgatcctcctacctcagtctcccgagtagctgaggctacaggtgtgtgccatcacacccaactaatttttttttcttacagagagat

SEQ ID NO: 404467 - DNA, 328 bp, Homo sapiens
aatccaatcaattgttgccagggactcaggggaggggagaataggagtaattgatggatggaggtttccttttgggatgataaaaatatcctggaattagatagtgctgatggttgcagaacattgtgaatgtacttaatgccactgtggtacactttaaaaggattaaaatggtaaattttatgttatgtgtattttgctacaatataaacaggtccattctatggcatgtgaattatacctcagtaaagctgttataaaaataaaaggcataatagcttgttttacttaccagggaattgtgctgaggaaaaaaaaaatccaatcc

SEQ ID NO: 404468 - DNA, 373 bp, Homo sapiens
atacatggggagaaccacagagtgattaccctaattctttatattccatgcttaaataataatatttgatgaaagatattaaaatatctaaacttaagcaagggcacaaaagaaaccccatttctctgccttcaagaaaaagcaggaaaagataaaaaatttagtttggcctatccatctgataagggattgataaccataatatataaggagctcaaacaactcaatagcaaacaaacaaacaaaatccaaataatctgattttaaagcgggcaaaagatctgagtagtcatttctcagaagacagaaagtggccaacaggcatatgaaaaaaaaaaatgctcaagcatcattaactatcagagaaatgcga

SEQ ID NO: 404469 - DNA, 804 bp, Homo sapiens
cgcccagagcgcaccccgagcgccggcgagcggcgcggtgagaccctcgtgcaggtgagcccggcgcacggcggcccagaatcctggaccccaggagaagcgtctacggccccgacagagacggagtttcaccatgttggccaggatggtcttcaacttctaacttcgtgatccacgctgctgggattacaggtgtgagccaccgcgtgtggcctctgggcaccttttgaaggtggtttcaccccaacatcagcagggtggaggcggagaagctgttcctatccagaggtcagcgtggggacttccttgccaggcccagtgagagcagcccggggggcttcacgctgtccgtcaggtagctgaagcagagagagaaggcggcaggcatcagcgttttcttctatgaacttataagatcaaagactttaagactttcactatttcttctaccgctatctactacgaacttcaaagaggaaccaggagtacggaaggagcatgaaagtggacaaggaacgtgaccattgaagcaccacagggaggggttcaggcctccggatgactgcaggcaggcctgggtaacatccagcctcccacaagaagctggtggagcagagcgttccctgactcctccaaggaaaggagactccctttcccggtctgctcagtaacgggtgccttcccagacactggcgttaccgcttgaccaaggggccctcaagcggcccttatgcgggcatgacagaaggctcccctcttgccttctattcacttctcacaatgtcccttcagcacctgacccta

SEQ ID NO: 404470 - DNA, 181 bp, Homo sapiens
ggaaagacaggaactctggaaacagatttgggttttctcagtccctggatatccttgggcaagctgcatgtcttctggtgactcacttttctcagttgtggtatggaaatatcccgcttccccagttgtgaggaccaacgagaattactagtcaggtggaggggcttagcacggtgcctgg

SEQ ID NO: 404471 - DNA, 421 bp, Homo sapiens
tttttacccttggctaagctagggtcagtaagatttatgtaattctgtttatgttctgacccggagactttaatacttactttctttactaatggtttgccactgacataaccaggtgaaaagcgtggcttgcttatatgactacagggacttataacacccctataagggcttctctgaactcccacaaagccaaaattcctggtccagatcttagaggttcaaattagagacacagcctggtcccgtgtatgaaaagaaggtggccctggagagttgggatgtcaaaatgtctcttgtactcccaatgtttgcttgctttttccttctcttgctgtatcacataatttgcatttttgtcaaaaaaaaaaagtacactttgtgtaatctgatgaatcctttcaaatatatgaactgtggg

SEQ ID NO: 404472 - DNA, 786 bp, Homo sapiens
gatgcagagagctatgattgccccactgtactctagcttcggtgatagagtgagaccttgtctcaaaaaaaaacaaaacagtccaaggaggatgattacggagaatatgtcctaagaagcttaagtcactctgtgtattgacttatttgtgactcaactaggtttttatgtaattttgttgtctttgtaattgatgcaaaaggaaggtacagtctccaggctgtagatgacagacttggagaagtagtgcctgtgtgaagttgcaatcattagtcattttgtgttggtaaatgtcttcagcagtacaaaaagtctaagcgaaagccttgttcattgtccttatgttaaaataagcattgtatgttaatatatgaagatatgtaaatacttagtcactatccagatactaattgattttatgatcggaattcacatttcataaaatatggtttttttcattcattaaatgttgaacgtttacatagctaagacagtcactaatccctttgaccccagaggttaatttctactatggtgttaatttataattacaagattataaaagtgtgattagtaccatgtggcagtagagtgctttaataccatttattgtatctccaaatgctttccccaccctgtttttaatgtaggcatatggtaagaaattgaaccagatatccaggaagaaataatatttttaatttaaaaaatttttttgagacagagtcttgctttgtcactccatcctgggcaatagtgagaccctgcctcaaaaaaagacccccc

SEQ ID NO: 404473 - DNA, 349 bp, Homo sapiens
attccattttcatttttcaccaactgttctctgagcagaggtacctgacttttgcactgtgagtggtttctaatctcagtctctgtcaagcaatgctaagaaagccaacacctaaagacacaaggggtacatcatttaaatgaataatgtaaccaaacaaacaaaaaaagagaataatcattaataactcaactgatagatatgtagggagtaggcaacccaggaagtttaaaactaaattctgttactcttgagggttaaccagcccctgggaatgttatgagcaaatgatactccatgagtaaaatgatatctatgcaagtaaaataaataatttatctaactggga

SEQ ID NO: 404474 - DNA, 451 bp, Homo sapiens
ccatatttccctatattatacttacacatatatttatgttacactttctatttctcttatttacgtacattattaacaaaaaatttttggaagattgtagaaataagacatgtaggcatttgaaattttgtgagaaagagcatgtcagatttgggagttagggatttttagacattgccataagaggtaagtaaatgctgacaccttgcctatagttaataaaaatatattatacatttgaagttttctaagagagtagatttaaaattttctcactatacacacacacaatatatatataactatgttaggtgattaacgttaattagcttgattatggtaatcatttcacaacatagacatatatcaaaacatcacattgtatgctttgaatacataccatttttatttgtcaaccattccccaataaagctggaaaaaacaagacttc

SEQ ID NO: 404475 - DNA, 422 bp, Homo sapiens
ccgctgggtcctccaactacagctcggtcccacctcctctccaccagccccatgggcgctgccagcagggactgcccttctgaggagccagggttggggaagggtgcagagatgcccggccctgtgccccaacctcacctgggtgtgaccagagtagcacgtacctccagaagaggctggagctcaggggcacccaccatgctcccaaactacctctacaaaaacgaacaaaaaactgcagtgcacctctgttgagcgatatgatctgattgaaatatttgtcacgcagcacgccctctttctgtgccaagaatcgccacgtgcatgtcccttttttactgtaatatttattttattttcttggtttttttaaactggtatgataaatataaaattcaataaaagaaaagctttactgcaag

SEQ ID NO: 404476 - DNA, 1067 bp, Homo sapiens
ttttttttttttttgagacagagtctcgttctgttgctcacactggagtgcagtggtgtgatctcgcaacctccacctcccaggttcgagtgattcttgtgcctcagactcctgggtagctgacattacaagcaccacgcatggctaattttatttttagtagagatgggttttcgccatgttggccaggctggtcttgaactcctcagcctcaagcgatttgcctggcttggcctcccacagtgctgggattacaggcgtgagccaccatgcccgccctatcttctcttataaggaacaccagtcatattggattaagggcctgccctgctccagtatgacctcatcttagctacttacaaccacaaccacagtatttccaaataaggtcacatactgaggctccaggaagtacatgaattttggagaggacaccattcaacccagtacattcagtttctatttaacataaaaaataattcccatactatacagggtgaaaaaatgacttatgaaataggtgaaagattgttgaatatacaaatgtgatcttttcttttccaatcacatacagagataagaattttttgggaatatgtctcattcacaaatatgtattatatgcaaagagaaatttatacaatgttcaagtaggattcagggaattaacctaggtgcattctcttgtttctatttcaaccatattgttctccagatttttttcctaattctgatttccctgtaggattgttcagatttaaataaagcctgtaaagcagaagtagtgaacaagcctgggtactaaagttaaatattacagaggcagataaaataagtctgaggaaaattcatgcatttaattctatctattttgcccacatagttatgctgatatttcattcacttggattcaccaacctaaaatttgtaactataatggagaatcttttttctgtatttgaaaaaagtgcactgagcaaattaatagtataaatatgatttcaaggataactaagagaatatttatttctatgtatggttaatcaacatgcccccttccatactcc

SEQ ID NO: 404477 - DNA, 1020 bp, Homo sapiens
ttataacacacataccacatacactccacctcccaggttcgagtgattcttgtgcctcagactcctgggtagctgacattacaagcaccacgcatggctaattttatttttagtagagatgggttttcgccatgttggccaggctggtcttgaactcctcagcctcaagcgatttgcctggcttggcctcccacagtgctgggattacaggcgtgagccaccatgcccgccctatcttctcttataaggaacaccagtcatattggattaagggcctgccctgctccagtatgacctcatcttagctacttacaaccacaaccacagtatttccaaataaggtcacatactgaggctccaggaagtacatgaattttggagaggacaccattcaacccagtacattcagtttctatttaacataaaaaataattcccatactatacagggtgaaaaaatgacttatgaaataggtgaaagattgttgaatatacaaatgtgatcttttcttttccaatcacatacagagataagaattttttgggaatatgtctcattcacaaatatgtattatatgcaaagagaaatttatacaatgttcaagtaggattcagggaattaacctaggtgcattctcttgtttctatttcaaccatattgttctccagatttttttcctaattctgatttccctgtaggattgttcagatttaaataaagcctgtaaagcagaagtagtgaacaagcctgggtactaaagttaaatattacagaggcagataaaataagtctgaggaaaattcatgcatttaattctatctattttgcccacatagttatgctgatatttcattcacttggattcaccaacctaaaatttgtaactataatggagaatcttttttctgtatttgaaaaaagtgcactgagcaaattaatagtataaatatgatttcaaggataactaagagaatatttatttctatgtatggttaatcaacatgcccccttccatactcc

SEQ ID NO: 404478 - DNA, 428 bp, Homo sapiens
taatttctctcccgtccccacccctaaattcctgatggatgaacctagagctgtcctgtccactccaggccggactgacgtagcctatgggcccagcaggtccagggcccacgttttaatttctttttaaaaagctttaggtcttgccgggcgcggtggttcacgcctggagtcccagcattttgggaggccgaggcgggtggatcacaaggtcagcagttcaagaccagcctgaccaacatggtgaaaccctgtctctactggaaatacaaaaaaattggctgggcgaggtggcaggcacctgtggtcccagctacctgggaggctgaggcaggagaatctcttgaaactggaaggcagaggttgcagtgagccgagattgcgccactgcactctagcctgggcaacgagagcaaaactccctctca

SEQ ID NO: 404479 - DNA, 366 bp, Homo sapiens
ataagactttatgtaggtgttcaagaattttcaaaccaatcatttgtgaatgtgaatcttttctattattaacttcaaaattggtaaaattattttagaacatatactatatttagtctatgatacccatgtttaagcagcctgtggaattaaagacatatacagagtataccaaataaaattttacaaattatggtttggaaatgtgctttagacacagaaaagaaaatgctagttttcagaagtattgggattattaactgttatcatgtagcataaacattcaaattaataatcatgtacctaaattactctaaagtattgatatggttaggctttgtgtccccacccaaatctcatcttgag

SEQ ID NO: 404480 - DNA, 206 bp, Homo sapiens
cagcttgcaacattagtaggtcatggaatcaattaattgaagtacttttttttgccagcgtttttagaagatacgtttatataattgtatagaaaatattaatgcctagcacagtagctgggaaaatataattttgtgtgtgttaaaaatgctgctgtgatagaaccactaataaaatccctgccctcgacttgcttcttagtctt

SEQ ID NO: 404481 - DNA, 737 bp, Homo sapiens
tggtggagtgcagtggcacaatcacagcttactgcagcctcgaactcttggcctcaagcaatcctcccaagtagctgggactacaggcatgcaccaccatacctggctaagttttatttttttgtagacatgaggtttcactatgttactcaggctggtcttaaactcttaagctcaagtgatcctccagccttggactcccaaagtgctgggattacaggtgtgagccaccatgctcggcctacacgaactttttttaaactagcaggggttatgtgaatagtgggattacagacattttcttcattatgctggtccatatttaaatcctctccccctcgcaaaaaaaggtaaaaatatacagccataaaaaagaatggaatcatgtccttcgcagcaacatggatggagctggaggctacactctttttcatcctctatcctaaaagaagtaactcagaaccagaaaatcaaataccacatggtctcatttgtaagtgggagctaaacaatgagtacatgtgaacataaagatggaagtaatagactagagattccaaaagagaaggtagaagaggaggcacacaggttgaaaactacctattgggtactagggtcactttggatgatggctgcgctagcaggccaaacctcggcattacataatctagccatgtaacaaacctgcacgtgtaccccctgaatctaaaataaaataaatttttttttaaattgta

SEQ ID NO: 404482 - DNA, 180 bp, Homo sapiens
tgttttctccgcacttgaacaagaagtcatgttgaccccaattttttaaaagagcagaaaaaatgaaactactcatcgaaaacttatgccacaaaatttgggtcacacattagttaagtgggaggtacaataccaattacttcattgttcctgtcaaggaagccatgagtctatcctgca

SEQ ID NO: 404483 - DNA, 434 bp, Homo sapiens
ctgttttatcagcaaggtctttatgacctgtattttgtgctgacctcctatttcatcctatgccttagaatgccttaaccttctgggaatgcagcccaacagctttcagcctcattttacgagatcctctttaagatggagttcacatgcctctgacaatccctctgacctaggtctttgtgttagttttcatgtttcatggatgctctaactaaaatggctcctgctataataccattcccatcctcttagccaccacccattctttctattagttggtggaaaactttattgagaagggacttctctacgtccatctcagaggaaacatgttcctgttttctagaaccaacccctttaccacttctttcagaaacttccctcattagagggagagctgaagatgtctccctttgaaactctaaaaaaaaaaa

SEQ ID NO: 404484 - DNA, 202 bp, Homo sapiens
gagtctttcacaaataagaagagagaaatcactgcagaatgggtgactattttgcaactcttccccagtactgtgagcaacaggcatgtgtacgtaaagacacccatcacttaatactgcctgtcacagatgcttaaatggacagggtggaaaaaaatattcttttcacacacttaaaagttacttcaagttattttaaatt

SEQ ID NO: 404485 - DNA, 365 bp, Homo sapiens
ccgcccccacctggtagaattttaattccctcagtaaaattgattccaccagttctgcacattattctccctgtcttccatttagcccgttagtttgctgacagtagagtacacagcacttagcagctggtttgtggagccatcagtcaggaaattgtatgataaataggaggtagccaggtttcgtggcacttccttctgcttcagcagttttcgcctgactttggagaagtcatcatgtggtgttttgtcaaggggcagggcaggagatggctgcggtgcagtaacttattacatatacgcttgagttatgatgcgtcacagctgcactgctcatgtgtaaataataaactgcgagctgggta

SEQ ID NO: 404486 - DNA, 479 bp, Homo sapiens
tcttgctcaatttgtttatttgttttggtttttttctttagcaaaaatactttgggccttcttagatgtggaaaacttgcccctgggcagagccaaggaaaatcaaggggaaagaaaaaattgaattgctctacaaaaggaagttggaaaattttaagtatttaggaattgcccaggaggggacacgggaaggaggagcatgagcaaggttctggaacaaggtgatgcacagaggggccaggcaatttggcaggtgaaaggttctctgtgataataatggcctgtgatttttaagaatagaaatgtttaaaatgttatctgccttgctgtaatgtaatcctttgttattccatatttattgttgctgttgttaaaatctattactcacactctcttgcatgtggtatttataagaaattgaagaaaaaaacagggaggcaagagcattgccctgaattattggaaacattagtatgaag

SEQ ID NO: 404487 - DNA, 1052 bp, Homo sapiens
tgctggaggtaacaggctataaccgtggatgagagatcaccaccttaaagaaaaaagaagcgatatttagagtcattcagcagataaaagagaaaggcttcaacacgtggagataagggcttcatgacagtatttgttcgggatgtagcaggccgtgctacacgagcaatcatcgaagactcgaccaggaggcctgctggtttctttaaaggtgttgggaaaggtttagtaggagcggtagcaaggccaactggaggcatcatagacatggctagcagtacatttcaggggataaaaagagctacagagacttctgaagtggagagtctgcgacctcctcggttcttcaatgaagatggagttatcagaccgtacaggttgagggatgggactggaaatcaaatgttacaggcatcaaaaagtttgatatgaaaagttaatgcatgactttgcaagtgaaagccaacagtagattttagtcttaaaatttacaaactacgtacagctgtttcagtattttgaatacaaagaaaaccttttgtattggtaacttttaataggaattttaatgaatctggtttttttatagggtgttcttagttctgcactggatttgctagatttgttggaagcctttgtaccttatgtatcctcgtcattggtggtacttacttaaccaattaaaccatttctgttgtggggttattaaaccactggtagcttttataccagatatataatccttatatccaattacacatgaagaaggaaaagcaaaactcaggaacactgctattgtgaattactcttggattcttgtgctttgcctttgaaaatgcttaaatggccatgaccctcttcctgctttattctagtgtagtctttataaaacttgtgggatttgataagcagttcacatgcaaaccagtatcttttaataatacaaagtagcatctggaacaatagacagtttgaagttagaatctgcttagacaactttcttacttggtaaattcgactttttaaaacctggattatgctgtaggtaacta

SEQ ID NO: 404488 - DNA, 11371 bp, Homo sapiens
  misc_feature (3872)..(3872): n is a, c, g, or t
  misc_feature (4285)..(4285): n is a, c, g, or t
cgcggccgcgcagccgcctttcctccctctcagggctgcgcgcccaggtctgcgccgcgctccgcctccagccgcgcgcagacttgcgcacgcgtcgtgagagcgaccgcctccgtctctcgctgggctcgctagggctgcgcgttgggccagcgggggcgccgcagctgaagccgccccggagccggtgaaccgaattacctcgagggaggggcgtggggaaggcggcgggaggaggagcgcacgggccggctgccgtgcccaccacggctgaggaacatggttttcgagtcggtggtcgtggacgtgttgaaccggttcttgggggactatgtggtggacttggacacgtcccagctctctctgggcatctggaaaggagctgtggccctcaagaatcttcaaattaaagaaaatgccctgagtcaactggatgtaccatttaaagttaaagttggtcacataggtaatcttaaacttataattccatggaaaaacctttatactcaacctgttgaagccgtattggaagaaatttatttacttatagtgccttcttctagaataaaatatgatcctttaaaagaagagaaacaactcatggaagcaaagcaacaggaactgaaaagaatagaagaagcaaaacaaaaagtagttgatcaagaacaacatctgccggaaaaacaggacacttttgcagaaaaattagttacacagatcataaaaaatcttcaggtgaaaatttccagtatccatattcgttatgaagatgatatcacaaatcgggacaaaccgctgtcatttggtatttcccttcaaaatctgagcatgcagacaactgatcaatactgggttccatgtttacatgatgaaactgagaaactggttcgtaagttaatccgattggataacctgtttgcctattggaatgtgaagtctcagatgttttatcttagtgattatgataactccttggacgacttgaagaatggcattgtcaatgaaaatattgttccagaaggttatgattttgtatttcgtcccatatctgctaatgccaaacttgtgatgaatcgccgatctgattttgacttttctgcccccaaaataaacttggaaattgagttacataacatagcaattgaatttaataaaccacagtatttcagtattatggagcttcttgaatcagttgatatgatggcacaaaatctgccatataggaagttcaaacctgatgtgcctcttcaccaccatgccagagaatggtgggcttatgctatacatggcgttcttgaagtaaatgtttgccccaggttatggatgtggtcatggaagcatattagaaaacataggcaaaaagtgaagcaatataaagaactgtataaaaaaaagttaacaagtaagaagccacctggtgaacttctcgtgtctttggaggagttggaaaaaaccttggatgtctttaatataactatagctagacagacggcagaagttgaggtaaagaaagctggatacaaaatttacaaagaaggagtaaaagatccagaggataataaagggtggtttagctggctatggtcttggtcagaacaaaatactaatgaacagcaaccagatgttcaacctgaaactcttgaagaaatgttgacacctgaagaaaaagctttactctatgaagcaattggctatagtgaaacagcagttgatccaactttactaaaaacatttgaagccttgaagttttttgtccacttgaaaagtatgtctattgttctaagagaaaatcatcaaaaacctgagctggtagatattgtaatagaagaatttagcaccttaattgtgcaaagaccaggagcacaagcaataaaatttgaaactaaaatagattcatttcatattactggcttaccagataattcagaaaaaccccgcctcctgtcttcattggatgatgcaatgtcacttttccaaattacatttgagataaatccattagatgaaactgtttctcagaggtgtatcatagaagctgaacctttagaaatcatatatgatgcaaggacagtgaatagtatagtggaattcttcagacctccaaaagaggtacatctagcacagctcactgcagcaactttgacaaaactggaagaatttcgcagtaagacagcaacaggtctactgtatattattgaaacacagaaagttcttgatctcaaaattaatttgaaggcttcatatattattgtcccacaagatggaatttttagtcctacatcaaatctgcttcttttggaccttggtcatctaaaggtgacgagtaaaagtcgttctgaattaccagatgtgaaacaaggtgaggccaatcttaaagagataatggatagagcttatgattcatttgatattcaacttacaagtgtacagctgctttacagtagagttggtgataattggagagaagcacgaaaactcagtgtatctacccagcatattttggtacccatgcacttcaatttggaactgtctaaggccatggttttcatggatgtaaggatgcccaaattcaagatttatggaaagttacctcttatttctttacgaatctcagataaaaaactacaagggattatggaattgattgaaagcattccaaaacctgaaccagtaactgaagtatctgcccctgtcaaatcattccagattcaaacatctacttctttgggaacatcacagatttcacagaaaataattcctctcttggaacttccatctgtttctgaagatgattcagaggaggaattttttgatgcaccatgtagtcccttggaagaacctcttcagtttccaactggagttaaaagtattcgaaccagaaagttacaaaagcaggattgttcagtaaatatgactacatttaaaataagatttgaagtaccaaaggttttgatcgagttttatcaccttgttggagattgtgaactatctgtggtagaaattcttgttttaggattgggtgcagaaattgagattagaacatacgatttgaaagcaaatgcctttttgaaagagttctgcttaaaatgcccagaatacttggatgaaaacaagaaaccagtttatttggttacaaccctggataacacaatggaagacctgttaacgctggaatatgtaaaggctgaaaagaatgtacccgacttgaaaagtacctataacaatgttttacaattgattaaggtaaatttttcctctttggatattcatttacacactgaagcacttctgaatacaataaattatcttcataatatccttccgcaatcagaggaaaaatcagccccagtgtccactacagagactgaagacaaaggagatgtcattaaaaaattagctttaaaactatccacaaatgaagatatcattactttgcagattttagcagaattatcgtgtttacagatctttattcaagatcagaaatgtaacatttctgaaattaagattgaagggcttgattctgagatgattatgaggccttcagaaactgaaataaacgcaaagctaaggaatataattgttttagattctgatataacagctatatacaaaaaggctgtttatatcactggaaaagaagttttcagcttcaaaatggtttcttacatggatgcaactgctggttctgcatacacagatatgaatgtggttgacattcaggttaatttaatagttggttgcattgaagtagtttttgtcacgaaatttctatattctatattggcttttatagataattttcaggcagctaaacaagccttggctgaggcaactgttcaggcagctggaatggctgctactggtgtaanagaactcgcacaaaggagttccagaatggcactggatattaacatcaaagccccagttgtggtcatcccgcagtctccagtttctgaaaatgtttttgttgctgattttggactaattacaatgacaaatacctttcatatgataacagagagccagagctctcccccacctgttattgatttgataacaataaagctgagtgaaatgcgactatacagatctcgatttattaatgatgcataccaggaagtactggatctactcctgccattaaatcttgaggttgtggttgaacgaaatttatgctgggagtggtaccaggaagttccttgttttaatgtaaatgctcagctgaaaccaatggaggtagaatccatacagaatgtcctggtgatgctgccaacaatctgcnagtgcccagctgccttttgaggccaaccctctaggttcattcttagtcaagaagatataacaactatttttaaaacattgcatggcaatatatggtatgaaaaagatggtagtgcctcacctgctgtaacaaaagaccaatacagtgccactagtggagttactactaatgcttcacaccattcaggaggagcaactgtggtgacagctgctgtggtagaagtacattcacgtgccttactagttaagacaacactaaacataagcttcaaaactgatgatctcaccatggtgctgtatagtccaggtcctaaacaggcttcctttacagatgttcgtgatccttctctgaaacttgctgaatttaaattggagaatattataagtactttaaaaatgtatacagatggctcaacattttcttccttctcattaaaaaactgtattttagatgataaaagacctcatgtcaagaaagcaactcctcgaatgataggactgacagttggttttgacaaaaaagacatgatggatataaagtacaggaaagtcagagatggttgtgtgactgatgcggtctttcaagaaatgtatatttgtgcaagcgtagaatttctgcagactgttgcaaatgtctttcttgaggcctacaccacaggcactgctgtagaaaccagtgtgcaaacatggactgctaaggaagaagtacctacacaggaatcagtgaagtgggaaattaatgttattattaaaaatcctgaaattgtgtttgtagctgacatgacaaaaaatgatgctcctgctttagtcattacaacacaatgtgaaatttgctataaaggtaaccttgaaaatagtacaatgactgctgccattaaagatctccaagtgagagcctgcccgtttcttccagtcaagagaaaaggcaaaatcactactgttttgcagccctgtgacttgttttatcaaactactcagaaaggtacagatccacaagtgatcgatatgtcagtaaaatccctgacactaaaggtttcaccagttattataaatactatgattaccataacttcagcactgtatacaactaaggaaaccatcccagaagaaacggcttcttctactgcacatttatgggaaaagaaggatacaaagactttaaaaatgtggtttcttgaagaatcaaatgaaactgaaaaaatagctcccacaactgaattggtacccaaaggcgagatgataaaaatgaacattgattctatttttatagttcttgaggctggaattggtcatagaacagtacctatgcttctggcaaagtcacgtttttcaggggaaggcaaaaactggagttccctaataaatctgcactgtcagcttgagctagaagtgcattattataatgaaatgtttggtgtatgggagcctttgcttgaacccttagaaattgatcagactgaggattttagaccatggaatcttggtatcaagatgaaaaagaaagcaaaaatggccattgttgagtcagatcctgaagaagaaaactacaaagtgccagaatataaaactgtcatcagtttccattcaaaagaccaattaaacattacattatccaaatgtggtcttgtaatgttaaacaatttagtcaaggcatttacagaagctgccactggatcttcagctgacttcgtaaaggatctagcaccatttatgattttaaattcccttggacttactatttctgtttcgccaagtgattcttttagtgtactcaacattcctatggcaaaatcatatgtattgaaaaatggagaaagtttaagtatggattatatccgaaccaaggacaatgatcatttcaatgcaatgaccagcctaagcagcaaactcttcttcattcttcttacacctgttaaccattctactgctgataagattcctttaacaaaagtgggacgacgtctgtacactgtaagacacagagagtctggcgttgaaagatctattgtttgtcaaattgatacagtagaaggaagtaagaaggtcacaattcgctccccagtgcagataagaaatcatttttcagtcccactgtctgtttacgaaggggataccttattgggaactgcctcacctgaaaatgaattcaacataccattaggatcttaccgatcattcatttttctgaagccagaagatgagaactatcaaatgtgtgaaggaattgactttgaagagattataaaaaatgatggtgctcttctaaagaagaaatgtagatctaaaaacccttctaaggaatcatttctcattaatattgttccagaaaaagataatttaacatctctatcagtgtattcagaagatggttgggatttaccatacataatgcatttgtggccacctatcctgctccgaaatcttcttccttacaaaattgcttattatatagagggaattgaaaattcggtttttactctaagtgaaggacattcagcccagatttgtactgcacagttgggtaaagccaggctacatttaaaattacttgactatctcaatcacgattggaaaagtgaatatcacataaagcctaatcagcaagacattagttttgtcagttttacttgtgttacagaaatggaaaagactgatttagatattgctgtccatatgacttacaatactggtcagacagttgtggcatttcatagtccttattggatggtcaataaaactggccgcatgttacagtacaaagcagacggaattcatcgaaagcatccacctaattataaaaagccagttctcttttcttttcagccaaatcacttttttaataacaataaggttcaacttatggtaactgatagtgagttgtccaatcagttttcaattgatactgttggtagtcatggagctgttaaatgtaaaggcctgaaaatggactatcaagttggtgtcactatagacctgagcagttttaacattactagaattgtgacatttacccctttttatatgattaaaaacaaaagcaaataccatatatcagtggctgaagaaggaaatgataaatggctctctcttgatttggagcagtgtatccccttttggcctgagtatgcttctagtaaacttcttattcaagtcgaaaggagtgaagatcctcccaaaaggatatattttaacaagcaggaaaattgtattctattgcgtctagataacgagcttggaggtattatagcagaagtgaatttggccgagcattctacagttattacatttttagattatcatgatggagcagctacattcctcttaataaatcacacaaagaatgaacttgttcaatacaatcaaagttctctcagtgaaatagaagattccctccctcctggtaaagccgtgttttatacatgggctgatccggtgggctctagaaggctgaagtggagatgtagaaaaagccatggtgaagtaacacagaaggatgatatgatgatgcctatagatttgggggaaaagacaatatatttagtttcattctttgaaggtttacaacgcattattttattcactgaagatccaagggtatttaaagtaacatatgaaagtgagaaagcagagttagcagagcaagaaattgcagtggcattacaagatgttggaatttctcttgtcaacaattacacgaagcaagaagtagcctatataggcattacaagttctgatgtggtttgggaaacaaagcccaagaagaaggcaagatggaagccaatgagtgtaaagcacactgagaagttagagagagaatttaaggaatatactgaatcttctccttcagaagataaggttattcagttggacactaatgttccggttcgcctaacccctactggtcataacatgaaaattctgcagccgcatgtaatagctctacgaagaaattatcttccagcattaaaagtggaatataacacatctgcacatcaatcatcatttagaattcagatttacagaatacagatccaaaatcagatacatggtgctgtatttccctttgtgttttatcctgttaaacctccaaagtcggtcaccatggattcagcaccaaagccctttacagatgtcagtattgtcatgagatctgcaggacattcccagatatcacgtattaagtatttcaaagtattgattcaagaaatggatctcaggttagatcttgggtttatctatgctttaacagaccttatgacagaagctgaggtgactgaaaatacagaggttgagctttttcataaagatatagaagctttcaaagaagaatataaaacagcctcattagtagatcaatcacaagtcagcctctatgaatattttcatatatctcctatcaagttacatttaagtgtttcactgagttccggcagagaagaagctaaagattcaaaacaaaatggaggactgattccagttcattctttaaatcttttgctgaagagtattggtgccacactgacagatgtacaagatgtagtttttaagcttgcattttttgaactcaactatcagttccatacaacatccgatctacagtctgaagtcataagacactattcaaaacaggccattaagcagatgtatgtactcattcttggacttgatgttttgggaaatccatttggcttaattagagaattttctgaaggtgtagaagcatttttttatgaaccttaccagggagccatccagggtcctgaagagtttgtggaaggaatggcactaggacttaaggcactagttggtggagctgttggtggattggctggtgctgcctccaaaatcaccggtgctatggctaagggggtagcagctatgaccatggatgaagactaccaacagaagagaagagaagccatgaataagcaaccagctggttttagagaaggcatcactcgtggaggaaaaggcttagtttctggatttgttagtggcataacaggaattgttacaaaaccaatcaaaggagctcaaaaaggaggagcagctggtttctttaaaggtgttgggaaaggtttagtaggagcggtagcaaggccaactggaggcatcatagacatggctagcagtacatttcaggggataaaaagagctacagagacttctgaagtggagagtctgcgacctcctcggttcttcaatgaagatggagttatcagaccgtacaggttgagggatgggactggaaatcaaatgttacaggtcatggaaaatggaagatttgcaaaatacaaatattttacccatgtcatgatcaataagacagatatgctaatgataaccagacgtggtgtattgtttgtaacaaagggaacatttggacaactcacgtgtgagtggcagtatagttttgatgaatttaccaaagagccattcattgttcatgggagaagattgcgcattgaagcaaaggaacgagtgaagtctgtatttcatgccagagagtttggaaaaataattaacttcaagaccccagaggatgccaggtggatcctcacaaagctacaagaagcaagagaaccttctccgagcctctgacagagaacactgcctgaagacacacagcaataagtgattacagctcctagactaccttccaaaacctgtttgggaagcatattacagaaatgatttcaagtaccctgtattctggatgctaaaaaacaaaaacaaacaaaaaaacaaaaacaaaaaaacaaaaccagaatcaggtaaaacagctatgtgattaaaatattttaattcttcagcaattacccggttttctaaattgaatcatgcatctatttataattctaattattttgtaaaagaagacaaaattatgaatcttaagtatttgctccatctttttctctgtaatggtggagaggctgcccataattcatctccacatggagccaagtttaatgtttctagttcacattttgtacttctgtcatgcttatttcaaactccctgagtgatgggtaagaaatcaaacattgcctcagtggtatcaagagaactttggtggtggtttcttcagaatcatgaagttcttttgccagataaatattttgatattattttcctttttaatataaaggataggtttgaattgtacttaaaatgcatagcattattaaaaacaatcttttaaaatataatttataacatagattgaagcctccccttaagaaaccttaaagaaataagtatcctactcaaaaaaggaagtctgtttcagaactttagggcctttgaaatatttcctcaagcctatttcatgagatctacttggtttacccaagtcatgtttttaatagactgctaatatcaaaggagaatttttaaagccttaacaatgcctactttccattcactgttaacatggaataaacacaattcccaacatcttagatagtgtattatgcttccaacagacagtccctctcatataaagtttatgtaccctaaaatctaacccaataacctgtcccgttgccaatagattgagaatttctggtttgcttactctacagttattcaaatgagagtcacgcttttaaatttacagctcatcacagaaatcatcagctatacattagtaaaaataaggacatgaggttttctttcttggtttttgtccaagatctttgcaccttaatattaatggactgtttcaggtaaaagagaatgaatgtatgattgtgaactgtgaagagaatgatgcaggatcctatttagttactgaataatacagagtattcaatgcatgttgtatgtgccaccaagttactattaactgtttttggaattgaagactctgtatagtcaatagttgtgaaattcttctcaggctccttaaaccctcgctttgttgtaaaagctaaaataaacagcatgctatattgtaattgtatttcttgctgaccaaatctactaaatgctattgatttctctctgattactaaaacacattgtttattctcagtagtttcccccaaaatgcttttttctttgctgaacttaaattgaatca

SEQ ID NO: 404489 - DNA, 10500 bp, Homo sapiens
  misc_feature (3872)..(3872): n is a, c, g, or t
  misc_feature (4285)..(4285): n is a, c, g, or t
cgcggccgcgcagccgcctttcctccctctcagggctgcgcgcccaggtctgcgccgcgctccgcctccagccgcgcgcagacttgcgcacgcgtcgtgagagcgaccgcctccgtctctcgctgggctcgctagggctgcgcgttgggccagcgggggcgccgcagctgaagccgccccggagccggtgaaccgaattacctcgagggaggggcgtggggaaggcggcgggaggaggagcgcacgggccggctgccgtgcccaccacggctgaggaacatggttttcgagtcggtggtcgtggacgtgttgaaccggttcttgggggactatgtggtggacttggacacgtcccagctctctctgggcatctggaaaggagctgtggccctcaagaatcttcaaattaaagaaaatgccctgagtcaactggatgtaccatttaaagttaaagttggtcacataggtaatcttaaacttataattccatggaaaaacctttatactcaacctgttgaagccgtattggaagaaatttatttacttatagtgccttcttctagaataaaatatgatcctttaaaagaagagaaacaactcatggaagcaaagcaacaggaactgaaaagaatagaagaagcaaaacaaaaagtagttgatcaagaacaacatctgccggaaaaacaggacacttttgcagaaaaattagttacacagatcataaaaaatcttcaggtgaaaatttccagtatccatattcgttatgaagatgatatcacaaatcgggacaaaccgctgtcatttggtatttcccttcaaaatctgagcatgcagacaactgatcaatactgggttccatgtttacatgatgaaactgagaaactggttcgtaagttaatccgattggataacctgtttgcctattggaatgtgaagtctcagatgttttatcttagtgattatgataactccttggacgacttgaagaatggcattgtcaatgaaaatattgttccagaaggttatgattttgtatttcgtcccatatctgctaatgccaaacttgtgatgaatcgccgatctgattttgacttttctgcccccaaaataaacttggaaattgagttacataacatagcaattgaatttaataaaccacagtatttcagtattatggagcttcttgaatcagttgatatgatggcacaaaatctgccatataggaagttcaaacctgatgtgcctcttcaccaccatgccagagaatggtgggcttatgctatacatggcgttcttgaagtaaatgtttgccccaggttatggatgtggtcatggaagcatattagaaaacataggcaaaaagtgaagcaatataaagaactgtataaaaaaaagttaacaagtaagaagccacctggtgaacttctcgtgtctttggaggagttggaaaaaaccttggatgtctttaatataactatagctagacagacggcagaagttgaggtaaagaaagctggatacaaaatttacaaagaaggagtaaaagatccagaggataataaagggtggtttagctggctatggtcttggtcagaacaaaatactaatgaacagcaaccagatgttcaacctgaaactcttgaagaaatgttgacacctgaagaaaaagctttactctatgaagcaattggctatagtgaaacagcagttgatccaactttactaaaaacatttgaagccttgaagttttttgtccacttgaaaagtatgtctattgttctaagagaaaatcatcaaaaacctgagctggtagatattgtaatagaagaatttagcaccttaattgtgcaaagaccaggagcacaagcaataaaatttgaaactaaaatagattcatttcatattactggcttaccagataattcagaaaaaccccgcctcctgtcttcattggatgatgcaatgtcacttttccaaattacatttgagataaatccattagatgaaactgtttctcagaggtgtatcatagaagctgaacctttagaaatcatatatgatgcaaggacagtgaatagtatagtggaattcttcagacctccaaaagaggtacatctagcacagctcactgcagcaactttgacaaaactggaagaatttcgcagtaagacagcaacaggtctactgtatattattgaaacacagaaagttcttgatctcaaaattaatttgaaggcttcatatattattgtcccacaagatggaatttttagtcctacatcaaatctgcttcttttggaccttggtcatctaaaggtgacgagtaaaagtcgttctgaattaccagatgtgaaacaaggtgaggccaatcttaaagagataatggatagagcttatgattcatttgatattcaacttacaagtgtacagctgctttacagtagagttggtgataattggagagaagcacgaaaactcagtgtatctacccagcatattttggtacccatgcacttcaatttggaactgtctaaggccatggttttcatggatgtaaggatgcccaaattcaagatttatggaaagttacctcttatttctttacgaatctcagataaaaaactacaagggattatggaattgattgaaagcattccaaaacctgaaccagtaactgaagtatctgcccctgtcaaatcattccagattcaaacatctacttctttgggaacatcacagatttcacagaaaataattcctctcttggaacttccatctgtttctgaagatgattcagaggaggaattttttgatgcaccatgtagtcccttggaagaacctcttcagtttccaactggagttaaaagtattcgaaccagaaagttacaaaagcaggattgttcagtaaatatgactacatttaaaataagatttgaagtaccaaaggttttgatcgagttttatcaccttgttggagattgtgaactatctgtggtagaaattcttgttttaggattgggtgcagaaattgagattagaacatacgatttgaaagcaaatgcctttttgaaagagttctgcttaaaatgcccagaatacttggatgaaaacaagaaaccagtttatttggttacaaccctggataacacaatggaagacctgttaacgctggaatatgtaaaggctgaaaagaatgtacccgacttgaaaagtacctataacaatgttttacaattgattaaggtaaatttttcctctttggatattcatttacacactgaagcacttctgaatacaataaattatcttcataatatccttccgcaatcagaggaaaaatcagccccagtgtccactacagagactgaagacaaaggagatgtcattaaaaaattagctttaaaactatccacaaatgaagatatcattactttgcagattttagcagaattatcgtgtttacagatctttattcaagatcagaaatgtaacatttctgaaattaagattgaagggcttgattctgagatgattatgaggccttcagaaactgaaataaacgcaaagctaaggaatataattgttttagattctgatataacagctatatacaaaaaggctgtttatatcactggaaaagaagttttcagcttcaaaatggtttcttacatggatgcaactgctggttctgcatacacagatatgaatgtggttgacattcaggttaatttaatagttggttgcattgaagtagtttttgtcacgaaatttctatattctatattggcttttatagataattttcaggcagctaaacaagccttggctgaggcaactgttcaggcagctggaatggctgctactggtgtaanagaactcgcacaaaggagttccagaatggcactggatattaacatcaaagccccagttgtggtcatcccgcagtctccagtttctgaaaatgtttttgttgctgattttggactaattacaatgacaaatacctttcatatgataacagagagccagagctctcccccacctgttattgatttgataacaataaagctgagtgaaatgcgactatacagatctcgatttattaatgatgcataccaggaagtactggatctactcctgccattaaatcttgaggttgtggttgaacgaaatttatgctgggagtggtaccaggaagttccttgttttaatgtaaatgctcagctgaaaccaatggaggtagaatccatacagaatgtcctggtgatgctgccaacaatctgcnagtgcccagctgccttttgaggccaaccctctaggttcattcttagtcaagaagatataacaactatttttaaaacattgcatggcaatatatggtatgaaaaagatggtagtgcctcacctgctgtaacaaaagaccaatacagtgccactagtggagttactactaatgcttcacaccattcaggaggagcaactgtggtgacagctgctgtggtagaagtacattcacgtgccttactagttaagacaacactaaacataagcttcaaaactgatgatctcaccatggtgctgtatagtccaggtcctaaacaggcttcctttacagatgttcgtgatccttctctgaaacttgctgaatttaaattggagaatattataagtactttaaaaatgtatacagatggctcaacattttcttccttctcattaaaaaactgtattttagatgataaaagacctcatgtcaagaaagcaactcctcgaatgataggactgacagttggttttgacaaaaaagacatgatggatataaagtacaggaaagtcagagatggttgtgtgactgatgcggtctttcaagaaatgtatatttgtgcaagcgtagaatttctgcagactgttgcaaatgtctttcttgaggcctacaccacaggcactgctgtagaaaccagtgtgcaaacatggactgctaaggaagaagtacctacacaggaatcagtgaagtgggaaattaatgttattattaaaaatcctgaaattgtgtttgtagctgacatgacaaaaaatgatgctcctgctttagtcattacaacacaatgtgaaatttgctataaaggtaaccttgaaaatagtacaatgactgctgccattaaagatctccaagtgagagcctgcccgtttcttccagtcaagagaaaaggcaaaatcactactgttttgcagccctgtgacttgttttatcaaactactcagaaaggtacagatccacaagtgatcgatatgtcagtaaaatccctgacactaaaggtttcaccagttattataaatactatgattaccataacttcagcactgtatacaactaaggaaaccatcccagaagaaacggcttcttctactgcacatttatgggaaaagaaggatacaaagactttaaaaatgtggtttcttgaagaatcaaatgaaactgaaaaaatagctcccacaactgaattggtacccaaaggcgagatgataaaaatgaacattgattctatttttatagttcttgaggctggaattggtcatagaacagtacctatgcttctggcaaagtcacgtttttcaggggaaggcaaaaactggagttccctaataaatctgcactgtcagcttgagctagaagtgcattattataatgaaatgtttggtgtatgggagcctttgcttgaacccttagaaattgatcagactgaggattttagaccatggaatcttggtatcaagatgaaaaagaaagcaaaaatggccattgttgagtcagatcctgaagaagaaaactacaaagtgccagaatataaaactgtcatcagtttccattcaaaagaccaattaaacattacattatccaaatgtggtcttgtaatgttaaacaatttagtcaaggcatttacagaagctgccactggatcttcagctgacttcgtaaaggatctagcaccatttatgattttaaattcccttggacttactatttctgtttcgccaagtgattcttttagtgtactcaacattcctatggcaaaatcatatgtattgaaaaatggagaaagtttaagtatggattatatccgaaccaaggacaatgatcatttcaatgcaatgaccagcctaagcagcaaactcttcttcattcttcttacacctgttaaccattctactgctgataagattcctttaacaaaagtgggacgacgtctgtacactgtaagacacagagagtctggcgttgaaagatctattgtttgtcaaattgatacagtagaaggaagtaagaaggtcacaattcgctccccagtgcagataagaaatcatttttcagtcccactgtctgtttacgaaggggataccttattgggaactgcctcacctgaaaatgaattcaacataccattaggatcttaccgatcattcatttttctgaagccagaagatgagaactatcaaatgtgtgaaggaattgactttgaagagattataaaaaatgatggtgctcttctaaagaagaaatgtagatctaaaaacccttctaaggaatcatttctcattaatattgttccagaaaaagataatttaacatctctatcagtgtattcagaagatggttgggatttaccatacataatgcatttgtggccacctatcctgctccgaaatcttcttccttacaaaattgcttattatatagagggaattgaaaattcggtttttactctaagtgaaggacattcagcccagatttgtactgcacagttgggtaaagccaggctacatttaaaattacttgactatctcaatcacgattggaaaagtgaatatcacataaagcctaatcagcaagacattagttttgtcagttttacttgtgttacagaaatggaaaagactgatttagatattgctgtccatatgacttacaatactggtcagacagttgtggcatttcatagtccttattggatggtcaataaaactggccgcatgttacagtacaaagcagacggaattcatcgaaagcatccacctaattataaaaagccagttctcttttcttttcagccaaatcacttttttaataacaataaggttcaacttatggtaactgatagtgagttgtccaatcagttttcaattgatactgttggtagtcatggagctgttaaatgtaaaggcctgaaaatggactatcaagttggtgtcactatagacctgagcagttttaacattactagaattgtgacatttacccctttttatatgattaaaaacaaaagcaaataccatatatcagtggctgaagaaggaaatgataaatggctctctcttgatttggagcagtgtatccccttttggcctgagtatgcttctagtaaacttcttattcaagtcgaaaggagtgaagatcctcccaaaaggatatattttaacaagcaggaaaattgtattctattgcgtctagataacgagcttggaggtattatagcagaagtgaatttggccgagcattctacagttattacatttttagattatcatgatggagcagctacattcctcttaataaatcacacaaagaatgaacttgttcaatacaatcaaagttctctcagtgaaatagaagattccctccctcctggtaaagccgtgttttatacatgggctgatccggtgggctctagaaggctgaagtggagatgtagaaaaagccatggtgaagtaacacagaaggatgatatgatgatgcctatagatttgggggaaaagacaatatatttagtttcattctttgaaggtttacaacgcattattttattcactgaagatccaagggtatttaaagtaacatatgaaagtgagaaagcagagttagcagagcaagaaattgcagtggcattacaagatgttggaatttctcttgtcaacaattacacgaagcaagaagtagcctatataggcattacaagttctgatgtggtttgggaaacaaagcccaagaagaaggcaagatggaagccaatgagtgtaaagcacactgagaagttagagagagaatttaaggaatatactgaatcttctccttcagaagataaggttattcagttggacactaatgttccggttcgcctaacccctactggtcataacatgaaaattctgcagccgcatgtaatagctctacgaagaaattatcttccagcattaaaagtggaatataacacatctgcacatcaatcatcatttagaattcagatttacagaatacagatccaaaatcagatacatggtgctgtatttccctttgtgttttatcctgttaaacctccaaagtcggtcaccatggattcagcaccaaagccctttacagatgtcagtattgtcatgagatctgcaggacattcccagatatcacgtattaagtatttcaaagtattgattcaagaaatggatctcaggttagatcttgggtttatctatgctttaacagaccttatgacagaagctgaggtgactgaaaatacagaggttgagctttttcataaagatatagaagctttcaaagaagaatataaaacagcctcattagtagatcaatcacaagtcagcctctatgaatattttcatatatctcctatcaagttacatttaagtgtttcactgagttccggcagagaagaagctaaagattcaaaacaaaatggaggactgattccagttcattctttaaatcttttgctgaagagtattggtgccacactgacagatgtacaagatgtagtttttaagcttgcattttttgaactcaactatcagttccatacaacatccgatctacagtctgaagtcataagacactattcaaaacaggccattaagcagatgtatgtactcattcttggacttgatgttttgggaaatccatttggcttaattagagaattttctgaaggtgtagaagcatttttttatgaaccttaccagggagccatccagggtcctgaagagtttgtggaaggaatggcactaggacttaaggcactagttggtggagctgttggtggattggctggtgctgcctccaaaatcaccggtgctatggctaagggggtagcagctatgaccatggatgaagactaccaacagaagagaagagaagccatgaataagcaaccagctggttttagagaaggcatcactcgtggaggaaaaggcttagtttctggatttgttagtggcataacaggaattgttacaaaaccaatcaaaggagctcaaaaaggaggagcagctggtttctttaaaggtgttgggaaaggtttagtaggagcggtagcaaggccaactggaggcatcatagacatggctagcagtacatttcaggggataaaaagagctacagagacttctgaagtggagagtctgcgacctcctcggttcttcaatgaagatggagttatcagaccgtacaggttgagggatgggactggaaatcaaatgttacaggtcatggaaaatggaagatttgcaaaatacaaatattttacccatgtcatgatcaataagacagatatgctaatgataaccagacgtggtgtattgtttgtaacaaagggaacatttggacaactcacgtgtgagtggcagtatagttttgatgaatttaccaaagagccattcattgttcatgggagaagattgcgcattgaagcaaaggaacgagtgaagtctgtatttcatgccagagagtttggaaaaataattaacttcaagaccccagaggatgccaggtggatcctcacaaagctacaagaagcaagagaaccttctccgagcctctgacagagaacactgcctgaagacacacagcaataagtgattacagctcctagactaccttccaaaacctgtttgggaagcatattacagaaatgatttcaagtaccctgtattctggatgctaaaaaacaaaaacaaacaaaaaaacaaaaacaaaaaaacaaaaccagaatcaggtaaaacagctatgtgattaaaatattttaattcttcagcaattacccggttttctaaattgaatcatgcatctatttataattctaattattttgtaaaagaagacaaaattatgaatcttaagtatttgctccatctttttctctgtaatggtggagaggctgcccataattcatctccacatggagccaagtttaatgtttctagttcacattttgtacttctgtcatgcttatttcaaactccctgagtgatgggtaagaaatcaaacattgcctcagtggtatcaagagaactttggtggtggtttcttcagaatcatgaagttcttctgtcatgcttatttcaaactccctgagtgatgggtaagaaatcaaacattgcctcagtggtatcaagagaactttggtggtggtttcttacccatcactcagggagttt

SEQ ID NO: 404490 - DNA, 2853 bp, Homo sapiens
ccctgtccagcgccccaccgaccggaggtgaccggaccgactagcacctctaggttgagctttttcataaagatatagaagctttcaaagaagaatataaaacagcctcattagtagatcaatcacaagtcagcctctatgaatattttcatatatctcctatcaagttacatttaagtgtttcactgagttccggcagagaagaagctaaagattcaaaacaaaatggaggactgattccagttcattctttaaatcttttgctgaagagtattggtgccacactgacagatgtacaagatgtagtttttaagcttgcattttttgaactcaactatcagttccatacaacatccgatctacagtctgaagtcataagacactattcaaaacaggccattaagcagatgtatgtactcattcttggacttgatgttttgggaaatccatttggcttaattagagaattttctgaaggtgtagaagcatttttttatgaaccttaccagggagccatccagggtcctgaagagtttgtggaaggaatggcactaggacttaaggcactagttggtggagctgttggtggattggctggtgctgcctccaaaatcaccggtgctatggctaagggggtagcagctatgaccatggatgaagactaccaacagaagagaagagaagccatgaataagcaaccagctggttttagagaaggcatcactcgtggaggaaaaggcttagtttctggatttgttagtggcataacaggaattgttacaaaaccaatcaaaggagctcaaaaaggaggagcagctggtttctttaaaggtgttgggaaaggtttagtaggagcggtagcaaggccaactggaggcatcatagacatggctagcagtacatttcaggggataaaaagagctacagagacttctgaagtggagagtctgcgacctcctcggttcttcaatgaagatggagttatcagaccgtacaggttgagggatgggactggaaatcaaatgttacaggtcatggaaaatggaagatttgcaaaatacaaatattttacccatgtcatgatcaataagacagatatgctaatgataaccagacgtggtgtattgtttgtaacaaagggaacatttggacaactcacgtgtgagtggcagtatagttttgatgaatttaccaaagagccattcattgttcatgggagaagattgcgcattgaagcaaaggaacgagtgaagtctgtatttcatgccagagagtttggaaaaataattaacttcaagaccccagaggatgccaggtggatcctcacaaagctacaagaagcaagagaaccttctccgagcctctgacagagaacactgcctgaagacacacagcaataagtgattacagctcctagactaccttccaaaacctgtttgggaagcatattacagaaatgatttcaagtaccctgtattctggatgctaaaaaacaaaaacaaacaaaaaaacaaaaacaaaaaaacaaaaccagaatcaggtaaaacagctatgtgattaaaatattttaattcttcagcaattacccggttttctaaattgaatcatgcatctatttataattctaattattttgtaaaagaagacaaaattatgaatcttaagtatttgctccatctttttctctgtaatggtggagaggctgcccataattcatctccacatggagccaagtttaatgtttctagttcacattttgtacttctgtcatgcttatttcaaactccctgagtgatgggtaagaaatcaaacattgcctcagtggtatcaagagaactttggtggtggtttcttcagaatcatgaagttcttttgccagataaatattttgatattattttcctttttaatataaaggataggtttgaattgtacttaaaatgcatagcattattaaaaacaatcttttaaaatataatttataacatagattgaagcctccccttaagaaaccttaaagaaataagtatcctactcaaaaaaggaagtctgtttcagaactttagggcctttgaaatatttcctcaagcctatttcatgagatctacttggtttacccaagtcatgtttttaatagactgctaatatcaaaggagaatttttaaagccttaacaatgcctactttccattcactgttaacatggaataaacacaattcccaacatcttagatagtgtattatgcttccaacagacagtccctctcatataaagtttatgtaccctaaaatctaacccaataacctgtcccgttgccaatagattgagaatttctggtttgcttactctacagttattcaaatgagagtcacgcttttaaatttacagctcatcacagaaatcatcagctatacattagtaaaaataaggacatgaggttttctttcttggtttttgtccaagatctttgcaccttaatattaatggactgtttcaggtaaaagagaatgaatgtatgattgtgaactgtgaagagaatgatgcaggatcctatttagttactgaataatacagagtattcaatgcatgttgtatgtgccaccaagttactattaactgtttttggaattgaagactctgtatagtcaatagttgtgaaattcttctcaggctccttaaaccctcgctttgttgtaaaagctaaaataaacagcatgctatattgtaattgtatttcttgctgaccaaatctactaaatgctattgatttctctctgattactaaaacacattgtttattctcagtagtttcccccaaaatgcttttttctttgctgaacttaaattgaatca

SEQ ID NO: 404491 - DNA, 10190 bp, Homo sapiens
  misc_feature (3872)..(3872): n is a, c, g, or t
  misc_feature (4285)..(4285): n is a, c, g, or t
cgcggccgcgcagccgcctttcctccctctcagggctgcgcgcccaggtctgcgccgcgctccgcctccagccgcgcgcagacttgcgcacgcgtcgtgagagcgaccgcctccgtctctcgctgggctcgctagggctgcgcgttgggccagcgggggcgccgcagctgaagccgccccggagccggtgaaccgaattacctcgagggaggggcgtggggaaggcggcgggaggaggagcgcacgggccggctgccgtgcccaccacggctgaggaacatggttttcgagtcggtggtcgtggacgtgttgaaccggttcttgggggactatgtggtggacttggacacgtcccagctctctctgggcatctggaaaggagctgtggccctcaagaatcttcaaattaaagaaaatgccctgagtcaactggatgtaccatttaaagttaaagttggtcacataggtaatcttaaacttataattccatggaaaaacctttatactcaacctgttgaagccgtattggaagaaatttatttacttatagtgccttcttctagaataaaatatgatcctttaaaagaagagaaacaactcatggaagcaaagcaacaggaactgaaaagaatagaagaagcaaaacaaaaagtagttgatcaagaacaacatctgccggaaaaacaggacacttttgcagaaaaattagttacacagatcataaaaaatcttcaggtgaaaatttccagtatccatattcgttatgaagatgatatcacaaatcgggacaaaccgctgtcatttggtatttcccttcaaaatctgagcatgcagacaactgatcaatactgggttccatgtttacatgatgaaactgagaaactggttcgtaagttaatccgattggataacctgtttgcctattggaatgtgaagtctcagatgttttatcttagtgattatgataactccttggacgacttgaagaatggcattgtcaatgaaaatattgttccagaaggttatgattttgtatttcgtcccatatctgctaatgccaaacttgtgatgaatcgccgatctgattttgacttttctgcccccaaaataaacttggaaattgagttacataacatagcaattgaatttaataaaccacagtatttcagtattatggagcttcttgaatcagttgatatgatggcacaaaatctgccatataggaagttcaaacctgatgtgcctcttcaccaccatgccagagaatggtgggcttatgctatacatggcgttcttgaagtaaatgtttgccccaggttatggatgtggtcatggaagcatattagaaaacataggcaaaaagtgaagcaatataaagaactgtataaaaaaaagttaacaagtaagaagccacctggtgaacttctcgtgtctttggaggagttggaaaaaaccttggatgtctttaatataactatagctagacagacggcagaagttgaggtaaagaaagctggatacaaaatttacaaagaaggagtaaaagatccagaggataataaagggtggtttagctggctatggtcttggtcagaacaaaatactaatgaacagcaaccagatgttcaacctgaaactcttgaagaaatgttgacacctgaagaaaaagctttactctatgaagcaattggctatagtgaaacagcagttgatccaactttactaaaaacatttgaagccttgaagttttttgtccacttgaaaagtatgtctattgttctaagagaaaatcatcaaaaacctgagctggtagatattgtaatagaagaatttagcaccttaattgtgcaaagaccaggagcacaagcaataaaatttgaaactaaaatagattcatttcatattactggcttaccagataattcagaaaaaccccgcctcctgtcttcattggatgatgcaatgtcacttttccaaattacatttgagataaatccattagatgaaactgtttctcagaggtgtatcatagaagctgaacctttagaaatcatatatgatgcaaggacagtgaatagtatagtggaattcttcagacctccaaaagaggtacatctagcacagctcactgcagcaactttgacaaaactggaagaatttcgcagtaagacagcaacaggtctactgtatattattgaaacacagaaagttcttgatctcaaaattaatttgaaggcttcatatattattgtcccacaagatggaatttttagtcctacatcaaatctgcttcttttggaccttggtcatctaaaggtgacgagtaaaagtcgttctgaattaccagatgtgaaacaaggtgaggccaatcttaaagagataatggatagagcttatgattcatttgatattcaacttacaagtgtacagctgctttacagtagagttggtgataattggagagaagcacgaaaactcagtgtatctacccagcatattttggtacccatgcacttcaatttggaactgtctaaggccatggttttcatggatgtaaggatgcccaaattcaagatttatggaaagttacctcttatttctttacgaatctcagataaaaaactacaagggattatggaattgattgaaagcattccaaaacctgaaccagtaactgaagtatctgcccctgtcaaatcattccagattcaaacatctacttctttgggaacatcacagatttcacagaaaataattcctctcttggaacttccatctgtttctgaagatgattcagaggaggaattttttgatgcaccatgtagtcccttggaagaacctcttcagtttccaactggagttaaaagtattcgaaccagaaagttacaaaagcaggattgttcagtaaatatgactacatttaaaataagatttgaagtaccaaaggttttgatcgagttttatcaccttgttggagattgtgaactatctgtggtagaaattcttgttttaggattgggtgcagaaattgagattagaacatacgatttgaaagcaaatgcctttttgaaagagttctgcttaaaatgcccagaatacttggatgaaaacaagaaaccagtttatttggttacaaccctggataacacaatggaagacctgttaacgctggaatatgtaaaggctgaaaagaatgtacccgacttgaaaagtacctataacaatgttttacaattgattaaggtaaatttttcctctttggatattcatttacacactgaagcacttctgaatacaataaattatcttcataatatccttccgcaatcagaggaaaaatcagccccagtgtccactacagagactgaagacaaaggagatgtcattaaaaaattagctttaaaactatccacaaatgaagatatcattactttgcagattttagcagaattatcgtgtttacagatctttattcaagatcagaaatgtaacatttctgaaattaagattgaagggcttgattctgagatgattatgaggccttcagaaactgaaataaacgcaaagctaaggaatataattgttttagattctgatataacagctatatacaaaaaggctgtttatatcactggaaaagaagttttcagcttcaaaatggtttcttacatggatgcaactgctggttctgcatacacagatatgaatgtggttgacattcaggttaatttaatagttggttgcattgaagtagtttttgtcacgaaatttctatattctatattggcttttatagataattttcaggcagctaaacaagccttggctgaggcaactgttcaggcagctggaatggctgctactggtgtaanagaactcgcacaaaggagttccagaatggcactggatattaacatcaaagccccagttgtggtcatcccgcagtctccagtttctgaaaatgtttttgttgctgattttggactaattacaatgacaaatacctttcatatgataacagagagccagagctctcccccacctgttattgatttgataacaataaagctgagtgaaatgcgactatacagatctcgatttattaatgatgcataccaggaagtactggatctactcctgccattaaatcttgaggttgtggttgaacgaaatttatgctgggagtggtaccaggaagttccttgttttaatgtaaatgctcagctgaaaccaatggaggtagaatccatacagaatgtcctggtgatgctgccaacaatctgcnagtgcccagctgccttttgaggccaaccctctaggttcattcttagtcaagaagatataacaactatttttaaaacattgcatggcaatatatggtatgaaaaagatggtagtgcctcacctgctgtaacaaaagaccaatacagtgccactagtggagttactactaatgcttcacaccattcaggaggagcaactgtggtgacagctgctgtggtagaagtacattcacgtgccttactagttaagacaacactaaacataagcttcaaaactgatgatctcaccatggtgctgtatagtccaggtcctaaacaggcttcctttacagatgttcgtgatccttctctgaaacttgctgaatttaaattggagaatattataagtactttaaaaatgtatacagatggctcaacattttcttccttctcattaaaaaactgtattttagatgataaaagacctcatgtcaagaaagcaactcctcgaatgataggactgacagttggttttgacaaaaaagacatgatggatataaagtacaggaaagtcagagatggttgtgtgactgatgcggtctttcaagaaatgtatatttgtgcaagcgtagaatttctgcagactgttgcaaatgtctttcttgaggcctacaccacaggcactgctgtagaaaccagtgtgcaaacatggactgctaaggaagaagtacctacacaggaatcagtgaagtgggaaattaatgttattattaaaaatcctgaaattgtgtttgtagctgacatgacaaaaaatgatgctcctgctttagtcattacaacacaatgtgaaatttgctataaaggtaaccttgaaaatagtacaatgactgctgccattaaagatctccaagtgagagcctgcccgtttcttccagtcaagagaaaaggcaaaatcactactgttttgcagccctgtgacttgttttatcaaactactcagaaaggtacagatccacaagtgatcgatatgtcagtaaaatccctgacactaaaggtttcaccagttattataaatactatgattaccataacttcagcactgtatacaactaaggaaaccatcccagaagaaacggcttcttctactgcacatttatgggaaaagaaggatacaaagactttaaaaatgtggtttcttgaagaatcaaatgaaactgaaaaaatagctcccacaactgaattggtacccaaaggcgagatgataaaaatgaacattgattctatttttatagttcttgaggctggaattggtcatagaacagtacctatgcttctggcaaagtcacgtttttcaggggaaggcaaaaactggagttccctaataaatctgcactgtcagcttgagctagaagtgcattattataatgaaatgtttggtgtatgggagcctttgcttgaacccttagaaattgatcagactgaggattttagaccatggaatcttggtatcaagatgaaaaagaaagcaaaaatggccattgttgagtcagatcctgaagaagaaaactacaaagtgccagaatataaaactgtcatcagtttccattcaaaagaccaattaaacattacattatccaaatgtggtcttgtaatgttaaacaatttagtcaaggcatttacagaagctgccactggatcttcagctgacttcgtaaaggatctagcaccatttatgattttaaattcccttggacttactatttctgtttcgccaagtgattcttttagtgtactcaacattcctatggcaaaatcatatgtattgaaaaatggagaaagtttaagtatggattatatccgaaccaaggacaatgatcatttcaatgcaatgaccagcctaagcagcaaactcttcttcattcttcttacacctgttaaccattctactgctgataagattcctttaacaaaagtgggacgacgtctgtacactgtaagacacagagagtctggcgttgaaagatctattgtttgtcaaattgatacagtagaaggaagtaagaaggtcacaattcgctccccagtgcagataagaaatcatttttcagtcccactgtctgtttacgaaggggataccttattgggaactgcctcacctgaaaatgaattcaacataccattaggatcttaccgatcattcatttttctgaagccagaagatgagaactatcaaatgtgtgaaggaattgactttgaagagattataaaaaatgatggtgctcttctaaagaagaaatgtagatctaaaaacccttctaaggaatcatttctcattaatattgttccagaaaaagataatttaacatctctatcagtgtattcagaagatggttgggatttaccatacataatgcatttgtggccacctatcctgctccgaaatcttcttccttacaaaattgcttattatatagagggaattgaaaattcggtttttactctaagtgaaggacattcagcccagatttgtactgcacagttgggtaaagccaggctacatttaaaattacttgactatctcaatcacgattggaaaagtgaatatcacataaagcctaatcagcaagacattagttttgtcagttttacttgtgttacagaaatggaaaagactgatttagatattgctgtccatatgacttacaatactggtcagacagttgtggcatttcatagtccttattggatggtcaataaaactggccgcatgttacagtacaaagcagacggaattcatcgaaagcatccacctaattataaaaagccagttctcttttcttttcagccaaatcacttttttaataacaataaggttcaacttatggtaactgatagtgagttgtccaatcagttttcaattgatactgttggtagtcatggagctgttaaatgtaaaggcctgaaaatggactatcaagttggtgtcactatagacctgagcagttttaacattactagaattgtgacatttacccctttttatatgattaaaaacaaaagcaaataccatatatcagtggctgaagaaggaaatgataaatggctctctcttgatttggagcagtgtatccccttttggcctgagtatgcttctagtaaacttcttattcaagtcgaaaggagtgaagatcctcccaaaaggatatattttaacaagcaggaaaattgtattctattgcgtctagataacgagcttggaggtattatagcagaagtgaatttggccgagcattctacagttattacatttttagattatcatgatggagcagctacattcctcttaataaatcacacaaagaatgaacttgttcaatacaatcaaagttctctcagtgaaatagaagattccctccctcctggtaaagccgtgttttatacatgggctgatccggtgggctctagaaggctgaagtggagatgtagaaaaagccatggtgaagtaacacagaaggatgatatgatgatgcctatagatttgggggaaaagacaatatatttagtttcattctttgaaggtttacaacgcattattttattcactgaagatccaagggtatttaaagtaacatatgaaagtgagaaagcagagttagcagagcaagaaattgcagtggcattacaagatgttggaatttctcttgtcaacaattacacgaagcaagaagtagcctatataggcattacaagttctgatgtggtttgggaaacaaagcccaagaagaaggcaagatggaagccaatgagtgtaaagcacactgagaagttagagagagaatttaaggaatatactgaatcttctccttcagaagataaggttattcagttggacactaatgttccggttcgcctaacccctactggtcataacatgaaaattctgcagccgcatgtaatagctctacgaagaaattatcttccagcattaaaagtggaatataacacatctgcacatcaatcatcatttagaattcagatttacagaatacagatccaaaatcagatacatggtgctgtatttccctttgtgttttatcctgttaaacctccaaagtcggtcaccatggattcagcaccaaagccctttacagatgtcagtattgtcatgagatctgcaggacattcccagatatcacgtattaagtatttcaaagtattgattcaagaaatggatctcaggttagatcttgggtttatctatgctttaacagaccttatgacagaagctgaggtgactgaaaatacagaggttgagctttttcataaagatatagaagctttcaaagaagaatataaaacagcctcattagtagatcaatcacaagtcagcctctatgaatattttcatatatctcctatcaagttacatttaagtgtttcactgagttccggcagagaagaagctaaagattcaaaacaaaatggaggactgattccagttcattctttaaatcttttgctgaagagtattggtgccacactgacagatgtacaagatgtagtttttaagcttgcattttttgaactcaactatcagttccatacaacatccgatctacagtctgaagtcataagacactattcaaaacaggccattaagcagatgtatgtactcattcttggacttgatgttttgggaaatccatttggcttaattagagaattttctgaaggtgtagaagcatttttttatgaaccttaccagggagccatccagggtcctgaagagtttgtggaaggaatggcactaggacttaaggcactagttggtggagctgttggtggattggctggtgctgcctccaaaatcaccggtgctatggctaagggggtagcagctatgaccatggatgaagactaccaacagaagagaagagaagccatgaataagcaaccagctggttttagagaaggcatcactcgtggaggaaaaggcttagtttctggatttgttagtggcataacaggaattgttacaaaaccaatcaaaggagctcaaaaaggaggagcagctggtttctttaaaggtgttgggaaaggtttagtaggagcggtagcaaggccaactggaggcatcatagacatggctagcagtacatttcaggggataaaaagagctacagagacttctgaagtggagagtctgcgacctcctcggttcttcaatgaagatggagttatcagaccgtacaggttgagggatgggactggaaatcaaatgttacaggcatcaaaaagtttgatatgaaaagttaatgcatgactttgcaagtgaaagccaacagtagattttagtcttaaaatttacaaactacgtacagctgtttcagtattttgaatacaaagaaaaccttttgtattggtaacttttaataggaattttaatgaatctggtttttttatagggtgttcttagttctgcactggatttgctagatttgttggaagcctttgtaccttatgtatcctcgtcattggtggtacttacttaaccaattaaaccatttctgttgtggggttattaaaccactggtagcttttataccagatatataatccttatatccaattacacatgaagaaggaaaagcaaaactcaggaacactgctattgtgaattactcttggattcttgtgctttgcctttgaaaatgcttaaatggccatgaccctcttcctgctttattctagtgtagtctttataaaacttgtgggatttgataagcagttcacatgcaaaccagtatcttttaataatacaaagtagcatctggaacaatagacagtttgaagttagaatctgcttagacaactttcttacttggtaaattcgactttttaaaacctggattatgctgtaggtaacta

SEQ ID NO: 404492 - DNA, 2257 bp, Homo sapiens
cttttaaaatgtgtttgcatgggtatgtgtgtgtatgattcctgtgtccttcattgtgtctgaatgttgacagctgagttgttgtcctgtgggtgtagtatagtgtgttcttaaacatttcaggtatttttgaatttatctatgttgtctttgaatcttttacagggattctataactgccgtcatgtaagttgttacagaagggaggctgtttttgtgtcttgtatatttcttttctttcagaaattacagatgtttataattagcttcaaacactgccttaatagcaattggaagataactgccgtcagccgacgtggtctttccctttacttcaggaggagaatgactactaatctggaagaaaggtcttactatagcagtcagatcaccagagtagtgccgaacacttcctggcttcatctgaaaatttgagtcatggaaaatggaagatttgcaaaatacaaatattttacccatgtcatgatcaataagacagatatgctaatgataaccagacgtggtgtattgtttgtaacaaagggaacatttggacaactcacgtgtgagtggcagtatagttttgatgaatttaccaaagagccattcattgttcatgggagaagattgcgcattgaagcaaaggaacgagtgaagtctgtatttcatgccagagagtttggaaaaataattaacttcaagaccccagaggatgccaggtggatcctcacaaagctacaagaagcaagagaaccttctccgagcctctgacagagaacactgcctgaagacacacagcaataagtgattacagctcctagactaccttccaaaacctgtttgggaagcatattacagaaatgatttcaagtaccctgtattctggatgctaaaaaacaaaaacaaacaaaaaaacaaaaacaaaaaaacaaaaccagaatcaggtaaaacagctatgtgattaaaatattttaattcttcagcaattacccggttttctaaattgaatcatgcatctatttataattctaattattttgtaaaagaagacaaaattatgaatcttaagtatttgctccatctttttctctgtaatggtggagaggctgcccataattcatctccacatggagccaagtttaatgtttctagttcacattttgtacttctgtcatgcttatttcaaactccctgagtgatgggtaagaaatcaaacattgcctcagtggtatcaagagaactttggtggtggtttcttcagaatcatgaagttcttttgccagataaatattttgatattattttcctttttaatataaaggataggtttgaattgtacttaaaatgcatagcattattaaaaacaatcttttaaaatataatttataacatagattgaagcctccccttaagaaaccttaaagaaataagtatcctactcaaaaaaggaagtctgtttcagaactttagggcctttgaaatatttcctcaagcctatttcatgagatctacttggtttacccaagtcatgtttttaatagactgctaatatcaaaggagaatttttaaagccttaacaatgcctactttccattcactgttaacatggaataaacacaattcccaacatcttagatagtgtattatgcttccaacagacagtccctctcatataaagtttatgtaccctaaaatctaacccaataacctgtcccgttgccaatagattgagaatttctggtttgcttactctacagttattcaaatgagagtcacgcttttaaatttacagctcatcacagaaatcatcagctatacattagtaaaaataaggacatgaggttttctttcttggtttttgtccaagatctttgcaccttaatattaatggactgtttcaggtaaaagagaatgaatgtatgattgtgaactgtgaagagaatgatgcaggatcctatttagttactgaataatacagagtattcaatgcatgttgtatgtgccaccaagttactattaactgtttttggaattgaagactctgtatagtcaatagttgtgaaattcttctcaggctccttaaaccctcgctttgttgtaaaagctaaaataaacagcatgctatattgtaattgtatttcttgctgaccaaatctactaaatgctattgatttctctctgattactaaaacacattgtttattctcagtagtttcccccaaaatgcttttttctttgctgaacttaaattgaatca

SEQ ID NO: 404493 - DNA, 1883 bp, Homo sapiens
ttaatcaaagctctagtgtattattagcaaacacttaaaaaatatgtaaataccagtactgtggaaaataattagatgacacataaactggatttaaaatccatctcatctgcctagattttatgtaagtgatataatgaaggtgccttaaaatatttgatactttcaaatgtttctcatgttattttcttattttctaaaaaagatgtattcactaaattatatacactcatataataattaaatataaaatacattcttttattgtgtacctttctatctagaaggtagcacattattacagtgtttcctgctggtcaaagttgcctattagagaaatagaatggtaattttaatatattcacaaaataccttattgatatcatcaaaccaatttatacattgagtttgtaccaactagtggaattgtcttaggtctattaagttatggaatattatatccataattacagtctgagtcatagctgaaaaaatctgctttaaaattattctcactctttgaacatttcataatcttacatgttttcaagcaatttgccatactctactaacctttgtgcttcttttttcctttgccatgcttacagaaaattcaattctacagggagtggattatgactcacagtagcagtagtgatgatgatgatgatgatgatgatgatgatgagtcagatctaaaccattaaaattcatatgttctttattttacttggaatgtttcattaacatgttttgtatgacttataccataatgcccatatgtccatttatagggaggtaaaacacattttcttttaaaatgttttcctacacattttcataaagcaaaataattgtattatttaagcacagaaaaaaatgtatcttacatccaaagtagggagggcatccaacatattatagatttgcttttatatattttatagctttgtattgcatagtttgtctttaagagttcaagttagacttaaatataattttgatgttcactggttttattttaaattgccttcttatttgttagcaaaatgcctttttttaatggtctctgtaaattttctgggctttaatgtaatgccactgtgtaaaaaaaaaggaagaaaatagtaatagccatttaatgttttatatttatcattttaaagatatttttgtcaaatttcttttaataataataaacatatgtaatctaaaggagtgtgaatttgttgttctatccccaaatcatatagattgaactgctattataaaaacagtcatggcctctcatggaagagtagatagtaaaataatcgttttgtttcacatattttttgtgaaacaatgaacaaagttggttttaatagtcattatattcacttattaatttgtatatgcatctactatatttctattatgaattcagaatatttggaaacttctatcgtaaacataactatatatattttttctgtgtaatattagggaaaatgttacatatatctctgaaagatccattagtaaatctattttatgttttgtgtaataaaggtttttaaaaaaatttcaacatagatgaaactgtcctatttctctaacatatcagacgtactttaaaaaattctctaaaaagtatatgatctttggtagttagaatgtttaatccctatgactgctgtgcttttggatcaacaaaggaatatttatcttgactacagcagaagctcagtataagcaacaggtgatttaatttaactgattcagcacatgatttctgagtctcctctaattcttaggtttatcaagttttatttctataaatcattctctatgttttttgaaagtgactactttaaatttgaaaatattgagattactgcaaa

SEQ ID NO: 404494 - DNA, 322 bp, Homo sapiens
acttggttcttctaggcatcataaaaaagtattgtaaattttcagttgtgttttccttctagggatttgttagtggcataacaggaattgttacaaaaccaatcaaaggcaagtatagtagttcctttgcaagtctttctaagttgattctgttttcattcttggatgcaattgtcaaaaactcttttttctttccaggagctcaaaaaggaggagcagctggtttctttaaaggtgttgggaaaggtttagtaggagcggtagcaaggccaactggaggcatcatagacatggctagcagtacatttcaggggataaaaag

SEQ ID NO: 404495 - DNA, 267 bp, Homo sapiens
gttaattcagtatttaatttctcataatatatatttaatatttcttgacgtagtatgtttgaaagtgttttgtatagacttattaatttttttccatttaggtttcaccagttattataaatactatgattaccataacttcagcactgtatacaactaaggaaaccatcccagaagaaacggcttcttctactgcacatttatgggaaaagaaggatacaaagactttaaaaatgtggtttcttgaagaatcaaatgaaactgaaa

SEQ ID NO: 404496 - DNA, 11290 bp, Homo sapiens
  misc_feature (3872)..(3872): n is a, c, g, or t
cgcggccgcgcagccgcctttcctccctctcagggctgcgcgcccaggtctgcgccgcgctccgcctccagccgcgcgcagacttgcgcacgcgtcgtgagagcgaccgcctccgtctctcgctgggctcgctagggctgcgcgttgggccagcgggggcgccgcagctgaagccgccccggagccggtgaaccgaattacctcgagggaggggcgtggggaaggcggcgggaggaggagcgcacgggccggctgccgtgcccaccacggctgaggaacatggttttcgagtcggtggtcgtggacgtgttgaaccggttcttgggggactatgtggtggacttggacacgtcccagctctctctgggcatctggaaaggagctgtggccctcaagaatcttcaaattaaagaaaatgccctgagtcaactggatgtaccatttaaagttaaagttggtcacataggtaatcttaaacttataattccatggaaaaacctttatactcaacctgttgaagccgtattggaagaaatttatttacttatagtgccttcttctagaataaaatatgatcctttaaaagaagagaaacaactcatggaagcaaagcaacaggaactgaaaagaatagaagaagcaaaacaaaaagtagttgatcaagaacaacatctgccggaaaaacaggacacttttgcagaaaaattagttacacagatcataaaaaatcttcaggtgaaaatttccagtatccatattcgttatgaagatgatatcacaaatcgggacaaaccgctgtcatttggtatttcccttcaaaatctgagcatgcagacaactgatcaatactgggttccatgtttacatgatgaaactgagaaactggttcgtaagttaatccgattggataacctgtttgcctattggaatgtgaagtctcagatgttttatcttagtgattatgataactccttggacgacttgaagaatggcattgtcaatgaaaatattgttccagaaggttatgattttgtatttcgtcccatatctgctaatgccaaacttgtgatgaatcgccgatctgattttgacttttctgcccccaaaataaacttggaaattgagttacataacatagcaattgaatttaataaaccacagtatttcagtattatggagcttcttgaatcagttgatatgatggcacaaaatctgccatataggaagttcaaacctgatgtgcctcttcaccaccatgccagagaatggtgggcttatgctatacatggcgttcttgaagtaaatgtttgccccaggttatggatgtggtcatggaagcatattagaaaacataggcaaaaagtgaagcaatataaagaactgtataaaaaaaagttaacaagtaagaagccacctggtgaacttctcgtgtctttggaggagttggaaaaaaccttggatgtctttaatataactatagctagacagacggcagaagttgaggtaaagaaagctggatacaaaatttacaaagaaggagtaaaagatccagaggataataaagggtggtttagctggctatggtcttggtcagaacaaaatactaatgaacagcaaccagatgttcaacctgaaactcttgaagaaatgttgacacctgaagaaaaagctttactctatgaagcaattggctatagtgaaacagcagttgatccaactttactaaaaacatttgaagccttgaagttttttgtccacttgaaaagtatgtctattgttctaagagaaaatcatcaaaaacctgagctggtagatattgtaatagaagaatttagcaccttaattgtgcaaagaccaggagcacaagcaataaaatttgaaactaaaatagattcatttcatattactggcttaccagataattcagaaaaaccccgcctcctgtcttcattggatgatgcaatgtcacttttccaaattacatttgagataaatccattagatgaaactgtttctcagaggtgtatcatagaagctgaacctttagaaatcatatatgatgcaaggacagtgaatagtatagtggaattcttcagacctccaaaagaggtacatctagcacagctcactgcagcaactttgacaaaactggaagaatttcgcagtaagacagcaacaggtctactgtatattattgaaacacagaaagttcttgatctcaaaattaatttgaaggcttcatatattattgtcccacaagatggaatttttagtcctacatcaaatctgcttcttttggaccttggtcatctaaaggtgacgagtaaaagtcgttctgaattaccagatgtgaaacaaggtgaggccaatcttaaagagataatggatagagcttatgattcatttgatattcaacttacaagtgtacagctgctttacagtagagttggtgataattggagagaagcacgaaaactcagtgtatctacccagcatattttggtacccatgcacttcaatttggaactgtctaaggccatggttttcatggatgtaaggatgcccaaattcaagatttatggaaagttacctcttatttctttacgaatctcagataaaaaactacaagggattatggaattgattgaaagcattccaaaacctgaaccagtaactgaagtatctgcccctgtcaaatcattccagattcaaacatctacttctttgggaacatcacagatttcacagaaaataattcctctcttggaacttccatctgtttctgaagatgattcagaggaggaattttttgatgcaccatgtagtcccttggaagaacctcttcagtttccaactggagttaaaagtattcgaaccagaaagttacaaaagcaggattgttcagtaaatatgactacatttaaaataagatttgaagtaccaaaggttttgatcgagttttatcaccttgttggagattgtgaactatctgtggtagaaattcttgttttaggattgggtgcagaaattgagattagaacatacgatttgaaagcaaatgcctttttgaaagagttctgcttaaaatgcccagaatacttggatgaaaacaagaaaccagtttatttggttacaaccctggataacacaatggaagacctgttaacgctggaatatgtaaaggctgaaaagaatgtacccgacttgaaaagtacctataacaatgttttacaattgattaaggtaaatttttcctctttggatattcatttacacactgaagcacttctgaatacaataaattatcttcataatatccttccgcaatcagaggaaaaatcagccccagtgtccactacagagactgaagacaaaggagatgtcattaaaaaattagctttaaaactatccacaaatgaagatatcattactttgcagattttagcagaattatcgtgtttacagatctttattcaagatcagaaatgtaacatttctgaaattaagattgaagggcttgattctgagatgattatgaggccttcagaaactgaaataaacgcaaagctaaggaatataattgttttagattctgatataacagctatatacaaaaaggctgtttatatcactggaaaagaagttttcagcttcaaaatggtttcttacatggatgcaactgctggttctgcatacacagatatgaatgtggttgacattcaggttaatttaatagttggttgcattgaagtagtttttgtcacgaaatttctatattctatattggcttttatagataattttcaggcagctaaacaagccttggctgaggcaactgttcaggcagctggaatggctgctactggtgtaanagaactcgcacaaaggagttccagaatggcactggatattaacatcaaagccccagttgtggtcatcccgcagtctccagtttctgaaaatgtttttgttgctgattttggactaattacaatgacaaatacctttcatatgataacagagagccagagctctcccccacctgttattgatttgataacaataaagctgagtgaaatgcgactatacagatctcgatttattaatgatgcataccaggaagtactggatctactcctgccattaaatcttgaggttgtggttgaacgaaatttatgctgggagtggtaccaggaagttccttgttttaatgtaaatgctcagctgaaaccaatggagttcattcttagtcaagaagatataacaactatttttaaaacattgcatggcaatatatggtatgaaaaagatggtagtgcctcacctgctgtaacaaaagaccaatacagtgccactagtggagttactactaatgcttcacaccattcaggaggagcaactgtggtgacagctgctgtggtagaagtacattcacgtgccttactagttaagacaacactaaacataagcttcaaaactgatgatctcaccatggtgctgtatagtccaggtcctaaacaggcttcctttacagatgttcgtgatccttctctgaaacttgctgaatttaaattggagaatattataagtactttaaaaatgtatacagatggctcaacattttcttccttctcattaaaaaactgtattttagatgataaaagacctcatgtcaagaaagcaactcctcgaatgataggactgacagttggttttgacaaaaaagacatgatggatataaagtacaggaaagtcagagatggttgtgtgactgatgcggtctttcaagaaatgtatatttgtgcaagcgtagaatttctgcagactgttgcaaatgtctttcttgaggcctacaccacaggcactgctgtagaaaccagtgtgcaaacatggactgctaaggaagaagtacctacacaggaatcagtgaagtgggaaattaatgttattattaaaaatcctgaaattgtgtttgtagctgacatgacaaaaaatgatgctcctgctttagtcattacaacacaatgtgaaatttgctataaaggtaaccttgaaaatagtacaatgactgctgccattaaagatctccaagtgagagcctgcccgtttcttccagtcaagagaaaaggcaaaatcactactgttttgcagccctgtgacttgttttatcaaactactcagaaaggtacagatccacaagtgatcgatatgtcagtaaaatccctgacactaaaggtttcaccagttattataaatactatgattaccataacttcagcactgtatacaactaaggaaaccatcccagaagaaacggcttcttctactgcacatttatgggaaaagaaggatacaaagactttaaaaatgtggtttcttgaagaatcaaatgaaactgaaaaaatagctcccacaactgaattggtacccaaaggcgagatgataaaaatgaacattgattctatttttatagttcttgaggctggaattggtcatagaacagtacctatgcttctggcaaagtcacgtttttcaggggaaggcaaaaactggagttccctaataaatctgcactgtcagcttgagctagaagtgcattattataatgaaatgtttggtgtatgggagcctttgcttgaacccttagaaattgatcagactgaggattttagaccatggaatcttggtatcaagatgaaaaagaaagcaaaaatggccattgttgagtcagatcctgaagaagaaaactacaaagtgccagaatataaaactgtcatcagtttccattcaaaagaccaattaaacattacattatccaaatgtggtcttgtaatgttaaacaatttagtcaaggcatttacagaagctgccactggatcttcagctgacttcgtaaaggatctagcaccatttatgattttaaattcccttggacttactatttctgtttcgccaagtgattcttttagtgtactcaacattcctatggcaaaatcatatgtattgaaaaatggagaaagtttaagtatggattatatccgaaccaaggacaatgatcatttcaatgcaatgaccagcctaagcagcaaactcttcttcattcttcttacacctgttaaccattctactgctgataagattcctttaacaaaagtgggacgacgtctgtacactgtaagacacagagagtctggcgttgaaagatctattgtttgtcaaattgatacagtagaaggaagtaagaaggtcacaattcgctccccagtgcagataagaaatcatttttcagtcccactgtctgtttacgaaggggataccttattgggaactgcctcacctgaaaatgaattcaacataccattaggatcttaccgatcattcatttttctgaagccagaagatgagaactatcaaatgtgtgaaggaattgactttgaagagattataaaaaatgatggtgctcttctaaagaagaaatgtagatctaaaaacccttctaaggaatcatttctcattaatattgttccagaaaaagataatttaacatctctatcagtgtattcagaagatggttgggatttaccatacataatgcatttgtggccacctatcctgctccgaaatcttcttccttacaaaattgcttattatatagagggaattgaaaattcggtttttactctaagtgaaggacattcagcccagatttgtactgcacagttgggtaaagccaggctacatttaaaattacttgactatctcaatcacgattggaaaagtgaatatcacataaagcctaatcagcaagacattagttttgtcagttttacttgtgttacagaaatggaaaagactgatttagatattgctgtccatatgacttacaatactggtcagacagttgtggcatttcatagtccttattggatggtcaataaaactggccgcatgttacagtacaaagcagacggaattcatcgaaagcatccacctaattataaaaagccagttctcttttcttttcagccaaatcacttttttaataacaataaggttcaacttatggtaactgatagtgagttgtccaatcagttttcaattgatactgttggtagtcatggagctgttaaatgtaaaggcctgaaaatggactatcaagttggtgtcactatagacctgagcagttttaacattactagaattgtgacatttacccctttttatatgattaaaaacaaaagcaaataccatatatcagtggctgaagaaggaaatgataaatggctctctcttgatttggagcagtgtatccccttttggcctgagtatgcttctagtaaacttcttattcaagtcgaaaggagtgaagatcctcccaaaaggatatattttaacaagcaggaaaattgtattctattgcgtctagataacgagcttggaggtattatagcagaagtgaatttggccgagcattctacagttattacatttttagattatcatgatggagcagctacattcctcttaataaatcacacaaagaatgaacttgttcaatacaatcaaagttctctcagtgaaatagaagattccctccctcctggtaaagccgtgttttatacatgggctgatccggtgggctctagaaggctgaagtggagatgtagaaaaagccatggtgaagtaacacagaaggatgatatgatgatgcctatagatttgggggaaaagacaatatatttagtttcattctttgaaggtttacaacgcattattttattcactgaagatccaagggtatttaaagtaacatatgaaagtgagaaagcagagttagcagagcaagaaattgcagtggcattacaagatgttggaatttctcttgtcaacaattacacgaagcaagaagtagcctatataggcattacaagttctgatgtggtttgggaaacaaagcccaagaagaaggcaagatggaagccaatgagtgtaaagcacactgagaagttagagagagaatttaaggaatatactgaatcttctccttcagaagataaggttattcagttggacactaatgttccggttcgcctaacccctactggtcataacatgaaaattctgcagccgcatgtaatagctctacgaagaaattatcttccagcattaaaagtggaatataacacatctgcacatcaatcatcatttagaattcagatttacagaatacagatccaaaatcagatacatggtgctgtatttccctttgtgttttatcctgttaaacctccaaagtcggtcaccatggattcagcaccaaagccctttacagatgtcagtattgtcatgagatctgcaggacattcccagatatcacgtattaagtatttcaaagtattgattcaagaaatggatctcaggttagatcttgggtttatctatgctttaacagaccttatgacagaagctgaggtgactgaaaatacagaggttgagctttttcataaagatatagaagctttcaaagaagaatataaaacagcctcattagtagatcaatcacaagtcagcctctatgaatattttcatatatctcctatcaagttacatttaagtgtttcactgagttccggcagagaagaagctaaagattcaaaacaaaatggaggactgattccagttcattctttaaatcttttgctgaagagtattggtgccacactgacagatgtacaagatgtagtttttaagcttgcattttttgaactcaactatcagttccatacaacatccgatctacagtctgaagtcataagacactattcaaaacaggccattaagcagatgtatgtactcattcttggacttgatgttttgggaaatccatttggcttaattagagaattttctgaaggtgtagaagcatttttttatgaaccttaccagggagccatccagggtcctgaagagtttgtggaaggaatggcactaggacttaaggcactagttggtggagctgttggtggattggctggtgctgcctccaaaatcaccggtgctatggctaagggggtagcagctatgaccatggatgaagactaccaacagaagagaagagaagccatgaataagcaaccagctggttttagagaaggcatcactcgtggaggaaaaggcttagtttctggatttgttagtggcataacaggaattgttacaaaaccaatcaaaggagctcaaaaaggaggagcagctggtttctttaaaggtgttgggaaaggtttagtaggagcggtagcaaggccaactggaggcatcatagacatggctagcagtacatttcaggggataaaaagagctacagagacttctgaagtggagagtctgcgacctcctcggttcttcaatgaagatggagttatcagaccgtacaggttgagggatgggactggaaatcaaatgttacaggtcatggaaaatggaagatttgcaaaatacaaatattttacccatgtcatgatcaataagacagatatgctaatgataaccagacgtggtgtattgtttgtaacaaagggaacatttggacaactcacgtgtgagtggcagtatagttttgatgaatttaccaaagagccattcattgttcatgggagaagattgcgcattgaagcaaaggaacgagtgaagtctgtatttcatgccagagagtttggaaaaataattaacttcaagaccccagaggatgccaggtggatcctcacaaagctacaagaagcaagagaaccttctccgagcctctgacagagaacactgcctgaagacacacagcaataagtgattacagctcctagactaccttccaaaacctgtttgggaagcatattacagaaatgatttcaagtaccctgtattctggatgctaaaaaacaaaaacaaacaaaaaaacaaaaacaaaaaaacaaaaccagaatcaggtaaaacagctatgtgattaaaatattttaattcttcagcaattacccggttttctaaattgaatcatgcatctatttataattctaattattttgtaaaagaagacaaaattatgaatcttaagtatttgctccatctttttctctgtaatggtggagaggctgcccataattcatctccacatggagccaagtttaatgtttctagttcacattttgtacttctgtcatgcttatttcaaactccctgagtgatgggtaagaaatcaaacattgcctcagtggtatcaagagaactttggtggtggtttcttcagaatcatgaagttcttttgccagataaatattttgatattattttcctttttaatataaaggataggtttgaattgtacttaaaatgcatagcattattaaaaacaatcttttaaaatataatttataacatagattgaagcctccccttaagaaaccttaaagaaataagtatcctactcaaaaaaggaagtctgtttcagaactttagggcctttgaaatatttcctcaagcctatttcatgagatctacttggtttacccaagtcatgtttttaatagactgctaatatcaaaggagaatttttaaagccttaacaatgcctactttccattcactgttaacatggaataaacacaattcccaacatcttagatagtgtattatgcttccaacagacagtccctctcatataaagtttatgtaccctaaaatctaacccaataacctgtcccgttgccaatagattgagaatttctggtttgcttactctacagttattcaaatgagagtcacgcttttaaatttacagctcatcacagaaatcatcagctatacattagtaaaaataaggacatgaggttttctttcttggtttttgtccaagatctttgcaccttaatattaatggactgtttcaggtaaaagagaatgaatgtatgattgtgaactgtgaagagaatgatgcaggatcctatttagttactgaataatacagagtattcaatgcatgttgtatgtgccaccaagttactattaactgtttttggaattgaagactctgtatagtcaatagttgtgaaattcttctcaggctccttaaaccctcgctttgttgtaaaagctaaaataaacagcatgctatattgtaattgtatttcttgctgaccaaatctactaaatgctattgatttctctctgattactaaaacacattgtttattctcagtagtttcccccaaaatgcttttttctttgctgaacttaaattgaatca

SEQ ID NO: 404497 - DNA, 730 bp, Homo sapiens
cgcggccgcgcagccgcctttcctccctctcagggctgcgcgcccaggtctgcgccgcgctccgcctccagccgcgcgcagacttgcgcacgcgtcgtgagagcgaccgcctccgtctctcgctgggctcgctagggctgcgcgttgggccagcgggggcgccgcagctgaagccgccccggagccggtgaaccgaattacctcgagggaggggcgtggggaaggcggcgggaggaggagcgcacgggccggctgccgtgcccaccacggctgaggaacatggttttcgagtcggtggtcgtggacgtgttgaaccggttcttgggggactatgtggtggacttggacacgtcccagctctctctgggcatctggaaaggtaaggaggccgccgccgccgctccccggcctctcgtgcttcccggccgtctcgctgcccgagcggcgtcctgcgttctcggggcttcgagcaccttgctcgccgggtgcagccacctgccgccgcccgcctgtgggtcaagttacgtaaagccgggcggcagttccctggcctccgccctcgagttgtttatattttgggggaaaggagagggtcatgagtgcgggatgaaaaggtctatattttccgagcggagcggacttgccgtgggctccgtgggtctggcgttcaagtcccggcgaggggccgttctctacccctggccccgcacggtccggctttagccgcgcg

SEQ ID NO: 404498 - DNA, 10743 bp, Homo sapiens
  misc_feature (3872)..(3872): n is a, c, g, or t
cgcggccgcgcagccgcctttcctccctctcagggctgcgcgcccaggtctgcgccgcgctccgcctccagccgcgcgcagacttgcgcacgcgtcgtgagagcgaccgcctccgtctctcgctgggctcgctagggctgcgcgttgggccagcgggggcgccgcagctgaagccgccccggagccggtgaaccgaattacctcgagggaggggcgtggggaaggcggcgggaggaggagcgcacgggccggctgccgtgcccaccacggctgaggaacatggttttcgagtcggtggtcgtggacgtgttgaaccggttcttgggggactatgtggtggacttggacacgtcccagctctctctgggcatctggaaaggagctgtggccctcaagaatcttcaaattaaagaaaatgccctgagtcaactggatgtaccatttaaagttaaagttggtcacataggtaatcttaaacttataattccatggaaaaacctttatactcaacctgttgaagccgtattggaagaaatttatttacttatagtgccttcttctagaataaaatatgatcctttaaaagaagagaaacaactcatggaagcaaagcaacaggaactgaaaagaatagaagaagcaaaacaaaaagtagttgatcaagaacaacatctgccggaaaaacaggacacttttgcagaaaaattagttacacagatcataaaaaatcttcaggtgaaaatttccagtatccatattcgttatgaagatgatatcacaaatcgggacaaaccgctgtcatttggtatttcccttcaaaatctgagcatgcagacaactgatcaatactgggttccatgtttacatgatgaaactgagaaactggttcgtaagttaatccgattggataacctgtttgcctattggaatgtgaagtctcagatgttttatcttagtgattatgataactccttggacgacttgaagaatggcattgtcaatgaaaatattgttccagaaggttatgattttgtatttcgtcccatatctgctaatgccaaacttgtgatgaatcgccgatctgattttgacttttctgcccccaaaataaacttggaaattgagttacataacatagcaattgaatttaataaaccacagtatttcagtattatggagcttcttgaatcagttgatatgatggcacaaaatctgccatataggaagttcaaacctgatgtgcctcttcaccaccatgccagagaatggtgggcttatgctatacatggcgttcttgaagtaaatgtttgccccaggttatggatgtggtcatggaagcatattagaaaacataggcaaaaagtgaagcaatataaagaactgtataaaaaaaagttaacaagtaagaagccacctggtgaacttctcgtgtctttggaggagttggaaaaaaccttggatgtctttaatataactatagctagacagacggcagaagttgaggtaaagaaagctggatacaaaatttacaaagaaggagtaaaagatccagaggataataaagggtggtttagctggctatggtcttggtcagaacaaaatactaatgaacagcaaccagatgttcaacctgaaactcttgaagaaatgttgacacctgaagaaaaagctttactctatgaagcaattggctatagtgaaacagcagttgatccaactttactaaaaacatttgaagccttgaagttttttgtccacttgaaaagtatgtctattgttctaagagaaaatcatcaaaaacctgagctggtagatattgtaatagaagaatttagcaccttaattgtgcaaagaccaggagcacaagcaataaaatttgaaactaaaatagattcatttcatattactggcttaccagataattcagaaaaaccccgcctcctgtcttcattggatgatgcaatgtcacttttccaaattacatttgagataaatccattagatgaaactgtttctcagaggtgtatcatagaagctgaacctttagaaatcatatatgatgcaaggacagtgaatagtatagtggaattcttcagacctccaaaagaggtacatctagcacagctcactgcagcaactttgacaaaactggaagaatttcgcagtaagacagcaacaggtctactgtatattattgaaacacagaaagttcttgatctcaaaattaatttgaaggcttcatatattattgtcccacaagatggaatttttagtcctacatcaaatctgcttcttttggaccttggtcatctaaaggtgacgagtaaaagtcgttctgaattaccagatgtgaaacaaggtgaggccaatcttaaagagataatggatagagcttatgattcatttgatattcaacttacaagtgtacagctgctttacagtagagttggtgataattggagagaagcacgaaaactcagtgtatctacccagcatattttggtacccatgcacttcaatttggaactgtctaaggccatggttttcatggatgtaaggatgcccaaattcaagatttatggaaagttacctcttatttctttacgaatctcagataaaaaactacaagggattatggaattgattgaaagcattccaaaacctgaaccagtaactgaagtatctgcccctgtcaaatcattccagattcaaacatctacttctttgggaacatcacagatttcacagaaaataattcctctcttggaacttccatctgtttctgaagatgattcagaggaggaattttttgatgcaccatgtagtcccttggaagaacctcttcagtttccaactggagttaaaagtattcgaaccagaaagttacaaaagcaggattgttcagtaaatatgactacatttaaaataagatttgaagtaccaaaggttttgatcgagttttatcaccttgttggagattgtgaactatctgtggtagaaattcttgttttaggattgggtgcagaaattgagattagaacatacgatttgaaagcaaatgcctttttgaaagagttctgcttaaaatgcccagaatacttggatgaaaacaagaaaccagtttatttggttacaaccctggataacacaatggaagacctgttaacgctggaatatgtaaaggctgaaaagaatgtacccgacttgaaaagtacctataacaatgttttacaattgattaaggtaaatttttcctctttggatattcatttacacactgaagcacttctgaatacaataaattatcttcataatatccttccgcaatcagaggaaaaatcagccccagtgtccactacagagactgaagacaaaggagatgtcattaaaaaattagctttaaaactatccacaaatgaagatatcattactttgcagattttagcagaattatcgtgtttacagatctttattcaagatcagaaatgtaacatttctgaaattaagattgaagggcttgattctgagatgattatgaggccttcagaaactgaaataaacgcaaagctaaggaatataattgttttagattctgatataacagctatatacaaaaaggctgtttatatcactggaaaagaagttttcagcttcaaaatggtttcttacatggatgcaactgctggttctgcatacacagatatgaatgtggttgacattcaggttaatttaatagttggttgcattgaagtagtttttgtcacgaaatttctatattctatattggcttttatagataattttcaggcagctaaacaagccttggctgaggcaactgttcaggcagctggaatggctgctactggtgtaanagaactcgcacaaaggagttccagaatggcactggatattaacatcaaagccccagttgtggtcatcccgcagtctccagtttctgaaaatgtttttgttgctgattttggactaattacaatgacaaatacctttcatatgataacagagagccagagctctcccccacctgttattgatttgataacaataaagctgagtgaaatgcgactatacagatctcgatttattaatgatgcataccaggaagtactggatctactcctgccattaaatcttgaggttgtggttgaacgaaatttatgctgggagtggtaccaggaagttccttgttttaatgtaaatgctcagctgaaaccaatggagttcattcttagtcaagaagatataacaactatttttaaaacattgcatggcaatatatggtatgaaaaagatggtagtgcctcacctgctgtaacaaaagaccaatacagtgccactagtggagttactactaatgcttcacaccattcaggaggagcaactgtggtgacagctgctgtggtagaagtacattcacgtgccttactagttaagacaacactaaacataagcttcaaaactgatgatctcaccatggtgctgtatagtccaggtcctaaacaggcttcctttacagatgttcgtgatccttctctgaaacttgctgaatttaaattggagaatattataagtactttaaaaatgtatacagatggctcaacattttcttccttctcattaaaaaactgtattttagatgataaaagacctcatgtcaagaaagcaactcctcgaatgataggactgacagttggttttgacaaaaaagacatgatggatataaagtacaggaaagtcagagatggttgtgtgactgatgcggtctttcaagaaatgtatatttgtgcaagcgtagaatttctgcagactgttgcaaatgtctttcttgaggcctacaccacaggcactgctgtagaaaccagtgtgcaaacatggactgctaaggaagaagtacctacacaggaatcagtgaagtgggaaattaatgttattattaaaaatcctgaaattgtgtttgtagctgacatgacaaaaaatgatgctcctgctttagtcattacaacacaatgtgaaatttgctataaaggtaaccttgaaaatagtacaatgactgctgccattaaagatctccaagtgagagcctgcccgtttcttccagtcaagagaaaaggcaaaatcactactgttttgcagccctgtgacttgttttatcaaactactcagaaaggtacagatccacaagtgatcgatatgtcagtaaaatccctgacactaaaggtttcaccagttattataaatactatgattaccataacttcagcactgtatacaactaaggaaaccatcccagaagaaacggcttcttctactgcacatttatgggaaaagaaggatacaaagactttaaaaatgtggtttcttgaagaatcaaatgaaactgaaaaaatagctcccacaactgaattggtacccaaaggcgagatgataaaaatgaacattgattctatttttatagttcttgaggctggaattggtcatagaacagtacctatgcttctggcaaagtcacgtttttcaggggaaggcaaaaactggagttccctaataaatctgcactgtcagcttgagctagaagtgcattattataatgaaatgtttggtgtatgggagcctttgcttgaacccttagaaattgatcagactgaggattttagaccatggaatcttggtatcaagatgaaaaagaaagcaaaaatggccattgttgagtcagatcctgaagaagaaaactacaaagtgccagaatataaaactgtcatcagtttccattcaaaagaccaattaaacattacattatccaaatgtggtcttgtaatgttaaacaatttagtcaaggcatttacagaagctgccactggatcttcagctgacttcgtaaaggatctagcaccatttatgattttaaattcccttggacttactatttctgtttcgccaagtgattcttttagtgtactcaacattcctatggcaaaatcatatgtattgaaaaatggagaaagtttaagtatggattatatccgaaccaaggacaatgatcatttcaatgcaatgaccagcctaagcagcaaactcttcttcattcttcttacacctgttaaccattctactgctgataagattcctttaacaaaagtgggacgacgtctgtacactgtaagacacagagagtctggcgttgaaagatctattgtttgtcaaattgatacagtagaaggaagtaagaaggtcacaattcgctccccagtgcagataagaaatcatttttcagtcccactgtctgtttacgaaggggataccttattgggaactgcctcacctgaaaatgaattcaacataccattaggatcttaccgatcattcatttttctgaagccagaagatgagaactatcaaatgtgtgaaggaattgactttgaagagattataaaaaatgatggtgctcttctaaagaagaaatgtagatctaaaaacccttctaaggaatcatttctcattaatattgttccagaaaaagataatttaacatctctatcagtgtattcagaagatggttgggatttaccatacataatgcatttgtggccacctatcctgctccgaaatcttcttccttacaaaattgcttattatatagagggaattgaaaattcggtttttactctaagtgaaggacattcagcccagatttgtactgcacagttgggtaaagccaggctacatttaaaattacttgactatctcaatcacgattggaaaagtgaatatcacataaagcctaatcagcaagacattagttttgtcagttttacttgtgttacagaaatggaaaagactgatttagatattgctgtccatatgacttacaatactggtcagacagttgtggcatttcatagtccttattggatggtcaataaaactggccgcatgttacagtacaaagcagacggaattcatcgaaagcatccacctaattataaaaagccagttctcttttcttttcagccaaatcacttttttaataacaataaggttcaacttatggtaactgatagtgagttgtccaatcagttttcaattgatactgttggtagtcatggagctgttaaatgtaaaggcctgaaaatggactatcaagttggtgtcactatagacctgagcagttttaacattactagaattgtgacatttacccctttttatatgattaaaaacaaaagcaaataccatatatcagtggctgaagaaggaaatgataaatggctctctcttgatttggagcagtgtatccccttttggcctgagtatgcttctagtaaacttcttattcaagtcgaaaggagtgaagatcctcccaaaaggatatattttaacaagcaggaaaattgtattctattgcgtctagataacgagcttggaggtattatagcagaagtgaatttggccgagcattctacagttattacatttttagattatcatgatggagcagctacattcctcttaataaatcacacaaagaatgaacttgttcaatacaatcaaagttctctcagtgaaatagaagattccctccctcctggtaaagccgtgttttatacatgggctgatccggtgggctctagaaggctgaagtggagatgtagaaaaagccatggtgaagtaacacagaaggatgatatgatgatgcctatagatttgggggaaaagacaatatatttagtttcattctttgaaggtttacaacgcattattttattcactgaagatccaagggtatttaaagtaacatatgaaagtgagaaagcagagttagcagagcaagaaattgcagtggcattacaagatgttggaatttctcttgtcaacaattacacgaagcaagaagtagcctatataggcattacaagttctgatgtggtttgggaaacaaagcccaagaagaaggcaagatggaagccaatgagtgtaaagcacactgagaagttagagagagaatttaaggaatatactgaatcttctccttcagaagataaggttattcagttggacactaatgttccggttcgcctaacccctactggtcataacatgaaaattctgcagccgcatgtaatagctctacgaagaaattatcttccagcattaaaagtggaatataacacatctgcacatcaatcatcatttagaattcagatttacagaatacagatccaaaatcagatacatggtgctgtatttccctttgtgttttatcctgttaaacctccaaagtcggtcaccatggattcagcaccaaagccctttacagatgtcagtattgtcatgagatctgcaggacattcccagatatcacgtattaagtatttcaaagtattgattcaagaaatggatctcaggttagatcttgggtttatctatgctttaacagaccttatgacagaagctgaggtgactgaaaatacagaggttgagctttttcataaagatatagaagctttcaaagaagaatataaaacagcctcattagtagatcaatcacaagtcagcctctatgaatattttcatatatctcctatcaagttacatttaagtgtttcactgagttccggcagagaagaagctaaagattcaaaacaaaatggaggactgattccagttcattctttaaatcttttgctgaagagtattggtgccacactgacagatgtacaagatgtagtttttaagcttgcattttttgaactcaactatcagttccatacaacatccgatctacagtctgaagtcataagacactattcaaaacaggccattaagcagatgtatgtactcattcttggacttgatgttttgggaaatccatttggcttaattagagaattttctgaaggtgtagaagcatttttttatgaaccttaccagggagccatccagggtcctgaagagtttgtggaaggaatggcactaggacttaaggcactagttggtggagctgttggtggattggctggtgctgcctccaaaatcaccggtgctatggctaagggggtagcagctatgaccatggatgaagactaccaacagaagagaagagaagccatgaataagcaaccagctggttttagagaaggcatcactcgtggaggaaaaggcttagtttctggatttgttagtggcataacaggaattgttacaaaaccaatcaaaggagctcaaaaaggaggagcagctggtttctttaaaggtgttgggaaaggtttagtaggagcggtagcaaggccaactggaggcatcatagacatggctagcagtacatttcaggggataaaaagagctacagagacttctgaagtggagagtctgcgacctcctcggttcttcaatgaagatggagttatcagaccgtacaggttgagggatgggactggaaatcaaatgttacagaaaattcaattctacagggagtggattatgactcacagtagcagtagtgatgatgatgatgatgatgatgatgatgatgagtcagatctaaaccattaaaattcatatgttctttattttacttggaatgtttcattaacatgttttgtatgacttataccataatgcccatatgtccatttatagggaggtaaaacacattttcttttaaaatgttttcctacacattttcataaagcaaaataattgtattatttaagcacagaaaaaaatgtatcttacatccaaagtagggagggcatccaacatattatagatttgcttttatatattttatagctttgtattgcatagtttgtctttaagagttcaagttagacttaaatataattttgatgttcactggttttattttaaattgccttcttatttgttagcaaaatgcctttttttaatggtctctgtaaattttctgggctttaatgtaatgccactgtgtaaaaaaaaaggaagaaaatagtaatagccatttaatgttttatatttatcattttaaagatatttttgtcaaatttcttttaataataataaacatatgtaatctaaaggagtgtgaatttgttgttctatccccaaatcatatagattgaactgctattataaaaacagtcatggcctctcatggaagagtagatagtaaaataatcgttttgtttcacatattttttgtgaaacaatgaacaaagttggttttaatagtcattatattcacttattaatttgtatatgcatctactatatttctattatgaattcagaatatttggaaacttctatcgtaaacataactatatatattttttctgtgtaatattagggaaaatgttacatatatctctgaaagatccattagtaaatctattttatgttttgtgtaataaaggtttttaaaaaaatttcaacatagatgaaactgtcctatttctctaacatatcagacgtactttaaaaaattctctaaaaagtatatgatctttggtagttagaatgtttaatccctatgactgctgtgcttttggatcaacaaaggaatatttatcttgactacagcagaagctcagtataagcaacaggtgatttaatttaactgattcagcacatgatttctgagtctcctctaattcttaggtttatcaagttttatttctataaatcattctctatgttttttgaaagtgactactttaaatttgaaaatattgagattactgcaaa

SEQ ID NO: 404499 - DNA, 11423 bp, Homo sapiens
  misc_feature (3872)..(3872): n is a, c, g, or t
  misc_feature (4285)..(4285): n is a, c, g, or t
cgcggccgcgcagccgcctttcctccctctcagggctgcgcgcccaggtctgcgccgcgctccgcctccagccgcgcgcagacttgcgcacgcgtcgtgagagcgaccgcctccgtctctcgctgggctcgctagggctgcgcgttgggccagcgggggcgccgcagctgaagccgccccggagccggtgaaccgaattacctcgagggaggggcgtggggaaggcggcgggaggaggagcgcacgggccggctgccgtgcccaccacggctgaggaacatggttttcgagtcggtggtcgtggacgtgttgaaccggttcttgggggactatgtggtggacttggacacgtcccagctctctctgggcatctggaaaggagctgtggccctcaagaatcttcaaattaaagaaaatgccctgagtcaactggatgtaccatttaaagttaaagttggtcacataggtaatcttaaacttataattccatggaaaaacctttatactcaacctgttgaagccgtattggaagaaatttatttacttatagtgccttcttctagaataaaatatgatcctttaaaagaagagaaacaactcatggaagcaaagcaacaggaactgaaaagaatagaagaagcaaaacaaaaagtagttgatcaagaacaacatctgccggaaaaacaggacacttttgcagaaaaattagttacacagatcataaaaaatcttcaggtgaaaatttccagtatccatattcgttatgaagatgatatcacaaatcgggacaaaccgctgtcatttggtatttcccttcaaaatctgagcatgcagacaactgatcaatactgggttccatgtttacatgatgaaactgagaaactggttcgtaagttaatccgattggataacctgtttgcctattggaatgtgaagtctcagatgttttatcttagtgattatgataactccttggacgacttgaagaatggcattgtcaatgaaaatattgttccagaaggttatgattttgtatttcgtcccatatctgctaatgccaaacttgtgatgaatcgccgatctgattttgacttttctgcccccaaaataaacttggaaattgagttacataacatagcaattgaatttaataaaccacagtatttcagtattatggagcttcttgaatcagttgatatgatggcacaaaatctgccatataggaagttcaaacctgatgtgcctcttcaccaccatgccagagaatggtgggcttatgctatacatggcgttcttgaagtaaatgtttgccccaggttatggatgtggtcatggaagcatattagaaaacataggcaaaaagtgaagcaatataaagaactgtataaaaaaaagttaacaagtaagaagccacctggtgaacttctcgtgtctttggaggagttggaaaaaaccttggatgtctttaatataactatagctagacagacggcagaagttgaggtaaagaaagctggatacaaaatttacaaagaaggagtaaaagatccagaggataataaagggtggtttagctggctatggtcttggtcagaacaaaatactaatgaacagcaaccagatgttcaacctgaaactcttgaagaaatgttgacacctgaagaaaaagctttactctatgaagcaattggctatagtgaaacagcagttgatccaactttactaaaaacatttgaagccttgaagttttttgtccacttgaaaagtatgtctattgttctaagagaaaatcatcaaaaacctgagctggtagatattgtaatagaagaatttagcaccttaattgtgcaaagaccaggagcacaagcaataaaatttgaaactaaaatagattcatttcatattactggcttaccagataattcagaaaaaccccgcctcctgtcttcattggatgatgcaatgtcacttttccaaattacatttgagataaatccattagatgaaactgtttctcagaggtgtatcatagaagctgaacctttagaaatcatatatgatgcaaggacagtgaatagtatagtggaattcttcagacctccaaaagaggtacatctagcacagctcactgcagcaactttgacaaaactggaagaatttcgcagtaagacagcaacaggtctactgtatattattgaaacacagaaagttcttgatctcaaaattaatttgaaggcttcatatattattgtcccacaagatggaatttttagtcctacatcaaatctgcttcttttggaccttggtcatctaaaggtgacgagtaaaagtcgttctgaattaccagatgtgaaacaaggtgaggccaatcttaaagagataatggatagagcttatgattcatttgatattcaacttacaagtgtacagctgctttacagtagagttggtgataattggagagaagcacgaaaactcagtgtatctacccagcatattttggtacccatgcacttcaatttggaactgtctaaggccatggttttcatggatgtaaggatgcccaaattcaagatttatggaaagttacctcttatttctttacgaatctcagataaaaaactacaagggattatggaattgattgaaagcattccaaaacctgaaccagtaactgaagtatctgcccctgtcaaatcattccagattcaaacatctacttctttgggaacatcacagatttcacagaaaataattcctctcttggaacttccatctgtttctgaagatgattcagaggaggaattttttgatgcaccatgtagtcccttggaagaacctcttcagtttccaactggagttaaaagtattcgaaccagaaagttacaaaagcaggattgttcagtaaatatgactacatttaaaataagatttgaagtaccaaaggttttgatcgagttttatcaccttgttggagattgtgaactatctgtggtagaaattcttgttttaggattgggtgcagaaattgagattagaacatacgatttgaaagcaaatgcctttttgaaagagttctgcttaaaatgcccagaatacttggatgaaaacaagaaaccagtttatttggttacaaccctggataacacaatggaagacctgttaacgctggaatatgtaaaggctgaaaagaatgtacccgacttgaaaagtacctataacaatgttttacaattgattaaggtaaatttttcctctttggatattcatttacacactgaagcacttctgaatacaataaattatcttcataatatccttccgcaatcagaggaaaaatcagccccagtgtccactacagagactgaagacaaaggagatgtcattaaaaaattagctttaaaactatccacaaatgaagatatcattactttgcagattttagcagaattatcgtgtttacagatctttattcaagatcagaaatgtaacatttctgaaattaagattgaagggcttgattctgagatgattatgaggccttcagaaactgaaataaacgcaaagctaaggaatataattgttttagattctgatataacagctatatacaaaaaggctgtttatatcactggaaaagaagttttcagcttcaaaatggtttcttacatggatgcaactgctggttctgcatacacagatatgaatgtggttgacattcaggttaatttaatagttggttgcattgaagtagtttttgtcacgaaatttctatattctatattggcttttatagataattttcaggcagctaaacaagccttggctgaggcaactgttcaggcagctggaatggctgctactggtgtaanagaactcgcacaaaggagttccagaatggcactggatattaacatcaaagccccagttgtggtcatcccgcagtctccagtttctgaaaatgtttttgttgctgattttggactaattacaatgacaaatacctttcatatgataacagagagccagagctctcccccacctgttattgatttgataacaataaagctgagtgaaatgcgactatacagatctcgatttattaatgatgcataccaggaagtactggatctactcctgccattaaatcttgaggttgtggttgaacgaaatttatgctgggagtggtaccaggaagttccttgttttaatgtaaatgctcagctgaaaccaatggaggtagaatccatacagaatgtcctggtgatgctgccaacaatctgcnagtgcccagctgccttttgaggccaaccctctaggttcattcttagtcaagaagatataacaactatttttaaaacattgcatggcaatatatggtatgaaaaagatggtagtgcctcacctgctgtaacaaaagaccaatacagtgccactagtggagttactactaatgcttcacaccattcaggaggagcaactgtggtgacagctgctgtggtagaagtacattcacgtgccttactagttaagacaacactaaacataagcttcaaaactgatgatctcaccatggtgctgtatagtccaggtcctaaacaggcttcctttacagatgttcgtgatccttctctgaaacttgctgaatttaaattggagaatattataagtactttaaaaatgtatacagatggctcaacattttcttccttctcattaaaaaactgtattttagatgataaaagacctcatgtcaagaaagcaactcctcgaatgataggactgacagttggttttgacaaaaaagacatgatggatataaagtacaggaaagtcagagatggttgtgtgactgatgcggtctttcaagaaatgtatatttgtgcaagcgtagaatttctgcagactgttgcaaatgtctttcttgaggcctacaccacaggcactgctgtagaaaccagtgtgcaaacatggactgctaaggaagaagtacctacacaggaatcagtgaagtgggaaattaatgttattattaaaaatcctgaaattgtgtttgtagctgacatgacaaaaaatgatgctcctgctttagtcattacaacacaatgtgaaatttgctataaaggtaaccttgaaaatagtacaatgactgctgccattaaagatctccaagtgagagcctgcccgtttcttccagtcaagagaaaaggcaaaatcactactgttttgcagccctgtgacttgttttatcaaactactcagaaaggtacagatccacaagtgatcgatatgtcagtaaaatccctgacactaaaggtttcaccagttattataaatactatgattaccataacttcagcactgtatacaactaaggaaaccatcccagaagaaacggcttcttctactgcacatttatgggaaaagaaggatacaaagactttaaaaatgtggtttcttgaagaatcaaatgaaactgaaaaaatagctcccacaactgaattggtacccaaaggcgagatgataaaaatgaacattgattctatttttatagttcttgaggctggaattggtcatagaacagtacctatgcttctggcaaagtcacgtttttcaggggaaggcaaaaactggagttccctaataaatctgcactgtcagcttgagctagaagtgcattattataatgaaatgtttggtgtatgggagcctttgcttgaacccttagaaattgatcagactgaggattttagaccatggaatcttggtatcaagatgaaaaagaaagcaaaaatggccattgttgagtcagatcctgaagaagaaaactacaaagtgccagaatataaaactgtcatcagtttccattcaaaagaccaattaaacattacattatccaaatgtggtcttgtaatgttaaacaatttagtcaaggcatttacagaagctgccactggatcttcagctgacttcgtaaaggatctagcaccatttatgattttaaattcccttggacttactatttctgtttcgccaagtgattcttttagtgtactcaacattcctatggcaaaatcatatgtattgaaaaatggagaaagtttaagtatggattatatccgaaccaaggacaatgatcatttcaatgcaatgaccagcctaagcagcaaactcttcttcattcttcttacacctgttaaccattctactgctgataagattcctttaacaaaagtgggacgacgtctgtacactgtaagacacagagagtctggcgttgaaagatctattgtttgtcaaattgatacagtagaaggaagtaagaaggtcacaattcgctccccagtgcagataagaaatcatttttcagtcccactgtctgtttacgaaggggataccttattgggaactgcctcacctgaaaatgaattcaacataccattaggatcttaccgatcattcatttttctgaagccagaagatgagaactatcaaatgtgtgaaggaattgactttgaagagattataaaaaatgatggtgctcttctaaagaagaaatgtagatctaaaaacccttctaaggaatcatttctcattaatattgttccagaaaaagataatttaacatctctatcagtgtattcagaagatggttgggatttaccatacataatgcatttgtggccacctatcctgctccgaaatcttcttccttacaaaattgcttattatatagagggaattgaaaattcggtttttactctaagtgaaggacattcagcccagatttgtactgcacagttgggtaaagccaggctacatttaaaattacttgactatctcaatcacgattggaaaagtgaatatcacataaagcctaatcagcaagacattagttttgtcagttttacttgtgttacagaaatggaaaagactgatttagatattgctgtccatatgacttacaatactggtcagacagttgtggcatttcatagtccttattggatggtcaataaaactggccgcatgttacagtacaaagcagacggaattcatcgaaagcatccacctaattataaaaagccagttctcttttcttttcagccaaatcacttttttaataacaataaggttcaacttatggtaactgatagtgagttgtccaatcagttttcaattgatactgttggtagtcatggagctgttaaatgtaaaggcctgaaaatggactatcaagttggtgtcactatagacctgagcagttttaacattactagaattgtgacatttacccctttttatatgattaaaaacaaaagcaaataccatatatcagtggctgaagaaggaaatgataaatggctctctcttgatttggagcagtgtatccccttttggcctgagtatgcttctagtaaacttcttattcaagtcgaaaggagtgaagatcctcccaaaaggatatattttaacaagcaggaaaattgtattctattgcgtctagataacgagcttggaggtattatagcagaagtgaatttggccgagcattctacagttattacatttttagattatcatgatggagcagctacattcctcttaataaatcacacaaagaatgaacttgttcaatacaatcaaagttctctcagtgaaatagaagattccctccctcctggtaaagccgtgttttatacatgggctgatccggtgggctctagaaggctgaagtggagatgtagaaaaagccatggtgaagtaacacagaaggatgatatgatgatgcctatagatttgggggaaaagacaatatatttagtttcattctttgaaggtttacaacgcattattttattcactgaagatccaagggtatttaaagtaacatatgaaagtgagaaagcagagttagcagagcaagaaattgcagtggcattacaagatgttggaatttctcttgtcaacaattacacgaagcaagaagtagcctatataggcattacaagttctgatgtggtttgggaaacaaagcccaagaagaaggcaagatggaagccaatgagtgtaaagcacactgagaagttagagagagaatttaaggaatatactgaatcttctccttcagaagataaggttattcagttggacactaatgttccggttcgcctaacccctactggtcataacatgaaaattctgcagccgcatgtaatagctctacgaagaaattatcttccagcattaaaagtggaatataacacatctgcacatcaatcatcatttagaattcagatttacagaatacagatccaaaatcagatacatggtgctgtatttccctttgtgttttatcctgttaaacctccaaagtcggtcaccatggattcagcaccaaagccctttacagatgtcagtattgtcatgagatctgcaggacattcccagatatcacgtattaagtatttcaaagtattgattcaagaaatggatctcaggttagatcttgggtttatctatgctttaacagaccttatgacagaagctgaggtgactgaaaatacagaggttgagctttttcataaagatatagaagctttcaaagaagaatataaaacagcctcattagtagatcaatcacaagtcagcctctatgaatattttcatatatctcctatcaagttacatttaagtgtttcactgagttccggcagagaagaagctaaagattcaaaacaaaatggaggactgattccagttcattctttaaatcttttgctgaagagtattggtgccacactgacagatgtacaagatgtagtttttaagcttgcattttttgaactcaactatcagttccatacaacatccgatctacagtctgaagtcataagacactattcaaaacaggccattaagcagatgtatgtactcattcttggacttgatgttttgggaaatccatttggcttaattagagaattttctgaaggtgtagaagcatttttttatgaaccttaccagggagccatccagggtcctgaagagtttgtggaaggaatggcactaggacttaaggcactagttggtggagctgttggtggattggctggtgctgcctccaaaatcaccggtgctatggctaagggggtagcagctatgaccatggatgaagactaccaacagaagagaagagaagccatgaataagcaaccagctggttttagagaaggcatcactcgtggaggaaaaggcttagtttctggatttgttagtggcataacaggaattgttacaaaaccaatcaaaggagctcaaaaaggaggagcagctggtttctttaaaggtgttgggaaaggtttagtaggagcggtagcaaggccaactggaggcatcatagacatggctagcagtacatttcaggggataaaaagagctacagagacttctgaagtggagagtctgcgacctcctcggttcttcaatgaagatggagttatcagaccgtacaggttgagggatgggactggaaatcaaatgttacaggtcatggaaaatggaagatttgcaaaatacaaatattttacccatgtcatgatcaataagacagatatgctaatgataaccagacgtggtgtattgtttgtaacaaagggaacatttggacaactcacgtgtgagtggcagtatagttttgatgaatttaccaaagagccattcattgttcatgggagaagattgcgcattgaagcaaaggaacgagtgaagtctgtatttcatgccagagagtttggaaaaataattaacttcaagaccccagaggatgccagggtaaatataataaatcttttatttaaataggagctgctcacttcaaaatcattggatcctcacaaagctacaagaagcaagagaaccttctccgagcctctgacagagaacactgcctgaagacacacagcaataagtgattacagctcctagactaccttccaaaacctgtttgggaagcatattacagaaatgatttcaagtaccctgtattctggatgctaaaaaacaaaaacaaacaaaaaaacaaaaacaaaaaaacaaaaccagaatcaggtaaaacagctatgtgattaaaatattttaattcttcagcaattacccggttttctaaattgaatcatgcatctatttataattctaattattttgtaaaagaagacaaaattatgaatcttaagtatttgctccatctttttctctgtaatggtggagaggctgcccataattcatctccacatggagccaagtttaatgtttctagttcacattttgtacttctgtcatgcttatttcaaactccctgagtgatgggtaagaaatcaaacattgcctcagtggtatcaagagaactttggtggtggtttcttcagaatcatgaagttcttttgccagataaatattttgatattattttcctttttaatataaaggataggtttgaattgtacttaaaatgcatagcattattaaaaacaatcttttaaaatataatttataacatagattgaagcctccccttaagaaaccttaaagaaataagtatcctactcaaaaaaggaagtctgtttcagaactttagggcctttgaaatatttcctcaagcctatttcatgagatctacttggtttacccaagtcatgtttttaatagactgctaatatcaaaggagaatttttaaagccttaacaatgcctactttccattcactgttaacatggaataaacacaattcccaacatcttagatagtgtattatgcttccaacagacagtccctctcatataaagtttatgtaccctaaaatctaacccaataacctgtcccgttgccaatagattgagaatttctggtttgcttactctacagttattcaaatgagagtcacgcttttaaatttacagctcatcacagaaatcatcagctatacattagtaaaaataaggacatgaggttttctttcttggtttttgtccaagatctttgcaccttaatattaatggactgtttcaggtaaaagagaatgaatgtatgattgtgaactgtgaagagaatgatgcaggatcctatttagttactgaataatacagagtattcaatgcatgttgtatgtgccaccaagttactattaactgtttttggaattgaagactctgtatagtcaatagttgtgaaattcttctcaggctccttaaaccctcgctttgttgtaaaagctaaaataaacagcatgctatattgtaattgtatttcttgctgaccaaatctactaaatgctattgatttctctctgattactaaaacacattgtttattctcagtagtttcccccaaaatgcttttttctttgctgaacttaaattgaatca

SEQ ID NO: 404500 - DNA, 1239 bp, Homo sapiens
cgcggccgcgcagccgcctttcctccctctcagggctgcgcgcccaggtctgcgccgcgctccgcctccagccgcgcgcagacttgcgcacgcgtcgtgagagcgaccgcctccgtctctcgctgggctcgctagggctgcgcgttgggccagcgggggcgccgcagctgaagccgccccggagccggtgaaccgaattacctcgagggaggggcgtggggaaggcggcgggaggaggagcgcacgggccggctgccgtgcccaccacggctgaggaacatggttttcgagtcggtggtcgtggacgtgttgaaccggttcttgggggactatgtggtggacttggacacgtcccagctctctctgggcatctggaaaggagctgtggccctcaagaatcttcaaattaaagaaaatgccctgagtcaactggatgtaccatttaaagttaaagttggtcacataggtaatcttaaacttataattccatggaaaaacctttatactcaacctgttgaagccgtattggaagaaatttatttacttatagtgccttcttctagaataaaatatgatcctttaaaagaagagaaacaactcatggaagcaaagcaacaggaactgaaaagaatagaagaagcaaaacaaaaagtagttgatcaagaacaacatctgccggaaaaacaggacacttttgcagaaaaattagttacacagatcataaaaaatcttcaggtgaaaatttccagtatccatattcgttatgaagatgatatcacaaatcgggacaaaccgctgtcatttggtatttcccttcaaaatctgagcatgcaggaataagctgttttggataaagtttgaatcccttttgttttctacttccacccacccgtccttccccagagataagtatcctaaattttaaaacttttatataatatatctattaaaaatgtaggattataaaagtttacgcgttttatatgactcttttatgagttcctttttgcactttccagtgttgttgacatttatctgtgttaccacatgtaacaaaattcattcagtttaactgctgtgtatttcattgcatgattttatttgttgtatctattgggttttgtgtaagatttctttttaattttattattatttttaaattgggcagcctcccaagccagagcaggctcagagagactccacagtttctttttaaaatgtggccccactgcaacgaaa

SEQ ID NO: 404501 - DNA, 503 bp, Homo sapiens
acacagtgtaaatattttgggggtcattttcagtatattaaaaactgcaggaaactcctggcatttagagggcatggtcacaggaccctacacatcctgtaaagtgtgggacagtttcacagaatgaagaattgttctgaatcccacacaaatttcaaaagccccataggacatacatgtagatggaaaccctttctataattatctgaacctaaaactattttctgtataaacacaaagtgtttttgcatggctctcatatatgaatacatggaatagtctagtttgtattctaatgtccacctagcctttaatctccaattttcttgtgatttttaaaaaatcttctgattgtcttctctaaatctaaacatgctttttagtattacatagtttcaagcatttgattatttcattgtgtcttattgtatagttgcatctgaagatttttgtactgaaatagaattttttaaataaattactgtcatttctccattatatta

SEQ ID NO: 404502 - DNA, 321 bp, Homo sapiens
tgcctccaggttcaagctattctcatgccttagccccctgagtatctgggactacaggagagaatggcgtgaacccgggaggcagagcttgcagtgagcagagatcatgccactgcactccagtctgggcaacagagcgagacttcctctcaagaaaaaataaataaataaataaataaataaagcaagaataatccacctgttgtttagcatataatcaagaaataaccataaaaatggtcaaccctcagggctgctctgtctacagaggggctactcttttattcctctactttcttaataaacttgctttcactttcc

SEQ ID NO: 404503 - DNA, 451 bp, Homo sapiens
aaattgtaattttatgcagagactacaaaaaatgtgctagatagcaaatgtatggacactggtaacatttcaaggctattttagtggaaaacgccactctttcacaacaatggagccaaacttcttgactgggcaatcttcatgtaattcacgtagctagagtacagaactccttttggagtttggaaagaactgaaaattaagtatgaggtggaatactggctggactaagtgacatttaaagttctttcttatattttgagattttaaaattatccaagaagatgtttgggaatctatttccacacttagtcatatcctcttctacatcttcaatattctcttccatttatgctccaacacaaaatgatttctctcattttgaggtataaatgtttgaatatccaaaagcatcaactagaatagacaggcaaactttttctgttaaggg

SEQ ID NO: 404504 - DNA, 381 bp, Homo sapiens
tagaaataactcatgttttcacagtatgtactacttaaagaaacaatatagaataagaccattagagttctaattatggctccaccatttgttaacataatcactctacataaattacttaagccatttccccctctgcatattgggattaataaataactcacagttgttgctaagcttaaatgagataacaaagtcattagctcaccatcatttgtatatacagtcattagcaaatatttactgagtaaattctgagggatacagtgctttgcacattataaaaaagtcaatacattttatagcattttgatagtcctagacctagaaagtacttgttggggtcacattgatgccaaatgaaaggaaaagagaaggggg

SEQ ID NO: 404505 - DNA, 362 bp, Homo sapiens
atcattagttcatactttggttcccaatctgttatcaccaagaatcccttaaaagtcttttctctctataaagtggacactgtcttgaaaaatcatatctgtaagacaatgtgtgttatcaattgtttttttccttatcattgatcaaaaaaatctacattgcctattggtcttttaattcagcatgagagatccctttagggttggacctaggccacaaatgcaaaggattactggtcaaagctgaaggtccaagagagacatacagaagctgctctcatgccctccgacaccttacgtggccgctgtttacatactgaccactctgcatatttgaagatacctacctgcgcaactcctct

SEQ ID NO: 404506 - DNA, 159 bp, Homo sapiens
aacccagcctggagaatttgagaccttttggccaatctgatgtctaaaccacccaggatgagtacaattcattgcagcagagttgggaaagggcctttcccaagtagcagaaacaagattttcaaagactcataggtcaggaagacctcgcaacgtgat

SEQ ID NO: 404507 - DNA, 276 bp, Homo sapiens
ctggataagcatccatctgtatagccttttatgtatggcaaaaattgttttcatttcttgatcagaatactgttctgatgtggtgtagtcagccacctgaagctgatctagcatgggcagcctaggcaggtagggcgaatgactgtaggagccctgctaaacccgagtctctactccagagaggagttaaaaaaagctgaacaagcctgaacacggaggagccactattgctgtcaaagttaagtgaagcagcttggcttatgtctatttcagaat

SEQ ID NO: 404508 - DNA, 363 bp, Homo sapiens
  misc_feature (323)..(323): n is a, c, g, or t
ttcagagttttatttaggacatattcagtttgaaatgtctgtgagacaactaagtggaggtggcatagagtcagaaatgtgagtctggaatttaaagagatctggactagtcatacaaattttatgctcagtcacatcagcataaaaatgacattaaattgcatgggaatcagctcactcaggcagtggttgggagacgaaagaaaagcagtccgctaaggaagctgagaaagagagggatagcattaggagaaatacctaatgtaaatgacgagttaatgggtgcagcacaccaacatggcacgtgtatacatatgtaaacnctacgttgtgcacatgtaccctagaacttaaagtataatt

SEQ ID NO: 404509 - DNA, 220 bp, Homo sapiens
ttctctgttaccgccatctaacaatcacataagtgaaaaatctgtttgtcactctagatacctccctatcactttatccttacatcgaagtcaagagatttaccttccttatatctctcatacccatcagctcacttctcttcctactgctaatgctttgggaccactaacacattttgccacagacacaacctccttgctggtctctgtgaatctggta

SEQ ID NO: 404510 - DNA, 423 bp, Homo sapiens
gctccctcaacttcaggagagtggattgtggatggtgtgtccagagtctcccgggagggaagatgacccgagaggattttagaaagcacatgttgcagaagtggtctccatgaagaagcgggacggggacgaggcatccccataaactggtgaagctggatgtctaaaggtcttgcactggctgttggggggagaaggggtacctcaactgggtgaaggcacatcacctgcctgaatacagaagccaggtggtggtgccggaagacaagtgttcccaagaccaaaacttggaatagaatgaggctcttgaaaaatgctgaaggggtaggagcagaaaaagcagcttttacctagaaagatcagttcagagggaaaaggacaaccggggagaatcagcaccttgccgggggacatggtgaggtg

SEQ ID NO: 404511 - DNA, 559 bp, Homo sapiens
ctgggattacaggtgtaagccaccgtgcccgaactatattcatctttattattagtattcccatggttttactacattattactgcaaataatctttttttatttgtcagtcatcttcctttgatattccatgttcagtaccctacagaggtaattttgctcacattctgtttgtctaaaagtgaaaaatataggattttagaatttagtaaaattagtgtaactgtcaagtaaacttatcatatatttgtggtagttgtttttaccaccatggtagaacctgtaaatactgacgagtgtcacccctcttgattctgagattttttttgtaacatacttttttaagatgaggattgttgaggtatatttacataaagtgaaatttatccttttaaaatgtatagttggtccagacatggtagtgtgcatgtcatcctagttacttgggaggctgaggagggaggatcgcttagctcagaagatctgggctacagtgagctatgattgtgccaccgcactccagctttggcaacagagcaagactctgtctcaaataaaa

SEQ ID NO: 404512 - DNA, 366 bp, Homo sapiens
catagtagcgttcttctgtcactagtctggcacgttataggtttgcgtcattctcttctcttgttatcagaactggctgcctttatttcttggtctgtgtaccttccagttactctagttttatgtcataaatttgaggcttgtggagaaagcctggccccttcatccgatctcagataggccttatctatttaatacaattgttaattacttccttgccttactaaactgacttacctacctggcctcaatgtcatggtcttactttacccttctagtaagggtcttgctggtccacttttggccagctaactctctgctgcaagagaacagctgctctagagcaacacggctgaaataagaaga

SEQ ID NO: 404513 - DNA, 291 bp, Homo sapiens
ctgtgggaggtgagcagtaactcaactgccacatgaataagtcacaaatgaccaatggtggtgagcattccaaggaggcagaaggaacaggatgttaggagaaggaaccacagtgaaagctgctccaaggcacatgtgagagctccatcctggagggtgagctggggagaacaagggagagtactgggaagcatctccagctgcaggaatagagcgtgcaaaggccccgagttgggcatgtgatgggtgtgttccagaagggagcagggcggctgggacggagtgaggtga

SEQ ID NO: 404514 - DNA, 612 bp, Homo sapiens
aagggtcaggcagaaagcgtgatagaggagagaatttttgacaaaactcaaaagttgtttgcacagctgttctttgtaccctgttcctttctctgcgccctcctgtttctcccttgcctggaagtcattccaccctcaatttgttgatccacaagtttccagttgtcctcttctttttgttatagcatctctctatttcaaagacattcctagaagtcatccttcagtgatatcaccacttgctcagtcaccatctcaaccttatgtcacctcagccctcatctcaatgcccaaaccccttacacacaccttcagttagcttcaactgcctccgtttccacactgtgcacctttcactttccctacccagctttcctacatgctgcctctcctcagggtcccctgaatgctgcatcattgtgttcagtgcagctggactgattgcacctgtgtatttgcccctgagcactttcctttacacatgtggcttgtcttgccaatagactccaggcttataccttccatttccatcgtattctccagtttccaggatagacgttgctcatcgtctttacctaataaataagtttgtctgattgctgaaagcaacct

SEQ ID NO: 404515 - DNA, 353 bp, Homo sapiens
agctggcgaaggtcggccgcgctccgatccccaagagctcccgcgggctgggcgcgggacgccgggctcggccttagcccccgggatttagagcatcctcgcgaccacccggaggcttctgggggccactctgcggatgaggaagctgacgcctgggtgcagaaccccggacccccggattcagagcccaggtccagccgcgcttccgcacaaacttgcgctcggagcaagtcccctccttcccagcactcatctgagaccagaggtgtccccaccgtccccgctagcagcgctggttatattgtgggccaacctttaaaaaaataaaaaggaactgttaaaccacaatgctt

SEQ ID NO: 404516 - DNA, 411 bp, Homo sapiens
cttacacctcagtagtacttagattctgctgataagtctaaagttaaatgatcttttatggtagtagaacagtaacagtatccgttataatgttttctccaagaagatatttgtttattcatttttatcaataataataagatagctaatgttacacttgattttacattcaggtggtctgtcttttaaagaagttcttatctttatttctctttctctttcatttattataatccctattagtaaacttttaagtctgcagagaagttttgggaagcatttggaagtagtaggtgatgtactactgagcgtgaggtgaggaacatattagtgcctctatatttttatttggggtagagatgagaccagaaaccactgtttttgtacattggatttgaatatgaaggtgtg

SEQ ID NO: 404517 - DNA, 377 bp, Homo sapiens
aaaggcgaaggatcatacactgggagtcgaacatcaccagtatccagtgattactcgtgggcaccaatgaagatatttgtttattcatttttatcaataataataagatagctaatgttacacttgattttacattcaggtggtctgtcttttaaagaagttcttatctttatttctctttctctttcatttattataatccctattagtaaacttttaagtctgcagagaagttttgggaagcatttggaagtagtaggtgatgtactactgagcgtgaggtgaggaacatattagtgcctctatatttttatttggggtagagatgagaccagaaaccactgtttttgtacattggatttgaatatgaaggtgtg

SEQ ID NO: 404518 - DNA, 543 bp, Homo sapiens
atataatatggcataaaaactataagtaggccacacattgtggttcacacctgtaatcctagcactttgggaagccaaggtgggcagataggttgagtccaggagttcaagaccagccttggcaacatgataaaatcccatctctataaaaaattttaaaaattagctaggcatggtggcatgcaccaatagttccagctacatgggaggctgaggtaggaggactacttgagcctgggaggcaaaggtcgcagtgggccatgattgtgccaccacactccagccagggcaacagagcaagcaagatcctatcaatcccaacactttgggaagctgaggcaggaggattgctagaggccaggagtttgagattgtcctgggcaacacagtgagaccccattttaacaaataattagccaggcatgccaggtgcggtggctcacgcctgtaatcccagcactttgggaggccaaggcgggtgaatcacctaaggtcgggagttcgacaccagcctgaccaacatggagaaaccccgtctctact

SEQ ID NO: 404519 - DNA, 696 bp, Homo sapiens
cagtaatcagaagttgttttgaatgaaatgttttaaatatttttggacaaacgtcaaatgggaaagtattagttgcccctttggtcatttgtatttaatagttgtatgcaaaaagaagttggaatcaatgaaatggtgacataatacaggcaaccttccctttttgaggattaagttgaaaatagtgaaggtcactttccattctgtaaacaaaaggggcagatttggctagaagaatactacctaccatttttcattgattctgatatgtccattttttcacatttctgaaatttgggtacatcctgaaattggtagcatattttagttgaaactatttttttctagcttgggagcacataaaataatggtgtgtgttacgatcaattatagagtcttagatcaatgaaatgggatttttgaaggtaagaggtagatgagaattccctcagacctgggcccgacttcatatctttctggttctgctgtgttggcaaaaccactggagcaaaaacatggtggcagtttgccttcactggccctgagtatgacaaaaagttgttcacttgttgtagtcaacccattgtagcacctttcataagttaaggagggtgatcttttatcagatacctttgtgactgcttgaatatgctgagaatatatcatgattatttcagcaacactgaactttctccc

SEQ ID NO: 404520 - DNA, 729 bp, Homo sapiens
tccatttgggcattgctcagctcccccacctgttaatagcaaacaccaatctcaagcccctgccccaatctgctacaaggggttagtgttccatgcagtgggagtgcagggaaggctttacaggagaggagggagttgaaatgggcctggaggcctgggatggtagacactggatccttttcccccacagctcctggctgtttcttcacactcccagcatcactattactgctagcatgtctttagcatcattttgccctccctctgactttcagcaagcctgcacttacctccaaataaatgcatgttttcggggggcaaaggcaggttccttccttaccttattgttgcttcccccaccccatgctgcagctgagtgggtgacctttctcctcacctccgtgtgccgcatctctcacctagtctctgttaggaaccctacaggagcctgcaccccagtaaccccattttatgctgcttggaggaagagacagagagtttgagaggtcccagttcttttcagtgtgtgtttggttcccccacttctcaaagctgagagcttctttgttttaagagccacttggttaagtcaagagcattagaagagtaaaaagaagaatacaattagataattttacctaaacatgctatagtcgactagggagtcacatagacattgattttctaatgagggcgctgttggtgattctttttgtgtgtaaagatgct

SEQ ID NO: 404521 - DNA, 195 bp, Homo sapiens
agaaaagggagaagtatcaggttgtgaaggcatgctgagtgtcagaaatgaactctacttctggctattctagttccttgagacaataaatttcttctttttttttttttttggctgagtttgtgttgggttttctgttctttgagattgatagggtcctaactggtatagaaatgataataattgttgttgaag

SEQ ID NO: 404522 - DNA, 182 bp, Homo sapiens
gctttcaggtagacaccattttttgtaaaaagttttaagaaaccatgtatcaaattgcattataattttatgcaccaaaccaaaagatagatactgtcataatactaaatgcgatagagagctgcctaagatggccagctcaatgaatcttgggcatcacccacacaccactgaaaattctg

SEQ ID NO: 404523 - DNA, 781 bp, Homo sapiens
caatgagcatgtgctttcagctgggtttgacatcaatacacctgacaaccttggccgtacctgtcttcatgctgctgcttccggagggaatgttgaatgtcttaatttgctgttgagcagtggagctgacttgaggaggagggacaaatttggcaggaccccactgcactatgcagctgctaacggtagctaccagtgtgcagtaacattggtgactgctggggcaggtgtcaacgaggccgactgtaaaggctgctctcccctccactacgctgccgcttctgacacttacaggagagcggaaccccatacaccttccagccatgatgccgaagaggacgagccactgaaggagtcccgcaggaaggaggccttcttctgtctggagttcttactggataacggtgcagacccctccctgcgggacaggcagggctacacagctgtgcactatgcagccgcctatggcaacagacagaacctcgaactgctcttagaaatgtcctttaactgcctggaggatgtggagagcaccattccagtcagccctttgcacttagctgcctacaacggtcactgtgaagccttgaagacgctggcggagacgctggtgaatctggacgtaagggaccacaagggccggaccgcactcttcctggccacggagcgcggctctactgagtgtgtggaggtgcttacagcccacggcgcctctgccctcatcaaggagcgcaagcgcaagtggacacccctgcacgctgctggttagtgcccactttag

SEQ ID NO: 404524 - DNA, 493 bp, Homo sapiens
aagagaaagaaggaaggcatctatgaacagccaaagttatttctgcttttgggtttagagcatatgccatgcagaatttttaaaagcaagcagataaaggcctatggagctcactggaagagtgagacatgttatatggtagtttgcattacaggtgaaccaatctctttagagtacccaacaccagaagtttcatgaaaaagaaagtagcataacttatgtgtaggttttacggacataaacttcccaaagttcagatccccacaagatgatcttacataaattacttaacatcttccttattcattaaataaggatacagtttgtatagtaaatgaaagtatatttgttaagcactaagcacactgcctaggacacacctgaaatactaaaaaaaatggtgaccaccttatttccctcttctattttttttctaagactagtaaagtgcagcagtgagaagggaggaaaagtagaacaaggagttctatct

SEQ ID NO: 404525 - DNA, 224 bp, Homo sapiens
gtgagtctggtggcacaattccctccgatttcagacaacttctttccaccatttcacaatatcacacaaactgcccccttccgacacccacttccacacccacttccacatcaatctcaagtattctttaaccacgggacatcagtaaaactgtgcttctgtctttcttcgatttgtatctttggttttacgcattcctgacagcgtttcagtgttatgtcact

SEQ ID NO: 404526 - DNA, 523 bp, Homo sapiens
tcttcttcctcgggtttcaagtatttcccttcttcatgttgttccacctctcttgttacgaaattccaccttccaggcctctttccaaagaggaaactttgaagtcctcactgttttcggactcccacccctttgtgccccttggctaatgctgaccttccctcctaacacctcccctgtgatggatgtggcttcctcagggtaaactggactttcgctgtgccttggcttccttcgcttctctttttccttattcttaggttctcccaaagtgctgggattacaggtacgaggcactgagcccggccagtggaaccactttctatagtgtgcccatactgggccttggacatctttcctagtttggtacctgctgtttacttaacagcatgctactgtgtatctgtgccatcttgtcacacttgtctttgtaatgttgcctaactctggctctccagatttgtacattacgactttattgtaaatcagagaaggtcaataaatttacttctttcaaatttcc

SEQ ID NO: 404527 - DNA, 399 bp, Homo sapiens
agatgctgacagatagtgggtacctaataaataattgtccaattaactgacttagatatgagtatgctgagtatggtaatagaattgtaggttctttcatggcttgggggattgtttgaataattctgtcagccaaaaagaaaagaagtgctgggattacaggtacgaggcactgagcccggccagtggaaccactttctatagtgtgcccatactgggccttggacatctttcctagtttggtacctgctgtttacttaacagcatgctactgtgtatctgtgccatcttgtcacacttgtctttgtaatgttgcctaactctggctctccagatttgtacattacgactttattgtaaatcagagaaggtcaataaatttacttctttcaaatttcc

SEQ ID NO: 404528 - DNA, 525 bp, Homo sapiens
ggagattgtcagaagcttaggaaattttatgttcacaaaatagcttacacacacacatacacactagtaagccatcccaggatgcaccttagttatcatgctacttaaacagctacagtcatgtagatcatctgggtgttggaaacattgagggcaagaatatgaacaagtacatcacaaatctgagattggacctgatagctgtgtcttagagagaattcccatcctgtctgtctcctctcatgtccattcttgtatgggacagacaaatttaaaattccagatggtgccatttgttatgggacctttagtactctttgggtggtaaggtatgctaaatcatttattaccatgaaataaagtacttatattcaccctacaagtgggctctgtctttcttagctattacagtgcagtaatcaaaagatgagtttgccagatgaaattagcagattgagcaggagaaaggcagtgaagttgcaattgagctacagggttcctattttggtattagaagcaaatttt

SEQ ID NO: 404529 - DNA, 191 bp, Homo sapiens
tctgatggttttatcaggggtttctgattttgcattttcctcattctctcttcgcctgctgccatccacggaagacaggacttgctcctccttgccttccgcgatgaagattgtgaggcttccccagccgcatggaactgtaagtccaattaaacctctttcttttgtaagttgcccagtcttagggatgt

SEQ ID NO: 404530 - DNA, 554 bp, Homo sapiens
taacagaacattttggggggaaagctaatctttttggcagtgctgctcaattggtggaaaggaatgactgagcttttcttaggaacaggttagtgcagtgaaactggttaacttacagtattttgggttcctctcagaaaggaggagggggctaatgcaaaataaagagaagggcttgaaatccatctccatgcctcctggagcacagccaagttcagaaaactctatattgtctcaacttattattattattttttaaattcagatatttattatgcatcctctgtgttcccaacacaccattctagccactgggggtacagcattaaaggaagtaggcaacagccttgccctaatggagctcacattcttatgggggacaagataaattttaaaatatgttgtatgttaagtagaaaaccaaagcagaggagggtgattggtgtttgggtgtgagtgtgtgtgtgttgtatgtttgcatatgttgggggtgagatacagattgtaaaaagtggtcaggaagggaatggtttcttttctggttctgaaccctc

SEQ ID NO: 404531 - DNA, 417 bp, Homo sapiens
gtttagaaaggccaagtttcttaatttccagttcccttctttctctacaccacactgtcttctttcttctttgtaccatttgcctgctacatttagagttatgcaaatagccttattactgaaattagaaagtttaaaagttgctgccagaagttgaaacattttcatggaatcccctattgccaatacatgtgattaattttgctcatttaagtttttggtatagtgtttcaggattggcttaacgaatttctccatttggcctactatctgaagaaaatgagtaaacacagaattccttctgtattggcagttttgttgcagttttaactggacataaatcaaaattaccacagtgtctccaaaggcaagtttataccagcatactagtaattataattattgaagtctgttcca

SEQ ID NO: 404532 - DNA, 345 bp, Homo sapiens
ctctctgggcctctatgttcgcatatgcaaaaatggggataattataacaaggctgttgtgaggactaattagtgagtacagtgcctggtgcagcgtaagcactcactaaatgtcaattaatatcatcatcaccaaatgtctggtttgctttttgtctcaggaaagggcctagaacaaatcatcctgcagcccacggggtctggctctgcccaccgccccttcttcctgcagctcctctcccggcctgggaacttcttcctgctgagccaccgcagtggctttcctgctgccctctagtgaccacatcctgcggtgcagcctcgtagtcccgtcatcgctgctgt

SEQ ID NO: 404533 - DNA, 311 bp, Homo sapiens
gaacaaatcactgaagttaatagcatacttttgtatttaaaaaattaacttaagtgcttgctttggcagcatatatactaaatttggattatgatttatatgtaataaaactcactcatgagtttagccaaatatatacagtgttataaccaccatacaatcaagataagaacatttcccatagcacaaaaactttcctcatacattcttagatcaaaagcctgcccctactcacactgatcctccttctcaccctaaagattacttttgtctgggttccttttgctattgaaacttctaaaactaggggg

SEQ ID NO: 404534 - DNA, 338 bp, Homo sapiens
tgaatctatagatgtggaatccatggatgaggagggccaaccatattttcctctgtatgacactggtatactttatatacaagaataatagaaattaagttcggtggttgtctgaacagttaagagtttgaactagataatttctatgttcaaacactgattcagcaggtctttagccgtacctgctatgtgccagaccctggtctaggtgctaggaatgtgagaagcctttggaggggacgcagagccgtcatagatctactcgggaagttgtgaaagacttcttagagaaagtagcattagagccaggccttggagagggtaggatctctgttggc

SEQ ID NO: 404535 - DNA, 748 bp, Homo sapiens
gcgctgtgtgctttgttgtgcgctgtgttctacgtgctctgtgctgtgcgctgtgctgtgtgctgagctgtgctggcatcgttctcactcctcctggtggctgtgggaggatggactgtttaagaagagatgtgtaccattggcagtgagctgagattgtgccattgcactccagcctggacaacaagagtgaaactccatctcaaaacaaaacaaaaaagaaatgaagatgaaaaaaatcaaggcccatggcccagttgaaactcttttgaatgaagtggaggaggcaggatctgtgtgatttgagagtccaggctctgagtcaggactgcctcccggcaacacacaacagcaacaaacacagagtgcaatcttagggaaatgccaagaccttcaccttgagcgtgtgcatgcgctgctctacagaacccaggaggcgccttccgcccacccacagcatcacttcactgaacatggagttgggaagagacctgcgcaatcggttctttctgttggcaggcgcctcccccagcacacctctggatagttccccgtcttcagagaagagcttcctgcaattataccgtagtatctgcagcagcatcaccaaaatgtggccatactggaatccctgaggcggagcagctggacccgagggctcactgattgtgcggttgggagcgggcgtctcgcaggcttgcagagatcagcttttgttgcgccaggagctgatgcttaatggccaagc

SEQ ID NO: 404536 - DNA, 358 bp, Homo sapiens
taataaattgatattcttaaaaggaacttaagcagttaccccaggtgtccacattcttgaaatatatcattttcttaaaagttacaagaaaaccattgatggttcctagcaagctcctaactctgttgcataaagaaattcttattcccaagggccctttgatttctacagttaaaagatattcagtaatacaaccactgagttctgaaatggcatatgttccaagtacaggggaatcaacagtaagaataaaataaagattcttccatccaactaagagaaataccctgcatggtgagaaattccagatgaactctgcattgatcccattggttagcatttggtaaatgtttgtcag

SEQ ID NO: 404537 - DNA, 368 bp, Homo sapiens
actctactaaaaatacaaaaattagctgggcttggtggtgcatgcctgtaatcccagctactcaggaggatgaggcaggagaatcacttgaacccgggaggcagaggttgcagtgagccaagatcacgccactgcactccagcctgggatgacagagcaaaactccgtctcaaaacaaaacaaacaaacaaaaaagtgataaagagatcatgaaggcagacagagacacgaaggtgggactggcagtaggatgctcatcagtaaccaaataaggcacagtaaaacatgcttaaactcctgggagaaaaatatcaacgcaggattctctttctagcaaaaatacctcagaaaccaacctaggcaagatg

SEQ ID NO: 404538 - DNA, 253 bp, Homo sapiens
gatacgctcttcgaagtccgcagaagacttaactgatggttcatatgatgatgttctaaatgctgaacaacttcagaaactcctttacctgctggagtcaactgaggatcctgtaattattgaaagagctttgattactttgggtaacaatgcagccttttcagttaaccaagctattattcgtgaattgggtggtattccaattgttgcaaacaaaatcaaccattccaaccagagtattaaagacaaagct

SEQ ID NO: 404539 - DNA, 294 bp, Homo sapiens
gtggggtggggtacaaataatgtgctgtggtgtcagatgtttgcaggcatctcagcagagaaaggttcccggtcctgatccatctcccactgcaactctatgtatctttacagtcatcccgtttatctggtatagtgaacatggcccagggtgggggtacaggtgagcctttttctgttttgtttttgtttttctgagccatttttgccccaaggaagagtgagtgttagaagtatcaaagggtgataaatgcttacaaatgccaagcaagaggtaagtaataataatctgtca

SEQ ID NO: 404540 - DNA, 346 bp, Homo sapiens
gctggtgaatggatttgatgcaatggaagacaatttattgtttctcacattcactcaagggttcactgtgactgtttataatcaagttttattcagtattattctcttcagcagagaatcagaaaactggcctttggagagttgcttaagcatgattgatagcattgggaatcagaaaacaataccccaaaatgaaggtctcagaagcaaaagtttttctctgacctctcctgccctcctgcccctcggtcccattctcccaaggaagggagccttacaaatttgaatcttccccaaagctggtcatagaaaccaaaacccctttaaaacctcaaaatattactgg

SEQ ID NO: 404541 - DNA, 266 bp, Homo sapiens
ttaaggatacctagtaaaggctaaaatcagagggctgagtgtgttggctcacacctgtaatcccagcactttggtctcaaacccctgatcccaagtgatccgtcctcctcagcctcccaaagtgtggggattacaggctgaggcaccctgcccagactgtataatcctagcactttgggaagctgaggtgggaggatcgcttgaagccaggagtttgagaccagcctgggcaacaaagtgagactcccgtctctaccaaaaaaaaa

SEQ ID NO: 404542 - DNA, 362 bp, Homo sapiens
taaatccactattagccaggatggtagaaaaagaagtacaaaatccccaaagtatgataaagttgtccaatctctggagcccgatcttaaacactagaaatctataaaactattcataagctttaataaaataattttgaattacaatgcaaaataatttttggcttatcttaaatcctttgtgaaaaaggtcagtgaggcagggttaactgtatacataaatacatgcataaatacctacctctaaatttattattttgtaatttattatgtttgtataatttttgttttttgagatggggtctcttgtcacccaggctgaatacagtgccatgatcaaagctcactgcagccttgacctc

SEQ ID NO: 404543 - DNA, 541 bp, Homo sapiens
tttatacactgagccagaagctttggaattattactactctggcttagagaacatatttataaatattcttttggggaaataacctttcctgtctttaaaataaggtaggcccactgcaaataattccataagtaacctttcctatgccacccatgggcattgggcagtagagcctcaaaatccagttaatatttaaagaggacagtctgaatatagggaatcatgaaactatctctctatgcttggagagatttttaatttgacaatgtaaataggaagtaatatttagagagatactttaacaaagagataacagaaaatctacaagttccatcttaatgagaaattggtatttctaaagacgtgagaagacatctgcttctgatcaagatgaactaacaggggctgcatttaccgggtcaccaaaaataacaaacaaaatataaaatgggtgggcacagtgattcacacctgtaatcccagcactctggaaggccgaggtgggatgattgcctgagcccaggagttccagaccagcct

SEQ ID NO: 404544 - DNA, 938 bp, Homo sapiens
caatgtagctcatgttggaaaagcagtcagggaagtactttaagagtatatcctagtactccttagcctgaagcctctgtaaaagggagcccagataaggcactttgggaaatttgctgcaaggctgctggggagaggaagcgccctgcctcactctcagtatagtcaaggctcagcgttttgaataacctctcggtctcaaaacaactgctgtgatttgatccaatgtggtagtagctctctgggtctctaattgggttccccgagctctctcaatgcttagctctttttttctttctgtaaagggagttttcagttaatttgcaggcctgccgttctgtgcccaagagctgaactcttgaggcgtccgcctgggacttggcgggctcactttagttttgttttctgttctctttgtggtggtcttagttataagcgcctggaaacatgcccttaactgcagggcaagtgcttgcttcacaagccctgctagacaggaaaaaggaggaagaaagcacactggggtttatgacatagctacaaactatcctcaatttttaaatagccaaaacctggacacatcctacatacctgtcagcataagaatagattttaaaaattgtgatattcacacaatagaatactactcagcaagaaaaaggagtatgtttctaacacacatcatggataaatctcaaaagcatggtgagcaagataagttagatataaaataaaatgtggagttctagaaaagacaaaatttctggtggtaaaaatcacaatagaaattacctttgaatggtgaagacagacaagacagcatgaggaaggaacttttctagagtggcaaaaatgttctgtatactgattgggagtggtgtttacatgagtataaacatttgacaaaaaagtttaccaggcaaggtggggtgtacttg

SEQ ID NO: 404545 - DNA, 884 bp, Homo sapiens
caatgtagctcatgttggaaaagcagtcagggaagtactttaagagtatatcctagtactccttagcctgaagcctctgtaaaagggagcccagataaggcactttgggaaatttgctgcaaggctgctggggagaggaagcgccctgcctcactctcagtatagtcaaggctcagcgttttgaataacctctcggtctcaaaacaactgctgtgatttgatccaatgtggtagtatttctttctgtaaagggagttttcagttaatttgcaggcctgccgttctgtgcccaagagctgaactcttgaggcgtccgcctgggacttggcgggctcactttagttttgttttctgttctctttgtggtggtcttagttataagcgcctggaaacatgcccttaactgcagggcaagtgcttgcttcacaagccctgctagacaggaaaaaggaggaagaaagcacactggggtttatgacatagctacaaactatcctcaatttttaaatagccaaaacctggacacatcctacatacctgtcagcataagaatagattttaaaaattgtgatattcacacaatagaatactactcagcaagaaaaaggagtatgtttctaacacacatcatggataaatctcaaaagcatggtgagcaagataagttagatataaaataaaatgtggagttctagaaaagacaaaatttctggtggtaaaaatcacaatagaaattacctttgaatggtgaagacagacaagacagcatgaggaaggaacttttctagagtggcaaaaatgttctgtatactgattgggagtggtgtttacatgagtataaacatttgacaaaaaagtttaccaggcaaggtggggtgtacttg

SEQ ID NO: 404546 - DNA, 884 bp, Homo sapiens
caatgtagctcatgttggaaaagcagtcagggaagtactttaagagtatatcctagtactccttagcctgaagcctctgtaaaagggagcccagataaggcactttgggaaatttgctgcaaggctgctggggagaggaagcgccctgcctcactctcagtatagtcaaggctcagcgttttgaataacctctcggtctcaaaacaactgctgtgatttgatccaatgtggtagtagctctctgggtctctaattgggttccccgagctctctcaatgcttagctctttttttctttctgtaaagggagttttcagttaatttgcaggcctgccgttctgtgcccaagagctgaactcttgaggcgtccgcctgggacttggcgggctcactttagttttgttttctgttctctttgtggtggtcttagttataagcgcctggaaacatgcccttaactgcagggcaagtgcttgcttcacaagccctgctagacaggaaaaagtaaatagccaaaacctggacacatcctacatacctgtcagcataagaatagattttaaaaattgtgatattcacacaatagaatactactcagcaagaaaaaggagtatgtttctaacacacatcatggataaatctcaaaagcatggtgagcaagataagttagatataaaataaaatgtggagttctagaaaagacaaaatttctggtggtaaaaatcacaatagaaattacctttgaatggtgaagacagacaagacagcatgaggaaggaacttttctagagtggcaaaaatgttctgtatactgattgggagtggtgtttacatgagtataaacatttgacaaaaaagtttaccaggcaaggtggggtgtacttg

SEQ ID NO: 404547 - DNA, 455 bp, Homo sapiens
ggctcttggctgtagctaaggatagaaaacagctctaatttttgaaattcaggacagagatgattaagaagcatcgatgctcagaggtggttcagaagtacagggatgctgctaggaacatacgctcagacgtgcattttttcagaacatccgtcagtcggccactattacattccacctgtatatgaggagcaaaatggaaacacgtgacctcaagactaatggatggagtctcatggcaagagctgtctaaaggccgcagctgcaaagctacgagactccagcttccggggattctatgaatgtatctacgaatccttacgggacacccaagggcctggcgctgggtctaaagctctgcatctaagctcttgctcagagtcacaggtcaatgtcatcgaacacagcagcacaggccctggtcagcagcagtccagtaaggaagccatggggag

SEQ ID NO: 404548 - DNA, 141 bp, Homo sapiens
ttgtctttgttacctctaggtcccccttcaatttgtattagtttctatttttcacattggaagcttccatccccacagcctgctgattcctagcttgacatttgtatctaagaatgaggagctggttggaagattgcaaag

SEQ ID NO: 404549 - DNA, 435 bp, Homo sapiens
gagatttggatggggtcacagccaaaccatatcactgaggtatcaaggaattctttgctaaagacaaaaaaaaaaaaaatcactgaggttaacactttgaaatacaaaggtgacaaaagaggttagtcttgtcctcagggaataccagttgatataagggagcaaaatcagatagaaagataacttcaagagaataagcttttgaaatgaccatatgaggagcaaaccaatgtttgattactgattagagaaagcagaggttacttctacttggggtcatcatcaaacaagatgatttggaagaggagcaagcatctctttaagccttagagaatgatgggattgttagaagagcttttattttattttgaaatggggtcttactctgtctctccagcctgggcaacaagagcgaaactccatctcaaaaaaaaa

SEQ ID NO: 404550 - DNA, 507 bp, Homo sapiens
atatgttcccagatgtgatccaggaacattccatggaactggaggggcagtgcctggcttttctggccccccctcctctcaacccacatgagccttccccttgtctgggggttggaaagccaataaaggcagagcctgttgtgtaaccacacaccatcccgccaggtctctttcagaactgcagttcagaaacaataactccttgctgttagcatgacttcctggagggatatttccagataaggtggcttgggccagccacacctacttttttttcttctaagtacttttaatttgtatatttgaaccatttatatttaaagtgataattgatgtagttgaattaatatctactatatttgctactgttttctacttattgctcttgttctttctgcctatttttctcttcaactcatttttctgccagttgtgtttttaattgagcatttttaatgatttcattttctcttttcttagtgtagcaattatacttaaaaaaaaaaa

SEQ ID NO: 404551 - DNA, 1019 bp, Homo sapiens
aaaccactcactggctttgtctagcaaagtctgggcagctacgaggatgttttgctgcattttgccctttttatttttaaaattttcatggaaaatggacaaattactgcaaatacttgtggggcaaaagatgggcctcataaattgaataaaactgagaacagagagaactcagtaggcacatcaggcccgcaactctcacctcaaggaatgcttgttggccttggctcggttgactggatgtacagttgcgaagaaaaaacaaaatgaaagaacatgtataaaatactgaaaaacaggccaggtgcggtggctcacgcctataatcccagcactttgggtggtcaagggcagaggattgcttgagcccaggaattcaagaccagtctgggcaacatggtgaaaccctatctctataattgaaaactcagccgggagcagtggtgcacacctgtagtcctagctgctcgggaggctgaagtaggattgaggctccaatgaaccgtgatcgcgccactgcactccagcctaaggagcagagcaagactctgtctcaaaaaaaagaaaaaaaaaaaaaaaaaaaaaaaaaaaaaaaaccaaaaaaaaaaaacaaaggaagaaaaagacaaccacccctacacacgaggaagaaaaagaaaaacaaaatacaaaaaagagggcgagaaaaaagatgacaagaggggaacaagaagggggcaaaaagagaggagcaccaggaaagaccaaagaaaataggaggaaaagaagagacaccaaggaagcagacagaaaaacagagaagggaccaacataaggggagaaaaagaaccagaggggtaagaagagaacgaggcaaaaagaaacagaaaagagagggaaacaccagagagcagaaagagagaaggaagaaaggagagaaatgagccgaaaagaggaggacccagggatgcaaaaaaggggagagaaggaacaggaacgggagcaacacaaataggaaaaatggacacagcgcgggcaag

SEQ ID NO: 404552 - DNA, 333 bp, Homo sapiens
agtggcacaatctcagctcactgcaacctccgcctcccgggttcaagcaattcttttgaattcaagtcttttgaattcttctgagcccagaaaaggtcttttctggaaatgcgttctttcctggacatgaagggggcattctcaattccccagcatacctgggtttttctgagtatcctaatttctgaaagaaatttttctcctcagcttttcttcccaggctttagatggtctatcatatgtctcagccataatctgttggctcaggtagcttcagggtttttgtttactttatgacatttcaagcagttgctgcccttttttttcctcaaa

SEQ ID NO: 404553 - DNA, 423 bp, Homo sapiens
gttaaattgtcacccatgattcggtggagtttgagctgcactctccatagaagactctggaggctgaactggggtcttctgctgggtctgagaaggttcaacctccccaggaaactcagaaggctgagctggctgctgctgcttactggaggaaggttcagctgccacaggaggacctggaggctcagccggagtcccttggtgggttgctgcagatttaatctcctcagggtgctctggtatctgagctggggcctctaattgggttgaggaagagtccacctccttgggtttctctggaggctgagctgtgggtcgttctactcaatttcgaccatacctgtaaccatgcctttgcctagaccgtactcctatttttttcttatttaacaaattatagctaatttttaagccccaggtaaa

SEQ ID NO: 404554 - DNA, 556 bp, Homo sapiens
ccgacttcttacagatgtccggttggtaggaggtacagtgaaaacttataaacaaataaataacaaaattctaggatatatctatttccaacaaaattggaatctttatcttaaatagaccttgaggccgggcacggtggctcacgcctgtaatcccagcactttgggaggctgagactggtggatcacctgaggtcgggagttcgagaccagcctgaccaacatggagaaaccccgtctctactaaaaatgcaaaattagccaggcgtggtggtacatgcctgtaatcccagctactcgggaggctgaagcagaagaatcgcttgaacccaggaggcagaggttgtggtgagctgagatcgcgccactgcactccagcctggcaacagagcaagaatccatctcaaaacaaaacaaaacaaataccatatttttgaaggataaaacaaataccatatttttgccactcagaaaaaaatgatggacattttgtcatataaaaccagacagtaataaccatctgtgggactgtacccaagacccaacaccccttctg

SEQ ID NO: 404555 - DNA, 449 bp, Homo sapiens
tctctctggttgcttgctctgggggaagctggccaccatgctatggggacacttaagtagcccaagagaggcccctacatgggatagaactgaggctccaagctaacagccaggaccaacttgtcagctatgccagtgagccccatggaagtaaatcctctagcctttgttaagcctacagatgactgcagccccagccaacatccgactacaaacacatgagacccgaagccagaagcactcagctgaacaacttccaaatatctgacccacacatagcatgagaatacatgagaaaatacatgattattattgttttaagacaccactctacatctcagggtattttgttataaatcaagagacaatgcagtgctactaatagaggtatgtattttaagtgttctatagactgaactaatgacttataaattgaaatcttgctttct

SEQ ID NO: 404556 - DNA, 469 bp, Homo sapiens
agagcggcgcctactactactatgctggcgaagaagacgacagaagggggcttttttttttcttatttactcactcattaaaatacttttcattactctaacacatgttataaagaaatagttggaaaagtacatcgaaagacttttaaaaatatttggtaactagtaaaaggactaccatcgaaaatcaactcaaaaaattgtccttttatgggttagctgtattataatacatatctatcatttgcccctgtgtcttagaggatataatttgaccagctctacatttaatctgtgtaattatgagactgttttacaacaatcttgatgcagagttggtaggttaagaaatttgtattacagaagttaaaaaaaaaaaaccaaaaactagatttttaggtttattttacaggcattcttatttaacacttaaagattttgatttccagttattaaaatggtagcttta

SEQ ID NO: 404557 - DNA, 426 bp, Homo sapiens
ttgaatctaggctggcttgtgatggttttgaccaatagagtgtgcctgaaatgacactcttctcatgaggtcctaaagatcatgtgtccttaaaccagttctcttggaacactcagtcttagaacattccctctccaaacccagataccatgctgtgaagtccaggccacatggaggtgtcctgtgtagatgctccagctgaaatcccaagctaagctcccaactgacagccaacatcatttccagccatgtgtgggagccatcctggatgtccagccttaacaagccttcagaggacttcagccacagctattatcttactacatccttgtgagactctaataaagaaccaactagctgagcccaatcaacctatggaactgatagaaataaaatgaattgttgttttgtgccgctatgttttgg

SEQ ID NO: 404558 - DNA, 414 bp, Homo sapiens
ataatgtgctttagaaaagaggcctcaatgttaaaatactttcacactttttgagaaaagatctaattagaatatgaaagaaattgccattgcggggaaaatggtctgaaatcacggtaacatttcttttctctctttttaaaaatcagatctttggcgttgccagttccttttaccttttgtgagtttaggtttgatgtgctttggggctttgatcggactttgtgcttgcatttgccgaagcttatatcccaccattgccacgggcattctccatctccttgcagcaatgtgacagggcagttaatacgtgaacatttcagatttataactctttggtccctaaagagacaggaagaagctaaaaggtaagtatgatgacaaaacctacctgcaaggaagatgggtccgacg

SEQ ID NO: 404559 - DNA, 2184 bp, Homo sapiens
taaggctaggtacgaggctggggttaattcggccgaggctcggcccgggccgcggcccggcccggagtgggggcgggcggaggcgcgggagttatggagggggcgggctctgcagggaagtgcgtcagaggaggcgcggggagagtagggtgctgtggtctgagctagagggtgaagctggcggagcaggaggatgggcgagcagtctgaatgccagaatggataaccgttttgctacagcatttgtaattgcttgtgtgcttagcctcatttccaccatctacatggcagcctccattggcacagacttctggtatgaatatcgaagtccagttcaagaaaattccagtgatttgaataaaagcatctgggatgaattcattagtgatgaggcagatgaaaagacttataatgatgcactttttcgatacaatggcacagtgggattgtggagacggtgtatcaccatacccaaaaacatgcattggtatagcccaccagaaaggacagagtcatttgatgtggtcacaaaatgtgtgagtttcacactaactgagcagttcatggagaaatttgttgatcccggaaaccacaatagcgggattgatctccttaggacctatctttggcgttgccagttccttttaccttttgtgagtttaggtttgatgtgctttggggctttgatcggactttgtgcttgcatttgccgaagcttatatcccaccattgccacgggcattctccatctccttgcaggtctgtgtacactgggctcagtaagttgttatgttgctggaattgaactactccaccagaaactagagctccctgacaatgtatccggtgaatttggatggtccttctgcctggcttgtgtctctgctcccttacagttcatggcttctgctctcttcatctgggctgctcacaccaaccggaaagagtacaccttaatgaaggcatatcgtgtggcatgagcaagaaactgcctgctttacaattgccatttttatttttttaaaataatactgatattttccccacctctcaattgtttttaatttttatttgtggatataccattttattatgaaaatctattttatttatacacattcaccactaaatacacacttaataccactaaaatttatgtggtttactttaagcgatgccatctttcaaataaactaatctaggtctagacagaaagaaatggatagagacttgacacaaatttatgaaagaaaattgggagtaggaatgtgaccgaaaacaagttgtgctaatgtctgttagacttttcagtaaaactaaagtaactgtatctgttcaactaaaaactctatattagtttctttgggaaacctctcatcgtcaaaactttatgttcactttgctgttgtagatagccagtcaaccagcagtattagtgctgttttcaaagatttaagctctataaaattgggaaattatctaagatcattttccctaagcattgacacatagcttcatctgaggtgagatatggcagctgtttgtatctgcactgtgtctgtctacaaaaagtgaaaaatacagtgtttacttgaaattttaactttgtaactgcaagaattccagttcagccgggcgaggattagtattatttttaactctccgtaagattttcagtaccaccaaattgttttggattttttttctttcctcttcacataccagggttattaaaagtgtgctttctttttacattatattacagttacaaggtaaaattcctcaactgctatttatttattccagcccagtactataaagaacgtttcaccataatgaccctccagagctgggaaacctaccacaagatctaaagttctggctgtccattaacctccaactatggtctttatttcttgtggtaatatgatgtgcctttccttgcctaaatcccttcctggtgtgtatcaacattatttaatgtcttctaattcagtcatttttttataagtatgtctataaacattgaactttaaaaaacttatttatttattccactactgtagcaattgacagattaaaaaaatgtaacttcataatttcttaccataacctcaatgtcttttttaaaaaataaaattaaaataaaattaaaaatgaaaagagactcaaaaaaaaatagag

SEQ ID NO: 404560 - DNA, 2182 bp, Homo sapiens
  misc_feature (2146)..(2146): n is a, c, g, or t
  misc_feature (2150)..(2151): n is a, c, g, or t
taaggctaggtacgaggctggggttaattcggccgaggctcggcccgggccgcggcccggcccggagtgggggcgggcggaggcgcgggagttatggagggggcgggctctgcagggaagtgcgtcagaggaggcgcggggagagtagggtgctgtggtctgagctagagggtgaagctggcggagcaggaggatgggcgagcagtctgaatgccagaatggataaccgttttgctacagcatttgtaattgcttgtgtgcttagcctcatttccaccatctacatggcagcctccattggcacagacttctggtatgaatatcgaagtccagttcaagaaaattccagtgatttgaataaaagcatctgggatgaattcattagtgatgaggcagatgaaaagacttataatgatgcactttttcgatacaatggcacagtgggattgtggagacggtgtatcaccatacccaaaaacatgcattggtatagcccaccagaaaggacagagtcatttgatgtggtcacaaaatgtgtgagtttcacactaactgagcagttcatggagaaatttgttgatcccggaaaccacaatagcgggattgatctccttaggacctatctttggcgttgccagttccttttaccttttgtgagtttaggtttgatgtgctttggggctttgatcggactttgtgcttgcatttgccgaagcttatatcccaccattgccacgggcattctccatctccttgcaggtctgtgtacactgggctcagtaagttgttatgttgctggaattgaactactccaccagaaactagagctccctgacaatgtatccggtgaatttggatggtccttctgcctggcttgtgtctctgctcccttacagttcatggcttctgctctcttcatctgggctgctcacaccaaccggaaagagtacaccttaatgaaggcatatcgtgtggcatgagcaagaaactgcctgctttacaattgccatttttatttttttaaaataatactgatattttccccacctctcaattgtttttaatttttatttgtggatataccattttattatgaaaatctattttatttatacacattcaccactaaatacacacttaataccactaaaatttatgtggtttactttaagcgatgccatctttcaaataaactaatctaggtctagacagaaagaaatggatagagacttgacacaaatttatgaaagaaaattgggagtaggaatgtgaccgaaaacaagttgtgctaatgtctgttagacttttcagtaaaactaaagtaactgtatctgttcaactaaaaactctatattagtttctttgggaaacctctcatcgtcaaaactttatgttcactttgctgttgtagatagccagtcaaccagcagtattagtgctgttttcaaagatttaagctctataaaattgggaaattatctaagatcattttccctaagcattgacacatagcttcatctgaggtgagatatggcagctgtttgtatctgcactgtgtctgtctacaaaaagtgaaaaatacagtgtttacttgaaattttaactttgtaactgcaagaattccagttcagccgggcgaggattagtattatttttaactctccgtaagattttcagtaccaccaaattgttttggattttttttctttcctcttcacataccagggttattaaaagtgtgctttctttttacattatattacagttacaaggtaaaattcctcaactgctatttatttattccagcccagtactataaagaacgtttcaccataatgaccctccagagctgggaaacctaccacaagatctaaagttctggctgtccattaacctccaactatggtctttatttcttgtggtaatatgatgtgcctttccttgcctaaatcccttcctggtgtgtatcaacattatttaatgtcttctaattcagtcatttttttataagtatgtctataaacattgaactttaaaaaacttatttatttattccactactgtagcaattgacagattaaaaaaatgtaacttcataatttcttaccataacctcaatgtcttttttaaaaaataaaattaaaancatnnttggaataatatgaacctccctcccacccct

SEQ ID NO: 404561 - DNA, 2478 bp, Homo sapiens
taaggctaggtacgaggctggggttaattcggccgaggctcggcccgggccgcggcccggcccggagtgggggcgggcggaggcgcgggagttatggagggggcgggctctgcagggaagtgcgtcagaggaggcgcggggagagtagggtgctgtggtctgagctagagggtgaagctggcggagcaggaggatgggcgagcagtctgaatgccagaatggataaccgttttgctacagcatttgtaattgcttgtgtgcttagcctcatttccaccatctacatggcagcctccattggcacagacttctggtatgaatatcgaagtccagttcaagaaaattccagtgatttgaataaaagcatctgggatgaattcattagtgatgaggcagatgaaaagacttataatgatgcactttttcgatacaatggcacagtgggattgtggagacggtgtatcaccatacccaaaaacatgcattggtatagcccaccagaaaggacagagtcatttgatgtggtcacaaaatgtgtgagtttcacactaactgagcagttcatggagaaatttgttgatcccggaaaccacaatagcgggattgatctccttaggacctatctttggcgttgccagttccttttaccttttgtgagtttaggtttgatgtgctttggggctttgatcggactttgtgcttgcatttgccgaagcttatatcccaccattgccacgggcattctccatctccttgcaggtctgtgtacactgggctcagtaagttgttatgttgctggaattgaactactccaccagaaactagagctccctgacaatgtatccggtgaatttggatggtccttctgcctggcttgtgtctctgctcccttacagttcatggcttctgctctcttcatctgggctgctcacaccaaccggaaagagtacaccttaatgaaggcatatcgtgtggcatgagcaagaaactgcctgctttacaattgccatttttatttttttaaaataatactgatattttccccacctctcaattgtttttaatttttatttgtggatataccattttattatgaaaatctattttatttatacacattcaccactaaatacacacttaataccactaaaatttatgtggtttactttaagcgatgccatctttcaaataaactaatctaggtctagacagaaagaaatggatagagacttgacacaaatttatgaaagaaaattgggagtaggaatgtgaccgaaaacaagttgtgctaatgtctgttagacttttcagtaaaactaaagtaactgtatctgttcaactaaaaactctatattagtttctttgggaaacctctcatcgtcaaaactttatgttcactttgctgttgtagatagccagtcaaccagcagtattagtgctgttttcaaagatttaagctctataaaattgggaaattatctaagatcattttccctaagcattgacacatagcttcatctgaggtgagatatggcagctgtttgtatctgcactgtgtctgtctacaaaaagtgaaaaatacagtgtttacttgaaattttaactttgtaactgcaagaattccagttcagccgggcgaggattagtattatttttaactctccgtaagattttcagtaccaccaaattgttttggattttttttctttcctcttcacataccagggttattaaaagtgtgctttctttttacattatattacagttacaaggtaaaattcctcaactgctatttatttattccagcccagtactataaagaacgtttcaccataatgaccctccagagctgggaaacctaccacaagatctaaagttctggctgtccattaacctccaactatggtctttatttcttgtggtaatatgatgtgcctttccttgcctaaatcccttcctggtgtgtatcaacattatttaatgtcttctaattcagtcatttttttataagtatgtctataaacattgaactttaaaaaacttatttatttattccactactgtagcaattgacagattaaaaaaatgtaacttcataatttcttaccataacctcaatgtcttttttaaaaaataaaattaaaaaaaaaaaaaaaaaaaaaaaaaaaaaaaattgggggggggctacggaccaccgagaaaagttttataacaacacttacggttgggacgcgccgcaccagtgtaaatgaaaacctgcatcaggtgtaccaaggagagactcgggggcagacaactagggcgtgggacttaccaataaaaaaaagcgcggagaccggggctctcgacaacatacaggagtggatcggggctagcggattcacgaggggacggaacgatttagccgaccgagtgaaggaaaacgataagacaagagcacagacacgtcaaaaagtcgacgaagcacagaaaccacaa

SEQ ID NO: 404562 - DNA, 2119 bp, Homo sapiens
taaggctaggtacgaggctggggttaattcggccgaggctcggcccgggccgcggcccggcccggagtgggggcgggcggaggcgcgggagttatggagggggcgggctctgcagggaagtgcgtcagaggaggcgcggggagagtagggtgctgtggtctgagctagagggtgaagctggcggagcaggaggatgggcgagcagtctgaatgccagaatggataaccgttttgctacagcatttgtaattgcttgtgtgcttagcctcatttccaccatctacatggcagcctccattggcacagacttctggtatgaatatcgaagtccagttcaagaaaattccagtgatttgaataaaagcatctgggatgaattcattagtgatgaggcagatgaaaagacttataatgatgcactttttcgatacaatggcacagtgggattgtggagacggtgtatcaccatacccaaaaacatgcattggtatagcccaccagaaaggacagagtcatttgatgtggtcacaaaatgtgtgagtttcacactaactgagcagttcatggagaaatttgttgatcccggaaaccacaatagcgggattgatctccttaggacctatctttggcgttgccagttccttttaccttttgtgagtttaggtttgatgtgctttggggctttgatcggactttgtgcttgcatttgccgaagcttatatcccaccattgccacgggcattctccatctccttgcaggtctgtgtacactgggctcagtaagttgttatgttgctggaattgaactactccaccagaaactagagctccctgacaatgtatccggtgaatttggatggtccttctgcctggcttgtgtctctgctcccttacagttcatggcttctgctctcttcatctgggctgctcacaccaaccggaaagagtacaccttaatgaaggcatatcgtgtggcatgagcaagaaactgcctgctttacaattgccatttttatttttttaaaataatactgatattttccccacctctcaattgtttttaatttttatttgtggatataccattttattatgaaaatctattttatttatacacattcaccactaaatacacacttaataccactaaaatttatgtggtttactttaagcgatgccatctttcaaataaactaatctaggtctagacagaaagaaatggatagagacttgacacaaatttatgaaagaaaattgggagtaggaatgtgaccgaaaacaagttgtgctaatgtctgttagacttttcagtaaaactaaagtaactgtatctgttcaactaaaaactctatattagtttctttgggaaacctctcatcgtcaaaactttatgttcactttgctgttgtagatagccagtcaaccagcagtattagtgctgttttcaaagatttaagctctataaaattgggaaattatctaagatcattttccctaagcattgacacatagcttcatctgaggtgagatatggcagctgtttgtatctgcactgtgtctgtctacaaaaagtgaaaaatacagtgtttacttgaaattttaactttgtaactgcaagaattccagttcagccgggcgttctttcctcttcacataccagggttattaaaagtgtgctttctttttacattatattacagttacaaggtaaaattcctcaactgctatttatttattccagcccagtactataaagaacgtttcaccataatgaccctccagagctgggaaacctaccacaagatctaaagttctggctgtccattaacctccaactatggtctttatttcttgtggtaatatgatgtgcctttccttgcctaaatcccttcctggtgtgtatcaacattatttaatgtcttctaattcagtcatttttttataagtatgtctataaacattgaactttaaaaaacttatttatttattccactactgtagcaattgacagattaaaaaaatgtaacttcataatttcttaccataacctcaatgtcttttttaaaaaataaaattaaaataaaattaaaaatgaaaagagactcaaaaaaaaatagag

SEQ ID NO: 404563 - DNA, 2130 bp, Homo sapiens
taaggctaggtacgaggctggggttaattcggccgaggctcggcccgggccgcggcccggcccggagtgggggcgggcggaggcgcgggagttatggagggggcgggctctgcagggaagtgcgtcagaggaggcgcggggagagtagggtgctgtggtctgagctagagggtgaagctggcggagcaggaggatgggcgagcagtctgaatgccagaatggataaccgttttgctacagcatttgtaattgcttgtgtgcttagcctcatttccaccatctacatggcagcctccattggcacagacttctggtatgaatatcgaagtccagttcaagaaaattccagtgatttgaataaaagcatctgggatgaattcattagtgatgaggcagatgaaaagacttataatgatgcactttttcgatacaatggcacagtgggattgtggagacggtgtatcaccatacccaaaaacatgcattggtatagcccaccagaaaggacagagtcatttgatgtggtcacaaaatgtgtgagtttcacactaactgagcagttcatggagaaatttgttgatcccggaaaccacaatagcgggattgatctccttaggacctatctttggcgttgccagttccttttaccttttgtgagtttaggtttgatgtgctttggggctttgatcggactttgtgcttgcatttgccgaagcttatatcccaccattgccacgggcattctccatctccttgcaggtctgtgtacactgggctcagtaagttgttatgttgctggaattgaactactccaccagaaactagagctccctgacaatgtatccggtgaatttggatggtccttctgcctggcttgtgtctctgctcccttacagttcatggcttctgctctcttcatctgggctgctcacaccaaccggaaagagtacaccttaatgaaggcatatcgtgtggcatgagcaagaaactgcctgctttacaattgccatttttatttttttaaaataatactgatattttccccacctctcaattgtttttaatttttatttgtggatataccattttattatgaaaatctattttatttatacacattcaccactaaatacacacttaataccactaaaatttatgtggtttactttaagcgatgccatctttcaaataaactaatctaggtctagacagaaagaaatggatagagacttgacacaaatttatgaaagaaaattgggagtaggaatgtgaccgaaaacaagttgtgctaatgtctgttagacttttcagtaaaactaaagtaactgtatctgttcaactaaaaactctatattagtttctttgggaaacctctcatcgtcaaaactttatgttcactttgctgttgtagatagccagtcaaccagcagtattagtgctgttttcaaagatttaagctctataaaattgggaaattatctaagatcattttccctaagcattgacacatagcttcatctgaggtgagatatggcagctgtttgtatctgcactgtgtctgtctacaaaaagtgaaaaatacagtgtttacttgaaattttaactttgtaactgcaagaattccagttcagccgggcgaggattagtattatttttaactctccgtaagattttcagtaccaccaaattgttttggattttttttctttcctcttcacataccagggttattaaaagtgtgctttctttttacattatattacagttacaaggtaaaattcctcaactgctatttatttattccagcccagtactataaagaacgtttcaccataatgaccctccagagctgggaaacctaccacaagatctaaagttctggctgtccattaacctccaactatggtctttatttcttgtggtaatatgatgtgcctttccttgcctaatttataagtatgtctataaacattgaactttaaaaaacttatttatttattccactactgtagcaattgacagattaaaaaaatgtaacttcataatttcttaccataacctcaatgtcttttttaaaaaataaaattaaaataaaattaaaaatgaaaagagactcaaaaaaaaatagag

SEQ ID NO: 404564 - DNA, 3376 bp, Homo sapiens
taaggctaggtacgaggctggggttaattcggccgaggctcggcccgggccgcggcccggcccggagtgggggcgggcggaggcgcgggagttatggagggggcgggctctgcagggaagtgcgtcagaggaggcgcggggagagtagggtgctgtggtctgagctagagggtgaagctggcggagcaggaggatgggcgggagtgagcgggacctgcgtcgccgggcaggggtcgcgtcgcggttccatgttcccggcggtttgaagaggggcccccttcccgggcgtggtcgggctgggcgggttccgagcggcggatttgtcccagggccgagccctctagggcggggcctggtcgggtaccgggggaccctggcccggggccgagcacggctgccccgccccagccctggccttctccggccccgccgtgaggcccaggaggtggctgctgcaggcgtccggcttggacgaaccgccgttcccagtgctgggaccctttaaggtcatttgagagcaccaggatgaaggggggatttttaaaaaatcaaaatacaaatccaactttttgagttttcgttgtcattgctcttatctttcctgagtcacttcccattttccaaactcagcaaccccagtttgcgagtctgttttcatgaacctttgtaaggtgtttggtgcggtcacggtgtatacttgccgtgtagtatttgactcagcgcgatctgccttgagtcattttaccgcggccatttactactgccgttgagccctgtccacgccttgggagtgttgatatgttgagagttttctgtctggctgaggagggatcatttagtttttgcggacgtatgttgcactgaggatttagggagagagcaagatttctgttgaggaggttcagaagtataaggaatcgggagagtagataggagtgaagcatttggcagcgtaaagaagcttggcttagctttaatggattagggagagattgctatctagcattattacatgttattgttctctttgctattttatacacctagaacaacctttccctcggggttaacaaacatcttcaactctgttttctgtatggctcctgactcttacctttgttttaggaggcttccctcttcagaggaaactgggagaagccaatttccactgcttctttttcctgtgcctttttaacactcaaacccagaacacttaatcctctgcagctcgtgcaaaaattcagtctgtaatttaaaatgtgtgcacggtacactgctgaccatgggcatgtctattgtttgtatctgtaatgtgtatgtccatttcagtgttgtctgttttatgcaggtgatagactagagaacaagacctctgtctccgtagcatcctggagcagtctgaatgccagaatggataaccgttttgctacagcatttgtaattgcttgtgtgcttagcctcatttccaccatctacatggcagcctccattggcacagacttctggtatgaatatcgaagtccagttcaagaaaattccagtgatttgaataaaagcatctgggatgaattcattagtgatgaggcagatgaaaagacttataatgatgcactttttcgatacaatggcacagtgggattgtggagacggtgtatcaccatacccaaaaacatgcattggtatagcccaccagaaaggacagagtcatttgatgtggtcacaaaatgtgtgagtttcacactaactgagcagttcatggagaaatttgttgatcccggaaaccacaatagcgggattgatctccttaggacctatctttggcgttgccagttccttttaccttttgtgagtttaggtttgatgtgctttggggctttgatcggactttgtgcttgcatttgccgaagcttatatcccaccattgccacgggcattctccatctccttgcaggtctgtgtacactgggctcagtaagttgttatgttgctggaattgaactactccaccagaaactagagctccctgacaatgtatccggtgaatttggatggtccttctgcctggcttgtgtctctgctcccttacagttcatggcttctgctctcttcatctgggctgctcacaccaaccggaaagagtacaccttaatgaaggcatatcgtgtggcatgagcaagaaactgcctgctttacaattgccatttttatttttttaaaataatactgatattttccccacctctcaattgtttttaatttttatttgtggatataccattttattatgaaaatctattttatttatacacattcaccactaaatacacacttaataccactaaaatttatgtggtttactttaagcgatgccatctttcaaataaactaatctaggtctagacagaaagaaatggatagagacttgacacaaatttatgaaagaaaattgggagtaggaatgtgaccgaaaacaagttgtgctaatgtctgttagacttttcagtaaaactaaagtaactgtatctgttcaactaaaaactctatattagtttctttgggaaacctctcatcgtcaaaactttatgttcactttgctgttgtagatagccagtcaaccagcagtattagtgctgttttcaaagatttaagctctataaaattgggaaattatctaagatcattttccctaagcattgacacatagcttcatctgaggtgagatatggcagctgtttgtatctgcactgtgtctgtctacaaaaagtgaaaaatacagtgtttacttgaaattttaactttgtaactgcaagaattccagttcagccgggcgaggattagtattatttttaactctccgtaagattttcagtaccaccaaattgttttggattttttttctttcctcttcacataccagggttattaaaagtgtgctttctttttacattatattacagttacaaggtaaaattcctcaactgctatttatttattccagcccagtactataaagaacgtttcaccataatgaccctccagagctgggaaacctaccacaagatctaaagttctggctgtccattaacctccaactatggtctttatttcttgtggtaatatgatgtgcctttccttgcctaaatcccttcctggtgtgtatcaacattatttaatgtcttctaattcagtcatttttttataagtatgtctataaacattgaactttaaaaaacttatttatttattccactactgtagcaattgacagattaaaaaaatgtaacttcataatttcttaccataacctcaatgtcttttttaaaaaataaaattaaaataaaattaaaaatgaaaagagactcaaaaaaaaatagag

SEQ ID NO: 404565 - DNA, 2490 bp, Homo sapiens
taaggctaggtacgaggctggggttaattcggccgaggctcggcccgggccgcggcccggcccggagtgggggcgggcggaggcgcgggagttatggagggggcgggctctgcagggaagtgcgtcagaggaggcgcggggagagtagggtgctgtggtctgagctagagggtgaagctggcggagcaggaggatgggcgggagtgagcgggacctgcgtcgccgggcaggggtcgcgtcgcggttccatgttcccggcggtttgaagaggggcccccttcccgggcgtggtcgggctgggcgggttccgagcggcggatttgtcccagggccgagccctctagggcggggcctggtcgggtaccgggggaccctggcccggggccgagcacggctgccccgccccagccctggccttctccggccccgccgtgaggcccaggaggtggctgctgcaggcgtccggcttggacgaaccgccgttcccagtgctgggaccctttaagagcagtctgaatgccagaatggataaccgttttgctacagcatttgtaattgcttgtgtgcttagcctcatttccaccatctacatggcagcctccattggcacagacttctggtatgaatatcgaagtccagttcaagaaaattccagtgatttgaataaaagcatctgggatgaattcattagtgatgaggcagatgaaaagacttataatgatgcactttttcgatacaatggcacagtgggattgtggagacggtgtatcaccatacccaaaaacatgcattggtatagcccaccagaaaggacagagtcatttgatgtggtcacaaaatgtgtgagtttcacactaactgagcagttcatggagaaatttgttgatcccggaaaccacaatagcgggattgatctccttaggacctatctttggcgttgccagttccttttaccttttgtgagtttaggtttgatgtgctttggggctttgatcggactttgtgcttgcatttgccgaagcttatatcccaccattgccacgggcattctccatctccttgcaggtctgtgtacactgggctcagtaagttgttatgttgctggaattgaactactccaccagaaactagagctccctgacaatgtatccggtgaatttggatggtccttctgcctggcttgtgtctctgctcccttacagttcatggcttctgctctcttcatctgggctgctcacaccaaccggaaagagtacaccttaatgaaggcatatcgtgtggcatgagcaagaaactgcctgctttacaattgccatttttatttttttaaaataatactgatattttccccacctctcaattgtttttaatttttatttgtggatataccattttattatgaaaatctattttatttatacacattcaccactaaatacacacttaataccactaaaatttatgtggtttactttaagcgatgccatctttcaaataaactaatctaggtctagacagaaagaaatggatagagacttgacacaaatttatgaaagaaaattgggagtaggaatgtgaccgaaaacaagttgtgctaatgtctgttagacttttcagtaaaactaaagtaactgtatctgttcaactaaaaactctatattagtttctttgggaaacctctcatcgtcaaaactttatgttcactttgctgttgtagatagccagtcaaccagcagtattagtgctgttttcaaagatttaagctctataaaattgggaaattatctaagatcattttccctaagcattgacacatagcttcatctgaggtgagatatggcagctgtttgtatctgcactgtgtctgtctacaaaaagtgaaaaatacagtgtttacttgaaattttaactttgtaactgcaagaattccagttcagccgggcgaggattagtattatttttaactctccgtaagattttcagtaccaccaaattgttttggattttttttctttcctcttcacataccagggttattaaaagtgtgctttctttttacattatattacagttacaaggtaaaattcctcaactgctatttatttattccagcccagtactataaagaacgtttcaccataatgaccctccagagctgggaaacctaccacaagatctaaagttctggctgtccattaacctccaactatggtctttatttcttgtggtaatatgatgtgcctttccttgcctaaatcccttcctggtgtgtatcaacattatttaatgtcttctaattcagtcatttttttataagtatgtctataaacattgaactttaaaaaacttatttatttattccactactgtagcaattgacagattaaaaaaatgtaacttcataatttcttaccataacctcaatgtcttttttaaaaaataaaattaaaataaaattaaaaatgaaaagagactcaaaaaaaaatagag

SEQ ID NO: 404566 - DNA, 1557 bp, Homo sapiens
taaggctaggtacgaggctggggttaattcggccgaggctcggcccgggccgcggcccggcccggagtgggggcgggcggaggcgcgggagttatggagggggcgggctctgcagggaagtgcgtcagaggaggcgcggggagagtagggtgctgtggtctgagctagagggtgaagctggcggagcaggaggatgggcgagcagtctgaatgccagaatggataaccgttttgctacagcatttgtaattgcttgtgtgcttagcctcatttccaccatctacatggcagcctccattggcacagacttctggtatgaatatcgaagtccagttcaagaaaattccagtgatttgaataaaagcatctgggatgaattcattagtgatgaggcagatgaaaagacttataatgatgcactttttcgatacaatggcacagtgggattgtggagacggtgtatcaccatacccaaaaacatgcattggtatagcccaccagaaaggacagagtcatttgatgtggtcacaaaatgtgtgagtttcacactaactgagcagttcatggagaaatttgttgatcccggaaaccacaatagcgggattgatctccttaggacctatctttggcgttgccagttccttttaccttttgtgagtttaggtttgatgtgctttggggctttgatcggactttgtgcttgcatttgccgaagcttatatcccaccattgccacgggcattctccatctccttgcaggtctgtgtacactgggctcagtaagttgttatgttgctggaattgaactactccaccagaaactagagctccctgacaatgtatccggtgaatttggatggtccttctgcctggcttgtgtctctgctcccttacagttcatggcttctgctctcttcatctgggctgctcacaccaaccggaaagagtacaccttaatgaaggcatatcgtgtggcatgagcaagaaactgcctgctttacaattgccattaggattagtattatttttaactctccgtaagattttcagtaccaccaaattgttttggattttttttctttcctcttcacataccagggttattaaaagtgtgctttctttttacattatattacagttacaaggtaaaattcctcaactgctatttatttattccagcccagtactataaagaacgtttcaccataatgaccctccagagctgggaaacctaccacaagatctaaagttctggctgtccattaacctccaactatggtctttatttcttgtggtaatatgatgtgcctttccttgcctaaatcccttcctggtgtgtatcaacattatttaatgtcttctaattcagtcatttttttataagtatgtctataaacattgaactttaaaaaacttatttatttattccactactgtagcaattgacagattaaaaaaatgtaacttcataatttcttaccataacctcaatgtcttttttaaaaaataaaattaaaataaaattaaaaatgaaaagagactcaaaaaaaaatagag

SEQ ID NO: 404567 - DNA, 1819 bp, Homo sapiens
tgaagcgggctggaacaggaggatgggcgacgagcagtctgaatgccagaatggataaccgttttgctacagcatttgtaattgcttgtgtgcttagcctcatttccaccatctacatggcagcctccattggcacagacttctgagtcatttgatgtggtcacaaaatgtgtgagtttcacactaactgagcagttcatggagaaatttgttgatcccggaaaccacaatagcgggattgatctccttaggacctatctttggcgttgccagttccttttaccttttgtgagtttaggtttgatgtgctttggggctttgatcggactttgtgcttgcatttgccgaagcttatatcccaccattgccacgggcattctccatctccttgcaggtctgtgtacactgggctcagtaagttgttatgttgctggaattgaactactccaccagaaactagagctccctgacaatgtatccggtgaatttggatggtccttctgcctggcttgtgtctctgctcccttacagttcatggcttctgctctcttcatctgggctgctcacaccaaccggaaagagtacaccttaatgaaggcatatcgtgtggcatgagcaagaaactgcctgctttacaattgccatttttatttttttaaaataatactgatattttccccacctctcaattgtttttaatttttatttgtggatataccattttattatgaaaatctattttatttatacacattcaccactaaatacacacttaataccactaaaatttatgtggtttactttaagcgatgccatctttcaaataaactaatctaggtctagacagaaagaaatggatagagacttgacacaaatttatgaaagaaaattgggagtaggaatgtgaccgaaaacaagttgtgctaatgtctgttagacttttcagtaaaactaaagtaactgtatctgttcaactaaaaactctatattagtttctttgggaaacctctcatcgtcaaaactttatgttcactttgctgttgtagatagccagtcaaccagcagtattagtgctgttttcaaagatttaagctctataaaattgggaaattatctaagatcattttccctaagcattgacacatagcttcatctgaggtgagatatggcagctgtttgtatctgcactgtgtctgtctacaaaaagtgaaaaatacagtgtttacttgaaattttaactttgtaactgcaagaattccagttcagccgggcgaggattagtattatttttaactctccgtaagattttcagtaccaccaaattgttttggattttttttctttcctcttcacataccagggttattaaaagtgtgctttctttttacattatattacagttacaaggtaaaattcctcaactgctatttatttattccagcccagtactataaagaacgtttcaccataatgaccctccagagctgggaaacctaccacaagatctaaagttctggctgtccattaacctccaactatggtctttatttcttgtggtaatatgatgtgcctttccttgcctaaatcccttcctggtgtgtatcaacattatttaatgtcttctaattcagtcatttttttataagtatgtctataaacattgaactttaaaaaacttatttatttattccactactgtagcaattgacagattaaaaaaatgtaacttcataatttcttaccataacctcaatgtcttttttaaaaaataaaattaaaataaaattaaaaatgaaaagagactcaaaaaaaaatagag

SEQ ID NO: 404568 - DNA, 2125 bp, Homo sapiens
taaggctaggtacgaggctggggttaattcggccgaggctcggcccgggccgcggcccggcccggagtgggggcgggcggaggcgcgggagttatggagggggcgggctctgcagggaagtgcgtcagaggaggcgcggggagagtagggtgctgtggtctgagctagagggtgaagctggcggagcaggaggatgggcgagcagtctgaatgccagaatggataaccgttttgctacagcatttgtaattgcttgtgtgcttagcctcatttccaccatctacatggcagcctccattggcacagacttctggtatgaatatcgaagtccagttcaagaaaattccagtgatttgaataaaagcatctgggatgaattcattagtgatgaggcagatgaaaagacttataatgatgcactttttcgatacaatggcacagtgggattgtggagacggtgtatcaccatacccaaaaacatgcattggtatagcccaccagaaaggacagaaatttgttgatcccggaaaccacaatagcgggattgatctccttaggacctatctttggcgttgccagttccttttaccttttgtgagtttaggtttgatgtgctttggggctttgatcggactttgtgcttgcatttgccgaagcttatatcccaccattgccacgggcattctccatctccttgcaggtctgtgtacactgggctcagtaagttgttatgttgctggaattgaactactccaccagaaactagagctccctgacaatgtatccggtgaatttggatggtccttctgcctggcttgtgtctctgctcccttacagttcatggcttctgctctcttcatctgggctgctcacaccaaccggaaagagtacaccttaatgaaggcatatcgtgtggcatgagcaagaaactgcctgctttacaattgccatttttatttttttaaaataatactgatattttccccacctctcaattgtttttaatttttatttgtggatataccattttattatgaaaatctattttatttatacacattcaccactaaatacacacttaataccactaaaatttatgtggtttactttaagcgatgccatctttcaaataaactaatctaggtctagacagaaagaaatggatagagacttgacacaaatttatgaaagaaaattgggagtaggaatgtgaccgaaaacaagttgtgctaatgtctgttagacttttcagtaaaactaaagtaactgtatctgttcaactaaaaactctatattagtttctttgggaaacctctcatcgtcaaaactttatgttcactttgctgttgtagatagccagtcaaccagcagtattagtgctgttttcaaagatttaagctctataaaattgggaaattatctaagatcattttccctaagcattgacacatagcttcatctgaggtgagatatggcagctgtttgtatctgcactgtgtctgtctacaaaaagtgaaaaatacagtgtttacttgaaattttaactttgtaactgcaagaattccagttcagccgggcgaggattagtattatttttaactctccgtaagattttcagtaccaccaaattgttttggattttttttctttcctcttcacataccagggttattaaaagtgtgctttctttttacattatattacagttacaaggtaaaattcctcaactgctatttatttattccagcccagtactataaagaacgtttcaccataatgaccctccagagctgggaaacctaccacaagatctaaagttctggctgtccattaacctccaactatggtctttatttcttgtggtaatatgatgtgcctttccttgcctaaatcccttcctggtgtgtatcaacattatttaatgtcttctaattcagtcatttttttataagtatgtctataaacattgaactttaaaaaacttatttatttattccactactgtagcaattgacagattaaaaaaatgtaacttcataatttcttaccataacctcaatgtcttttttaaaaaataaaattaaaataaaattaaaaatgaaaagagactcaaaaaaaaatagag

SEQ ID NO: 404569 - DNA, 3265 bp, Homo sapiens
taaggctaggtacgaggctggggttaattcggccgaggctcggcccgggccgcggcccggcccggagtgggggcgggcggaggcgcgggagttatggagggggcgggctctgcagggaagtgcgtcagaggaggcgcggggagagtagggtgctgtggtctgagctagagggtgaagctggcggagcaggaggatgggcgggagtgagcgggacctgcgtcgccgggcaggggtcgcgtcgcggttccatgttcccggcggtttgaagaggggcccccttcccgggcgtggtcgggctgggcgggttccgagcggcggatttgtcccagggccgagccctctagggcggggcctggtcgggtaccgggggaccctggcccggggccgagcacggctgccccgccccagccctggccttctccggccccgccgtgaggcccaggaggtggctgctgcaggcgtccggcttggacgaaccgccgttcccagtgctgggaccctttaaggtcatttgagagcaccaggatgaaggggggatttttaaaaaatcaaaatacaaatccaactttttgagttttcgttgtcattgctcttatctttcctgagtcacttcccattttccaaactcagcaaccccagtttgcgagtctgttttcatgaacctttgtaaggtgtttggtgcggtcacggtgtatacttgccgtgtagtatttgactcagcgcgatctgccttgagtcattttaccgcggccatttactactgccgttgagccctgtccacgccttgggagtgttgatatgttgagagttttctgtctggctgaggagggatcatttagtttttgcggacgtatgttgcactgaggatttagggagagagcaagatttctgttgaggaggttcagaagtataaggaatcgggagagtagataggagtgaagcatttggcagcgtaaagaagcttggcttagctttaatggattagggagagattgctatctagcattattacatgttattgttctctttgctattttatacacctagaacaacctttccctcggggttaacaaacatcttcaactctgttttctgtatggctcctgactcttacctttgttttaggaggcttccctcttcagaggaaactgggagaagccaatttccactgcttctttttcctgtgcctttttaacactcaaacccagaacacttaatcctctgcagctcgtgcaaaaattcagtctgtaatttaaaatgtgtgcacggtacactgctgaccatgggcatgtctattgtttgtatctgtaatgtgtatgtccatttcagtgttgtctgttttatgcaggtgatagactagagaacaagacctctgtctccgtagcatcctggagcagtctgaatgccagaatggataaccgttttgctacagcatttgtaattgcttgtgtgcttagcctcatttccaccatctacatggcagcctccattggcacagacttctggtatgaatatcgaagtccagttcaagaaaattccagtgatttgaataaaagcatctgggatgaattcattagtgatgaggcagatgaaaagacttataatgatgcactttttcgatacaatggcacagtgggattgtggagacggtgtatcaccatacccaaaaacatgcattggtatagcccaccagaaaggacagatctttggcgttgccagttccttttaccttttgtgagtttaggtttgatgtgctttggggctttgatcggactttgtgcttgcatttgccgaagcttatatcccaccattgccacgggcattctccatctccttgcaggtctgtgtacactgggctcagtaagttgttatgttgctggaattgaactactccaccagaaactagagctccctgacaatgtatccggtgaatttggatggtccttctgcctggcttgtgtctctgctcccttacagttcatggcttctgctctcttcatctgggctgctcacaccaaccggaaagagtacaccttaatgaaggcatatcgtgtggcatgagcaagaaactgcctgctttacaattgccatttttatttttttaaaataatactgatattttccccacctctcaattgtttttaatttttatttgtggatataccattttattatgaaaatctattttatttatacacattcaccactaaatacacacttaataccactaaaatttatgtggtttactttaagcgatgccatctttcaaataaactaatctaggtctagacagaaagaaatggatagagacttgacacaaatttatgaaagaaaattgggagtaggaatgtgaccgaaaacaagttgtgctaatgtctgttagacttttcagtaaaactaaagtaactgtatctgttcaactaaaaactctatattagtttctttgggaaacctctcatcgtcaaaactttatgttcactttgctgttgtagatagccagtcaaccagcagtattagtgctgttttcaaagatttaagctctataaaattgggaaattatctaagatcattttccctaagcattgacacatagcttcatctgaggtgagatatggcagctgtttgtatctgcactgtgtctgtctacaaaaagtgaaaaatacagtgtttacttgaaattttaactttgtaactgcaagaattccagttcagccgggcgaggattagtattatttttaactctccgtaagattttcagtaccaccaaattgttttggattttttttctttcctcttcacataccagggttattaaaagtgtgctttctttttacattatattacagttacaaggtaaaattcctcaactgctatttatttattccagcccagtactataaagaacgtttcaccataatgaccctccagagctgggaaacctaccacaagatctaaagttctggctgtccattaacctccaactatggtctttatttcttgtggtaatatgatgtgcctttccttgcctaaatcccttcctggtgtgtatcaacattatttaatgtcttctaattcagtcatttttttataagtatgtctataaacattgaactttaaaaaacttatttatttattccactactgtagcaattgacagattaaaaaaatgtaacttcataatttcttaccataacctcaatgtcttttttaaaaaataaaattaaaataaaattaaaaatgaaaagagactcaaaaaaaaatagag

SEQ ID NO: 404570 - DNA, 1235 bp, Homo sapiens
aagcagtgtatcaacgcagagtgcccattacggccggggctgcctgctttacaattgccatttttatttttttaaaataatactgatattttccccacctctcaattgtttttaatttttatttgtggatataccattttattatgaaaatctattttatttatacacattcaccactaaatacacacttaataccactaaaatttatgtggtttactttaagcgatgccatctttcaaataaactaatctaggtctagacagaaagaaatggatagagacttgacacaaatttatgaaagaaaattgggagtaggaatgtgaccgaaaacaagttgtgctaatgtctgttagacttttcagtaaaactaaagtaactgtatctgttcaactaaaaactctatattagtttctttgggaaacctctcatcgtcaaaactttatgttcactttgctgttgtagatagccagtcaaccagcagtattagtgctgttttcaaagatttaagctctataaaattgggaaattatctaagatcattttccctaagcattgacacatagcttcatctgaggtgagatatggcagctgtttgtatctgcactgtgtctgtctacaaaaagtgaaaaatacagtgtttacttgaaattttaactttgtaactgcaagaattccagttcagccgggcgaggattagtattatttttaactctccgtaagattttcagtaccaccaaattgttttggattttttttctttcctcttcacataccagggttattaaaagtgtgctttctttttacattatattacagttacaaggtaaaattcctcaactgctatttatttattccagcccagtactataaagaacgtttcaccataatgaccctccagagctgggaaacctaccacaagatctaaagttctggctgtccattaacctccaactatggtctttatttcttgtggtaatatgatgtgcctttccttgcctaaatcccttcctggtgtgtatcaacattatttaatgtcttctaattcagtcatttttttataagtatgtctataaacattgaactttaaaaaacttatttatttattccactactgtagcaattgacagattaaaaaaatgtaacttcataatttcttaccataacctcaatgtcttttttaaaaaataaaattaaaataaaattaaaaatgaaaagagactcaaaaaaaaatagag

SEQ ID NO: 404571 - DNA, 1041 bp, Homo sapiens
taaggctaggtacgaggctggggttaattcggccgaggctcggcccgggccgcggcccggcccggagtgggggcgggcggaggcgcgggagttatggagggggcgggctctgcagggaagtgcgtcagaggaggcgcggggagagtagggtgctgtggtctgagctagagggtgaagctggcggagcaggaggatgggcgagcagtctgaatgccagaatggataaccgttttgctacagcatttgtaattgcttgtgtgcttagcctcatttccaccatctacatggcagcctccattggcacagacttctggtatgaatatcgaagtccagttcaagaaaattccagtgatttgaataaaagcatctgggatgaattcattagtgatgaggcagatgaaaagacttataatgatgcactttttcgatacaatggcacagtgggattgtggagacggtgtatcaccatacccaaaaacatgcattggtatagcccaccagaaaggacagagtcatttgatgtggtcacaaaatgtgtgagtttcacactaactgagcagttcatggagaaatttgttgatcccggaaaccacaatagcgggattgatctccttaggacctatctttggcgttgccagttccttttaccttttgtgagtttaggtttgatgtgctttggggctttgatcggactttgtgcttgcatttgccgaagcttatatcccaccattgccacgggcattctccatctccttgcagataccatgctgtgaagtccaggccacatggaggtgtcctgtgtagatgctccagctgaaatcccaagctaagctcccaactgacagccaacatcatttccagccatgtgtgggagccatcctggatgtccagccttaacaagccttcagaggacttcagccacagctattatcttactacatccttgtgagactctaataaagaaccaactagctgagcccaatcaacctatggaactgatagaaataaaatgaattgttgttttgtgccgctatgttttgg

SEQ ID NO: 404572 - DNA, 1137 bp, Homo sapiens
taaggctaggtacgaggctggggttaattcggccgaggctcggcccgggccgcggcccggcccggagtgggggcgggcggaggcgcgggagttatggagggggcgggctctgcagggaagtgcgtcagaggaggcgcggggagagtagggtgctgtggtctgagctagagggtgaagctggcggagcaggaggatgggcgagcagtctgaatgccagaatggataaccgttttgctacagcatttgtaattgcttgtgtgcttagcctcatttccaccatctacatggcagcctccattggcacagacttctggtatgaatatcgaagtccagttcaagaaaattccagtgatttgaataaaagcatctgggatgaattcattagtgatgaggcagatgaaaagacttataatgatgcactttttcgatacaatggcacagtgggattgtggagacggtgtatcaccatacccaaaaacatgcattggtatagcccaccagaaaggacagagtcatttgatgtggtcacaaaatgtgtgagtttcacactaactgagcagttcatggagaaatttgttgatcccggaaaccacaatagcgggattgatctccttaggacctatctttggcgttgccagttccttttaccttttgtgagtttaggtttgatgtgctttggggctttgatcggactttgtgcttgcatttgccgaagcttatatcccaccattgccacgggcattctccatctccttgcagcccagtactataaagaacgtttcaccataatgaccctccagagctgggaaacctaccacaagatctaaagttctggctgtccattaacctccaactatggtctttatttcttgtggtaatatgatgtgcctttccttgcctaaatcccttcctggtgtgtatcaacattatttaatgtcttctaattcagtcatttttttataagtatgtctataaacattgaactttaaaaaacttatttatttattccactactgtagcaattgacagattaaaaaaatgtaacttcataatttcttaccataacctcaatgtcttttttaaaaaataaaattaaaataaaattaaaaatgaaaagagactcaaaaaaaaatagag

SEQ ID NO: 404573 - DNA, 981 bp, Homo sapiens
taaggctaggtacgaggctggggttaattcggccgaggctcggcccgggccgcggcccggcccggagtgggggcgggcggaggcgcgggagttatggagggggcgggctctgcagggaagtgcgtcagaggaggcgcggggagagtagggtgctgtggtctgagctagagggtgaagctggcggagcaggaggatgggcgagcagtctgaatgccagaatggataaccgttttgctacagcatttgtaattgcttgtgtgcttagcctcatttccaccatctacatggcagcctccattggcacagacttctggtatgaatatcgaagtccagttcaagaaaattccagtgatttgaataaaagcatctgggatgaattcattagtgatgaggcagatgaaaagacttataatgatgcactttttcgatacaatggcacagtgggattgtggagacggtgtatcaccatacccaaaaacatgcattggtatagcccaccagaaaggacagagtcatttgatgtggtcacaaaatgtgtgagtttcacactaactgagcagttcatggagaaatttgttgatcccggaaaccacaatagcgggattgatctccttaggacctgtgagtactttgatttcaccaggacagttgggggaacaaagataattttatttgtctctttttggactatgtttttggaataagatgagttagtagattgtgccaacgtgaaataaaatctctaacagtatccagtgaactctattctgttgatattttagaaggtagatacatgcttaccaaatttcaaatgatttgaagttgacagggccaactacttcattggatgatgggatctagaccttcaaaagatgttattaatgggcccatttagtaaaaggaaatttagttgagataacttatacattcctatatttgaattaaacactttccactgcttgagttcaggtaagtatatgt

SEQ ID NO: 404574 - DNA, 1163 bp, Homo sapiens
taaggctaggtacgaggctggggttaattcggccgaggctcggcccgggccgcggcccggcccggagtgggggcgggcggaggcgcgggagttatggagggggcgggctctgcagggaagtgcgtcagaggaggcgcggggagagtagggtgctgtggtctgagctagagggtgaagctggcggagcaggaggatgggcgagcagtctgaatgccagaatggataaccgttttgctacagcatttgtaattgcttgtgtgcttagcctcatttccaccatctacatggcagcctccattggcacagacttctggtatgaatatcgaagtccagttcaagaaaattccagtgatttgaataaaagcatctgggatgaattcattagtgatgaggcagatgaaaagacttataatgatgcactttttcgatacaatggcacagtgggattgtggagacggtgtatcaccatacccaaaaacatgcattggtatagcccaccagaaaggacaggtatttctcttattttaacttctgtcttcttcacctggttaataatagacaaaacgacgtaatgattgcccaattacatgtaagcaggtttgttggttctctctctccttaaagaaataaatcgtgtatcttctctttctactgccttctctccccaacttctttgcattaccatggtactcatcaatattggttggatgaggaacttttcttatcttgggaaagccttaatggcttttttttttcttatttactcactcattaaaatacttttcattactctaacacatgttataaagaaatagttggaaaagtacatcgaaagacttttaaaaatatttggtaactagtaaaaggactaccatcgaaaatcaactcaaaaaattgtccttttatgggttagctgtattataatacatatctatcatttgcccctgtgtcttagaggatataatttgaccagctctacatttaatctgtgtaattatgagactgttttacaacaatcttgatgcagagttggtaggttaagaaatttgtattacagaagttaaaaaaaaaaaaccaaaaactagatttttaggtttattttacaggcattcttatttaacacttaaagattttgatttccagttattaaaatggtagcttta

SEQ ID NO: 404575 - DNA, 2191 bp, Homo sapiens
taaggctaggtacgaggctggggttaattcggccgaggctcggcccgggccgcggcccggcccggagtgggggcgggcggaggcgcgggagttatggagggggcgggctctgcagggaagtgcgtcagaggaggcgcggggagagtagggtgctgtggtctgagctagagggtgaagctggcggagcaggaggatgggcgagcagtctgaatgccagaatggataaccgttttgctacagcatttgtaattgcttgtgtgcttagcctcatttccaccatctacatggcagcctccattggcacagacttctggtatgaatatcgaagtccagttcaagaaaattccagtgatttgaataaaagcatctgggatgaattcattagtgatgaggcagatgaaaagacttataatgatgcactttttcgatacaatggcacagtgggattgtggagacggtgtatcaccatacccaaaaacatgcattggtatagcccaccagaaaggacagagtcatttgatgtggtcacaaaatgtgtgagtttcacactaactgagcagttcatggagaaatttgttgatcccggaaaccacaatagcgggattgatctccttaggacctatctttggcgttgccagttccttttaccttttgtgagtttaggtttgatgtgctttggggctttgatcggactttgtgcttgcatttgccgaagcttatatcccaccattgccacgggcattctccatctccttgcaggtctgtgtacactgggctcagtaagttgttatgttgctggaattgaactactccaccagaaactagagctccctgacaatgtatccggtgaatttggatggtccttctgcctggcttgtgtctctgctcccttacagttcatggcttctgctctcttcatctgggctgctcacaccaaccggaaagagtacaccttaatgaaggcatatcgtgtggcatgagcaagaaactgcctgctttacaattgccatttttatttttttaaaataatactgatattttccccacctctcaattgtttttaatttttatttgtggatataccattttattatgaaaatctattttatttatacacattcaccactaaatacacacttaataccactaaaatttatgtggtttactttaagcgatgccatctttcaaataaactaatctaggtctagacagaaagaaatggatagagacttgacacaaatttatgaaagaaaattgggagtaggaatgtgaccgaaaacaagttgtgctaatgtctgttagacttttcagtaaaactaaagtaactgtatctgttcaactaaaaactctatattagtttctttgggaaacctctcatcgtcaaaactttatgttcactttgctgttgtagatagccagtcaaccagcagtattagtgctgttttcaaagatttaagctctataaaattgggaaattatctaagatcattttccctaagcattgacacatagcttcatctgaggtgagatatggcagctgtttgtatctgcactgtgtctgtctacaaaaagtgaaaaatacagtgtttacttgaaattttaactttgtaactgcaagaattccagttcagccgggcgaggattagtattatttttaactctccgtaagattttcagtaccaccaaattgttttggattttttttctttcctcttcacataccagggttattaaaagtgtgctttctttttacattatattacagttacaaggtaaaattcctcaactgctatttatttattccagcccagtactataaagaacgtttcaccataatgaccctccagagctgggaaacctaccacaagatctaaagttctggctgtccattaacctccaactatggtctttatttcttgtggtaatatgatgtgcctttccttgcctaaatcccttcctggtgtgtatcaacattatttaatgtcttctaattcagtcatttttttataagtatgtctataaacattgaactttaaaaaacttatttatttattccactactgtagcaattgacagattaaaaaaatgtaacttcataatttcttaccataacctcaatgtcttttttaaaaaataaaattaaaatggcagggaaaacaaactaacttccgtgcactccatataaaaacaa

SEQ ID NO: 404576 - DNA, 2123 bp, Homo sapiens
taaggctaggtacgaggctggggttaattcggccgaggctcggcccgggccgcggcccggcccggagtgggggcgggcggaggcgcgggagttatggagggggcgggctctgcagggaagtgcgtcagaggaggcgcggggagagtagggtgctgtggtctgagctagagggtgaagctggcggagcaggaggatgggcgagcagtctgaatgccagaatggataaccgttttgctacagcatttgtaattgcttgtgtgcttagcctcatttccaccatctacatggcagcctccattggcacagacttctggtatgaatatcgaagtccagttcaagaaaattccagtgatttgaataaaagcatctgggatgaattcattagtgatgaggcagatgaaaagacttataatgatgcactttttcgatacaatggcacagtgggattgtggagacggtgtatcaccatacccaaaaacatgcattggtatagcccaccagaaaggacagagtcatttgatgtggtcacaaaatgtgtgagtttcacactaactgagcagttcatggagaaatttgttgatcccggaaaccacaatagcgggattgatctccttaggacctatctttggcgttgccagttccttttaccttttgtgagtttaggtttgatgtgctttggggctttgatcggactttgtgcttgcatttgccgaagcttatatcccaccattgccacgggcattctccatctccttgcaggtctgtgtacactgggctcagtaagttgttatgttgctggaattgaactactccaccagaaactagagctccctgacaatgtatccggtgaatttggatggtccttctgcctggcttgtgtctctgctcccttacagttcatggcttctgctctcttcatctgggctgctcacaccaaccggaaagagtacaccttaatgaaggcatatcgtgtggcatgagcaagaaactgcctgctttacaattgccatttttatttttttaaaataatactgatattttccccacctctcaattgtttttaatttttatttgtggatataccattttattatgaaaatctattttatttatacacattcaccactaaatacacacttaataccactaaaatttatgtggtttactttaagcgatgccatctttcaaataaactaatctaggtctagacagaaagaaatggatagagacttgacacaaatttatgaaagaaaattgggagtaggaatgtgaccgaaaacaagttgtgctaatgtctgttagacttttcagtaaaactaaagtaactgtatctgttcaactaaaaactctatattagtttctttgggaaacctctcatcgtcaaaactttatgttcactttgctgttgtagatagccagtcaaccagcagtattagtgctgttttcaaagatttaagctctataaaattgggaaattatctaagatcattttccctaagcattgacacatagcttcatctgaggtgagatatggcagctgtttgtatctgcactgtgtctgtctacaaaaagtgaaaaggattagtattatttttaactctccgtaagattttcagtaccaccaaattgttttggattttttttctttcctcttcacataccagggttattaaaagtgtgctttctttttacattatattacagttacaaggtaaaattcctcaactgctatttatttattccagcccagtactataaagaacgtttcaccataatgaccctccagagctgggaaacctaccacaagatctaaagttctggctgtccattaacctccaactatggtctttatttcttgtggtaatatgatgtgcctttccttgcctaaatcccttcctggtgtgtatcaacattatttaatgtcttctaattcagtcatttttttataagtatgtctataaacattgaactttaaaaaacttatttatttattccactactgtagcaattgacagattaaaaaaatgtaacttcataatttcttaccataacctcaatgtcttttttaaaaaataaaattaaaataaaattaaaaatgaaaagagactcaaaaaaaaatagag

SEQ ID NO: 404577 - DNA, 2506 bp, Homo sapiens
taaggctaggtacgaggctggggttaattcggccgaggctcggcccgggccgcggcccggcccggagtgggggcgggcggaggcgcgggagttatggagggggcgggctctgcagggaagtgcgtcagaggaggcgcggggagagtagggtgctgtggtctgagctagagggtgaagctggcggagcaggaggatgggcgagcagtctgaatgccagaatggataaccgttttgctacagcatttgtaattgcttgtgtgcttagcctcatttccaccatctacatggcagcctccattggcacagacttctggtatgaatatcgaagtccagttcaagaaaattccagtgatttgaataaaagcatctgggatgaattcattagtgatgaggcagatgaaaagacttataatgatgcactttttcgatacaatggcacagtgggattgtggagacggtgtatcaccatacccaaaaacatgcattggtatagcccaccagaaaggacagagtcatttgatgtggtcacaaaatgtgtgagtttcacactaactgagcagttcatggagaaatttgttgatcccggaaaccacaatagcgggattgatctccttaggacctatctttggcgttgccagttccttttaccttttgtgagtttaggtttgatgtgctttggggctttgatcggactttgtgcttgcatttgccgaagcttatatcccaccattgccacgggcattctccatctccttgcaggtctgtgtacactgggctcagtaagttgttatgttgctggaattgaactactccaccagaaactagagctccctgacaatgtatccggtgaatttggatggtccttctgcctggcttgtgtctctgctcccttacagttcatggcttctgctctcttcatctgggctgctcacaccaaccggaaagagtacaccttaatgaaggcatatcgtgtggcatgagcaagaaactgcctgctttacaattgccatttttatttttttaaaataatactgatattttccccacctctcaattgtttttaatttttatttgtggatataccattttattatgaaaatctattttatttatacacattcaccactaaatacacacttaataccactaaaatttatgtggtttactttaagcgatgccatctttcaaataaactaatctaggtctagacagaaagaaatggatagagacttgacacaaatttatgaaagaaaattgggagtaggaatgtgaccgaaaacaagttgtgctaatgtctgttagacttttcagtaaaactaaagtaactgtatctgttcaactaaaaactctatattagtttctttgggaaacctctcatcgtcaaaactttatgttcactttgctgttgtagatagccagtcaaccagcagtattagtgctgttttcaaagatttaagctctataaaattgggaaattatctaagatcattttccctaagcattgacacatagcttcatctgaggtgagatatggcagctgtttgtatctgcactgtgtctgtctacaaaaagtgaaaaatacagtgtttacttgaaattttaactttgtaactgcaagaattccagttcagccgggcgaggattagtattatttttaactctccgtaagattttcagtaccaccaaattgttttggattttttttctttcctcttcacataccagggttattaaaagtgtgctttctttttacattatattacagttacaaggtaaaattcctcaactgctatttatttattccagcccagtactataaagaacgtttcaccattaacctccaactatggtctttatttcttgtggtaatatgatgtgcctttccttgcctaaatcccttcctggtgtgtatcaacattatttaatgtcttctaattcagtcatttttttataagtatgtctataaacattgaactttaaaaaacttatttatttattccactactgtagcaattgacagattaaaaaaatgtaacttcataatttcttaccataacctcaatgtcttttttaaaaaataaaattaaaacaccacaaaacaaccagaaacaaacaaacaacattgtgtgggcgggcccgggccccgggaacgtttacaagccccaaaccgggtggagcgccggggccacagaagatgtaaggaaaccgggcaaaggttgtccccaaggaaaccccggggcccagacaaaggggtgggggttttccacccacattaaaaaaaagcggcgggggggcaccgcaggggtttggaaccaactccaaagagcgtcgggaggcactacggggatcatcaacgggggccaggagccattatattacgagtcggggttgtatcagagcacagcgagaaaccagcagcactcaacaaccacagcacgagaccagcattgacaccaaccacaaggcaagaacaccgcgccgacacacgatccacaccaaagcatat

SEQ ID NO: 404578 - DNA, 2541 bp, Homo sapiens
taaggctaggtacgaggctggggttaattcggccgaggctcggcccgggccgcggcccggcccggagtgggggcgggcggaggcgcgggagttatggagggggcgggctctgcagggaagtgcgtcagaggaggcgcggggagagtagggtgctgtggtctgagctagagggtgaagctggcggagcaggaggatgggcgggagtgagcgggacctgcgtcgccgggcaggggtcgcgtcgcggttccatgttcccggcggtttgaagaggggcccccttcccgggcgtggtcgggctgggcgggttccgagcggcggatttgtcccagggccgagccctctagggcggggcctggtcgggtaccgggggaccctggcccggggccgagcacggctgccccgccccagccctggccttctccggccccgccgtgaggcccaggaggtggctgctgcaggcgtccggcttggacgaaccgccgttcccagtgctgggaccctttaagtatgcaggtgatagactagagaacaagacctctgtctccgtagcatcctggagcagtctgaatgccagaatggataaccgttttgctacagcatttgtaattgcttgtgtgcttagcctcatttccaccatctacatggcagcctccattggcacagacttctggtatgaatatcgaagtccagttcaagaaaattccagtgatttgaataaaagcatctgggatgaattcattagtgatgaggcagatgaaaagacttataatgatgcactttttcgatacaatggcacagtgggattgtggagacggtgtatcaccatacccaaaaacatgcattggtatagcccaccagaaaggacagagtcatttgatgtggtcacaaaatgtgtgagtttcacactaactgagcagttcatggagaaatttgttgatcccggaaaccacaatagcgggattgatctccttaggacctatctttggcgttgccagttccttttaccttttgtgagtttaggtttgatgtgctttggggctttgatcggactttgtgcttgcatttgccgaagcttatatcccaccattgccacgggcattctccatctccttgcaggtctgtgtacactgggctcagtaagttgttatgttgctggaattgaactactccaccagaaactagagctccctgacaatgtatccggtgaatttggatggtccttctgcctggcttgtgtctctgctcccttacagttcatggcttctgctctcttcatctgggctgctcacaccaaccggaaagagtacaccttaatgaaggcatatcgtgtggcatgagcaagaaactgcctgctttacaattgccatttttatttttttaaaataatactgatattttccccacctctcaattgtttttaatttttatttgtggatataccattttattatgaaaatctattttatttatacacattcaccactaaatacacacttaataccactaaaatttatgtggtttactttaagcgatgccatctttcaaataaactaatctaggtctagacagaaagaaatggatagagacttgacacaaatttatgaaagaaaattgggagtaggaatgtgaccgaaaacaagttgtgctaatgtctgttagacttttcagtaaaactaaagtaactgtatctgttcaactaaaaactctatattagtttctttgggaaacctctcatcgtcaaaactttatgttcactttgctgttgtagatagccagtcaaccagcagtattagtgctgttttcaaagatttaagctctataaaattgggaaattatctaagatcattttccctaagcattgacacatagcttcatctgaggtgagatatggcagctgtttgtatctgcactgtgtctgtctacaaaaagtgaaaaatacagtgtttacttgaaattttaactttgtaactgcaagaattccagttcagccgggcgaggattagtattatttttaactctccgtaagattttcagtaccaccaaattgttttggattttttttctttcctcttcacataccagggttattaaaagtgtgctttctttttacattatattacagttacaaggtaaaattcctcaactgctatttatttattccagcccagtactataaagaacgtttcaccataatgaccctccagagctgggaaacctaccacaagatctaaagttctggctgtccattaacctccaactatggtctttatttcttgtggtaatatgatgtgcctttccttgcctaaatcccttcctggtgtgtatcaacattatttaatgtcttctaattcagtcatttttttataagtatgtctataaacattgaactttaaaaaacttatttatttattccactactgtagcaattgacagattaaaaaaatgtaacttcataatttcttaccataacctcaatgtcttttttaaaaaataaaattaaaataaaattaaaaatgaaaagagactcaaaaaaaaatagag

SEQ ID NO: 404579 - DNA, 2012 bp, Homo sapiens
ggagcatcgtgtgatccattgtcggggctgtctgaaatgccagagggggtcagtcgtatacgcgacagcatttgtaattgcttgtgtgcttagcctcatttccaccatctacatggcagcctccattggcacagacttctggtatgaatatcgaagtccagttcaagaaaattccagtgatttgaataaaagcatctgggatgaattcattagtgatgaggcagatgaaaagacttataatgatgcactttttcgatacaatggcacagtgggattgtggagacggtgtatcaccatacccaaaaacatgcattggtatagcccaccagaaaggacagagtcatttgatgtggtcacaaaatgtgtgagtttcacactaactgagcagttcatggagaaatttgttgatcccggaaaccacaatagcgggattgatctccttaggacctatctttggcgttgccagttccttttaccttttgtgagtttaggtttgatgtgctttggggctttgatcggactttgtgcttgcatttgccgaagcttatatcccaccattgccacgggcattctccatctccttgcaggtctgtgtacactgggctcagtaagttgttatgttgctggaattgaactactccaccagaaactagagctccctgacaatgtatccggtgaatttggatggtccttctgcctggcttgtgtctctgctcccttacagttcatggcttctgctctcttcatctgggctgctcacaccaaccggaaagagtacaccttaatgaaggcatatcgtgtggcatgagcaagaaactgcctgctttacaattgccatttttatttttttaaaataatactgatattttccccacctctcaattgtttttaatttttatttgtggatataccattttattatgaaaatctattttatttatacacattcaccactaaatacacacttaataccactaaaatttatgtggtttactttaagcgatgccatctttcaaataaactaatctaggtctagacagaaagaaatggatagagacttgacacaaatttatgaaagaaaattgggagtaggaatgtgaccgaaaacaagttgtgctaatgtctgttagacttttcagtaaaactaaagtaactgtatctgttcaactaaaaactctatattagtttctttgggaaacctctcatcgtcaaaactttatgttcactttgctgttgtagatagccagtcaaccagcagtattagtgctgttttcaaagatttaagctctataaaattgggaaattatctaagatcattttccctaagcattgacacatagcttcatctgaggtgagatatggcagctgtttgtatctgcactgtgtctgtctacaaaaagtgaaaaatacagtgtttacttgaaattttaactttgtaactgcaagaattccagttcagccgggcgaggattagtattatttttaactctccgtaagattttcagtaccaccaaattgttttggattttttttctttcctcttcacataccagggttattaaaagtgtgctttctttttacattatattacagttacaaggtaaaattcctcaactgctatttatttattccagcccagtactataaagaacgtttcaccataatgaccctccagagctgggaaacctaccacaagatctaaagttctggctgtccattaacctccaactatggtctttatttcttgtggtaatatgatgtgcctttccttgcctaaatcccttcctggtgtgtatcaacattatttaatgtcttctaattcagtcatttttttataagtatgtctataaacattgaactttaaaaaacttatttatttattccactactgtagcaattgacagattaaaaaaatgtaacttcataatttcttaccataacctcaatgtcttttttaaaaaataaaattaaaataaaattaaaaatgaaaagagactcaaaaaaaaatagag

SEQ ID NO: 404580 - DNA, 2355 bp, Homo sapiens
taaggctaggtacgaggctggggttaattcggccgaggctcggcccgggccgcggcccggcccggagtgggggcgggcggaggcgcgggagttatggagggggcgggctctgcagggaagtgcgtcagaggaggcgcggggagagtagggtgctgtggtctgagctagagggtgaagctggcggagcaggaggatgggcgagcagtctgaatgccagaatggataaccgttttgctacagcatttgtaattgcttgtgtgcttagcctcatttccaccatctacatggcagcctccattggcacagacttctggtatgaatatcgaagtccagttcaagaaaattccagtgatttgaataaaagcatctgggatgaattcattagtgatgaggcagatgaaaagacttataatgatgcactttttcgatacaatggcacagtgggattgtggagacggtgtatcaccatacccaaaaacatgcattggtatagcccaccagaaaggacagagtcatttgatgtggtcacaaaatgtgtgagtttcacactaactgagcagttcatggagaaatttgttgatcccggaaaccacaatagcgggattgatctccttaggacctatctttggcgttgccagttccttttaccttttgtgagtttaggtttgatgtgctttggggctttgatcggactttgtgcttgcatttgccgaagcttatatcccaccattgccacgggcattctccatctccttgcaggtaggttttgtcatcatacttaccttttagcttcttcctgtctctttagggaccaaagagttataaatctgaaatgttcacgtattaactgccctgtcacattgcctgaaaagctctttactgtgcttttatccagccatgttttgttttgttttctaaattttcccccaagtctgtgtacactgggctcagtaagttgttatgttgctggaattgaactactccaccagaaactagagctccctgacaatgtatccggtgaatttggatggtccttctgcctggcttgtgtctctgctcccttacagttcatggcttctgctctcttcatctgggctgctcacaccaaccggaaagagtacaccttaatgaaggcatatcgtgtggcatgagcaagaaactgcctgctttacaattgccatttttatttttttaaaataatactgatattttccccacctctcaattgtttttaatttttatttgtggatataccattttattatgaaaatctattttatttatacacattcaccactaaatacacacttaataccactaaaatttatgtggtttactttaagcgatgccatctttcaaataaactaatctaggtctagacagaaagaaatggatagagacttgacacaaatttatgaaagaaaattgggagtaggaatgtgaccgaaaacaagttgtgctaatgtctgttagacttttcagtaaaactaaagtaactgtatctgttcaactaaaaactctatattagtttctttgggaaacctctcatcgtcaaaactttatgttcactttgctgttgtagatagccagtcaaccagcagtattagtgctgttttcaaagatttaagctctataaaattgggaaattatctaagatcattttccctaagcattgacacatagcttcatctgaggtgagatatggcagctgtttgtatctgcactgtgtctgtctacaaaaagtgaaaaatacagtgtttacttgaaattttaactttgtaactgcaagaattccagttcagccgggcgaggattagtattatttttaactctccgtaagattttcagtaccaccaaattgttttggattttttttctttcctcttcacataccagggttattaaaagtgtgctttctttttacattatattacagttacaaggtaaaattcctcaactgctatttatttattccagcccagtactataaagaacgtttcaccataatgaccctccagagctgggaaacctaccacaagatctaaagttctggctgtccattaacctccaactatggtctttatttcttgtggtaatatgatgtgcctttccttgcctaaatcccttcctggtgtgtatcaacattatttaatgtcttctaattcagtcatttttttataagtatgtctataaacattgaactttaaaaaacttatttatttattccactactgtagcaattgacagattaaaaaaatgtaacttcataatttcttaccataacctcaatgtcttttttaaaaaataaaattaaaataaaattaaaaatgaaaagagactcaaaaaaaaatagag

SEQ ID NO: 404581 - DNA, 1217 bp, Homo sapiens
taaggctaggtacgaggctggggttaattcggccgaggctcggcccgggccgcggcccggcccggagtgggggcgggcggaggcgcgggagttatggagggggcgggctctgcagggaagtgcgtcagaggaggcgcggggagagtagggtgctgtggtctgagctagagggtgaagctggcggagcaggaggatgggcgagcagtctgaatgccagaatggataaccgttttgctacagcatttgtaattgcttgtgtgcttagcctcatttccaccatctacatggcagcctccattggcacagacttctggtatgaatatcgaagtccagttcaagaaaattccagtgatttgaataaaagcatctgggatgaattcattagtgatgaggcagatgaaaagacttataatgatgcactttttcgatacaatggcacagtgggattgtggagacggtgtatcaccatacccaaaaacatgcattggtatagcccaccagaaaggacagagtcatttgatgtggtcacaaaatgtgtgagtttcacactaactgagcagttcatggagaaatttgttgatcccggaaaccacaatagcgggattgatctccttaggacctatctttggcgttgccagttccttttaccttttgtgagtttaggtttgatgtgctttggggctttgatcggactttgtgcttgcatttgccgaagcttatatcccaccattgccacgggcattctccatctccttgcaggtctgtgtacactgggctcagtaagttgttatgttgctggaattgaactactccaccagaaactagagctccctgacaatcccagtactataaagaacgtttcaccataatgaccctccagagctgggaaacctaccacaagatctaaagttctggctgtccattaacctccaactatggtctttatttcttgtggtaatatgatgtgcctttccttgcctaaatcccttcctggtgtgtatcaacattatttaatgtcttctaattcagtcatttttttataagtatgtctataaacattgaactttaaaaaacttatttatttattccactactgtagcaattgacagattaaaaaaatgtaacttcataatttcttaccataacctcaatgtcttttttaaaaaataaaattaaaataaaattaaaaatgaaaagagactcaaaaaaaaatagag

SEQ ID NO: 404582 - DNA, 1444 bp, Homo sapiens
taaggctaggtacgaggctggggttaattcggccgaggctcggcccgggccgcggcccggcccggagtgggggcgggcggaggcgcgggagttatggagggggcgggctctgcagggaagtgcgtcagaggaggcgcggggagagtagggtgctgtggtctgagctagagggtgaagctggcggagcaggaggatgggcgagcagtctgaatgccagaatggataaccgttttgctacagcatttgtaattgcttgtgtgcttagcctcatttccaccatctacatggcagcctccattggcacagacttctggtatgaatatcgaagtccagttcaagaaaattccagtgatttgaataaaagcatctgggatgaattcattagtgatgaggcagatgaaaagacttataatgatgcactttttcgatacaatggcacagtgggattgtggagacggtgtatcaccatacccaaaaacatgcattggtatagcccaccagaaaggacagagtcatttgatgtggtcacaaaatgtgtgagtttcacactaactgagcagttcatggagaaatttgttgatcccggaaaccacaatagcgggattgatctccttaggacctatctttggcgttgccagttccttttaccttttgtgagtttaggtttgatgtgctttggggctttgatcggactttgtgcttgcatttgccgaagcttatatcccaccattgccacgggcattctccatctccttgcaggtgacaaaggagagcatgcttccagctggagctgagtccaagcacacagccactcctgcacacgcatgcgtgcaaacagggaagcccaagtaggagaagaggaaagaggttgtagggatttgggaagaaccttgattattccctggaggaaaagacaaatctacttccctgaaatcaccctcgaatctacttccaccctcagaacttaaaatgaactgcatcctttttttcatcttcttttcttctccagtgaatatgatctccaaacccttattttttctttgaactgtaaaatttccactcatggacgatgcaaccaacagatgcaatctctgagaagatgaaaattgggacctcttattataaaattgacctagctggactcaggaaaccagggaagaagtcaatgcaggcatttaaaatgtaaagttttttctggttaaatctatttatttttcttgtaggttgagtatttcttcccagtttttctgctctggtgtataacaaacaggtcaaaatttcccatctttcctcctgatagtagttgaatcctaccttgcatacttaatgcatagtgaaatggcatctagcagaaatacacacccccaaaacacaccaccatttcattaggtgcccaaaaaattctgtatttagcttatttatttattggtatttttgctttttc

SEQ ID NO: 404583 - DNA, 2355 bp, Homo sapiens
taaggctaggtacgaggctggggttaattcggccgaggctcggcccgggccgcggcccggcccggagtgggggcgggcggaggcgcgggagttatggagggggcgggctctgcagggaagtgcgtcagaggaggcgcggggagagtagggtgctgtggtctgagctagagggtgaagctggcggagcaggaggatgggcgggagtgagcgggacctgcgtcgccgggcaggggtcgcgtcgcggttccatgttcccggcggtttgaagaggggcccccttcccgggcgtggtcgggctgggcgggttccgagcggcggatttgtcccagggccgagccctctagggcggggcctggtcgggtaccgggggaccctggcccggggccgagcacggctgccccgccccagccctggccttctccggccccgccgtgaggcccaggaggtggctgctgcaggcgtccggcttggacgaaccgccgttcccagtgctgggaccctttaaggtcatttgagagcaccaggatgaaggggggatttttaaaaaatcaaaatacaaatccaactttttgagttttcgttgtcattgctcttatctttcctgagtcacttcccattttccaaactcagcaaccccagtttgcgagtctgttttcatgaacctttgtaaggtgtttggtgcggtcacggtgtatacttgccgtgtagtatttgactcagcgcgatctgccttgagtcattttaccgcggccatttactactgccgttgagccctgtccacgccttgggagtgttgatatgttgagagttttctgtctggctgaggagggatcatttagtttttgcggacgtatgttgcactgaggatttagggagagagcaagatttctgttgaggaggttcagaagtataaggaatcgggagagtagataggagtgaagcatttggcagcgtaaagaagcttggcttagctttaatggattagggagagattgctatctagcattattacatgttattgttctctttgctattttatacacctagaacaacctttccctcggggttaacaaacatcttcaactctgttttctgtatggctcctgactcttacctttgttttaggaggcttccctcttcagaggaaactgggagaagccaatttccactgcttctttttcctgtgcctttttaacactcaaacccagaacacttaatcctctgcagctcgtgcaaaaattcagtctgtaatttaaaatgtgtgcacggtacactgctgaccatgggcatgtctattgtttgtatctgtaatgtgtatgtccatttcagtgttgtctgttttatgcaggtgatagactagagaacaagacctctgtctccgtagcatcctggagcagtctgaatgccagaatggataaccgttttgctacagcatttgtaattgcttgtgtgcttagcctcatttccaccatctacatggcagcctccattggcacagacttctggtatgaatatcgaagtccagttcaagaaaattccagtgatttgaataaaagcatctgggatgaattcattagtgatgaggcagatgaaaagacttataatgatgcactttttcgatacaatggcacagtgggattgtggagacggtgtatcaccatacccaaaaacatgcattggtatagcccaccagaaaggacaggtatttctcttattttaacttctgtcttcttcacctggttaataatagacaaaacgacgtaatgattgcccaattacatgtaagcaggtttgttggttctctctctccttaaagaaataaatcgtgtatcttctctttctactgccttctctccccaacttctttgcattaccatggtactcatcaatattggttggatgaggaacttttcttatcttgggaaagccttaatggcttttttttttcttatttactcactcattaaaatacttttcattactctaacacatgttataaagaaatagttggaaaagtacatcgaaagacttttaaaaatatttggtaactagtaaaaggactaccatcgaaaatcaactcaaaaaattgtccttttatgggttagctgtattataatacatatctatcatttgcccctgtgtcttagaggatataatttgaccagctctacatttaatctgtgtaattatgagactgttttacaacaatcttgatgcagagttggtaggttaagaaatttgtattacagaagttaaaaaaaaaaaaccaaaaactagatttttaggtttattttacaggcattcttatttaacacttaaagattttgatttccagttattaaaatggtagcttta

SEQ ID NO: 404584 - DNA, 2076 bp, Homo sapiens
  misc_feature (964)..(964): n is a, c, g, or t
gtcttttgtccctcggcggacaccgtttgccagccaaagctatgtctgcgcgctcaccgacttcatagggtgccgaattcttttttccccaggcttgccatggctagtcgaggggctcggcagcgcctgaagggcagcggggccagcagtggggatacggccccggctgcggacaagctgcgggagctgctgggcagccgagaggcgggcggcgcggagcaccggaccgagttatctgggaacaaagcaggacaagtctgggcacctgaaggatctactgctttcaagtgtctgctttcagcaaggttatgtgctgctctcctgagcaacatctctgactgtgatgaaacattcaactactgggagccaacacactacctcatctatggggaagggtttcagacttgggaatattccccagcatatgccattcgctcctatgcttacctgttgcttcatgcctggccagctgcatttcatgcaagaattctacaaactaataagattcttgtgttttactttttgcgatgtcttctggcttttgtgagctgtatttgtgaactttacttttacaaggctgtgtgcaagaagtttgggttgcacgtgagtcgaatgatgctagccttcttggttctcagcactggcatgttttgctcatcatcagcattccttcctagtagcttctgtatgtacactacgttgatagccatgactggatggtatatggacaagacttccattgctgtgctgggagtagcagctggggctatcttaggctggccattcagtgcagctcttggtttacccattgcctttgatttgctggtcatgaaacacaggtggaagagtttctttcattggtcgctgatggccctcatactatttctggtgcctgtggtggtcattgacagctactattatgggaagttggtgattgcaccactcaacattgttttgtataatntctttactcctcatggacctgatctttatggtacagaaccctggtatttctatttaattaatggatttctgaatttcaatgtagcctttgctttggctctcctagtcctaccactgacttctcttatggaatacctgctgcagagatttcatgttcagaatttaggccacccgtattggcttaccttggctccaatgtatatttggtttataattttcttcatccagcctcacaaagaggagagatttcttttccctgtgtatccacttatatgtctctgtggcgctgtggctctctctgcacttcagaaatgttaccactttgtgtttcaacgatatcgcctggagcactatactgtgacatcgaattggctggcattaggaactgtcttcctgtttgggctcttgtcattttctcgctctgtggcactgttcagaggatatcacgggccccttgatttgtatccagaattttaccgaattgctacagacccaaccatccacactgtcccagaaggcagacctgtgaatgtctgtgtgggaaaagagtggtatcgatttcccagcagcttccttcttcctgacaattggcagcttcagttcattccatcagagttcagaggtcagttaccaaaaccttttgcagaaggacctctggccacccggattgttcctactgacatgaatgaccagaatctagaagagccatccagatatattgatatcagtaaatgccattatttagtggatttggacaccatgagagaaacaccccgggagccaaaatattcatccaataaagaagaatggatcagcttggcctatagaccattccttgatgcttctagatcttcaaagctgctgcgggcattctatgtccccttcctgtcagatcagtatacagtgtacgtaaactacaccatcctcaaaccccggaaagcaaagcaaatcaggaagaaaagtggaggttagcaacacacctgtggccccaaaggacaaccatcttgttaactattgattccagtgacctgactccctgcaagtcatcgcctgtaacatttgtaataaaggtcttctgacatgaatactggaatctgggtgctctgggctagt

SEQ ID NO: 404585 - DNA, 518 bp, Homo sapiens
tggaggaataggccatatgtagagacagatgtgagactgaagtcttttttacatataaataatgctgggagagaatgagaacatttctgtaaggtggaggttggggaagaacagagttcacgattgatatcagtaaatgccattatttagtggatttggacaccatgagagaaacaccccgggagccaaaatattcatccaataaagaagaatggatcagcttggcctatagaccattccttgatgcttctagatcttcaaagctgctgcgggcattctatgtccccttcctgtcagatcagtatacagtgtacgtaaactacaccatcctcaaaccccggaaagcaaagcaaatcaggaagaaaagtggaggttagcaacacacctgtggccccaaaggacaaccatcttgttaactattgattccagtgacctgactccctgcaagtcatcgcctgtaacatttgtaataaaggtcttctgacatgaatactggaatctgggtgctctgggctagt

SEQ ID NO: 404586 - DNA, 1952 bp, Homo sapiens
  misc_feature (964)..(964): n is a, c, g, or t
gtcttttgtccctcggcggacaccgtttgccagccaaagctatgtctgcgcgctcaccgacttcatagggtgccgaattcttttttccccaggcttgccatggctagtcgaggggctcggcagcgcctgaagggcagcggggccagcagtggggatacggccccggctgcggacaagctgcgggagctgctgggcagccgagaggcgggcggcgcggagcaccggaccgagttatctgggaacaaagcaggacaagtctgggcacctgaaggatctactgctttcaagtgtctgctttcagcaaggttatgtgctgctctcctgagcaacatctctgactgtgatgaaacattcaactactgggagccaacacactacctcatctatggggaagggtttcagacttgggaatattccccagcatatgccattcgctcctatgcttacctgttgcttcatgcctggccagctgcatttcatgcaagaattctacaaactaataagattcttgtgttttactttttgcgatgtcttctggcttttgtgagctgtatttgtgaactttacttttacaaggctgtgtgcaagaagtttgggttgcacgtgagtcgaatgatgctagccttcttggttctcagcactggcatgttttgctcatcatcagcattccttcctagtagcttctgtatgtacactacgttgatagccatgactggatggtatatggacaagacttccattgctgtgctgggagtagcagctggggctatcttaggctggccattcagtgcagctcttggtttacccattgcctttgatttgctggtcatgaaacacaggtggaagagtttctttcattggtcgctgatggccctcatactatttctggtgcctgtggtggtcattgacagctactattatgggaagttggtgattgcaccactcaacattgttttgtataatntctttactcctcatggacctgatctttatggtacagaaccctggtatttctatttaattaatggatttctgaatttcaatgtagcctttgctttggctctcctagtcctaccactgacttctcttatggaatacctgctgcagagatttcatgttcagaatttaggccacccgtattggcttaccttggctccaatgtatatttggtttataattttcttcatccagcctcacaaagaggagagatttcttttccctgtgtatccacttatatgtctctgtggcgctgtggctctctctgcacttcagcacagttttctgtacttccagaaatgttaccactttgtgtttcaacgatatcgcctggagcactatactgtgacatcgaattggctggcattaggaactgtcttcctgtttgggctcttgtcattttctcgctctgtggcactgttcagaggatatcacgggccccttgatttgtatccagaattttaccgaattgctacagacccaaccatccacactgtcccagaaggcagacctgtgaatgtctgtgtgggaaaagagtggtatcgatttcccagcagcttccttcttcctgacaattggcagcttcagttcattccatcagagttcagaggtcagttaccaaaaccttttgcagaaggacctctggccacccggattgttcctactgacatgaatgaccagaatctagaagagccatccagatatattgatatcagtaaatgccattatttagtggatttggacaccatgagagaaacaccccgggagccaaaatattcatccaataaagaagaatggatcagcttggcctatagaccattccttgatgcttctagatcttcaaagctgctgcgggcattctatgtccccttcctgtcagatcagtatacagtgttttttaactccggaatccgctctggctaaagctgccgctctccctgacgcagttttaccct

SEQ ID NO: 404587 - DNA, 2097 bp, Homo sapiens
  misc_feature (964)..(964): n is a, c, g, or t
gtcttttgtccctcggcggacaccgtttgccagccaaagctatgtctgcgcgctcaccgacttcatagggtgccgaattcttttttccccaggcttgccatggctagtcgaggggctcggcagcgcctgaagggcagcggggccagcagtggggatacggccccggctgcggacaagctgcgggagctgctgggcagccgagaggcgggcggcgcggagcaccggaccgagttatctgggaacaaagcaggacaagtctgggcacctgaaggatctactgctttcaagtgtctgctttcagcaaggttatgtgctgctctcctgagcaacatctctgactgtgatgaaacattcaactactgggagccaacacactacctcatctatggggaagggtttcagacttgggaatattccccagcatatgccattcgctcctatgcttacctgttgcttcatgcctggccagctgcatttcatgcaagaattctacaaactaataagattcttgtgttttactttttgcgatgtcttctggcttttgtgagctgtatttgtgaactttacttttacaaggctgtgtgcaagaagtttgggttgcacgtgagtcgaatgatgctagccttcttggttctcagcactggcatgttttgctcatcatcagcattccttcctagtagcttctgtatgtacactacgttgatagccatgactggatggtatatggacaagacttccattgctgtgctgggagtagcagctggggctatcttaggctggccattcagtgcagctcttggtttacccattgcctttgatttgctggtcatgaaacacaggtggaagagtttctttcattggtcgctgatggccctcatactatttctggtgcctgtggtggtcattgacagctactattatgggaagttggtgattgcaccactcaacattgttttgtataatntctttactcctcatggacctgatctttatggtacagaaccctggtatttctatttaattaatggatttctgaatttcaatgtagcctttgctttggctctcctagtcctaccactgacttctcttatggaatacctgctgcagagatttcatgttcagaatttaggccacccgtattggcttaccttggctccaatgtatatttggtttataattttcttcatccagcctcacaaagaggagagatttcttttccctgtgtatccacttatatgtctctgtggcgctgtggctctctctgcacttcagcacagttttctgtacttccagaaatgttaccactttgtgtttcaacgatatcgcctggagcactatactgtgacatcgaattggctggcattaggaactgtcttcctgtttgggctcttgtcattttctcgctctgtggcactgttcagaggatatcacgggccccttgatttgtatccagaattttaccgaattgctacagacccaaccatccacactgtcccagaaggcagacctgtgaatgtctgtgtgggaaaagagtggtatcgatttcccagcagcttccttcttcctgacaattggcagcttcagttcattccatcagagttcagaggtcagttaccaaaaccttttgcagaaggacctctggccacccggattgttcctactgacatgaatgaccagaatctagaagagccatccagatatattgatatcagtaaatgccattatttagtggatttggacaccatgagagaaacaccccgggagccaaaatattcatccaataaagaagaatggatcagcttggcctatagaccattccttgatgcttctagatcttcaaagctgctgcgggcattctatgtccccttcctgtcagatcagtatacagtgtacgtaaactacaccatcctcaaaccccggaaagcaaagcaaatcaggaagaaaagtggaggttagcaacacacctgtggccccaaaggacaaccatcttgttaactattgattccagtgacctgactccctgcaagtcatcgcctgtaacatttgtaataaaggtcttctgacatgaatactggaatctgggtgctctgggctagt

SEQ ID NO: 404588 - DNA, 2319 bp, Homo sapiens
  misc_feature (964)..(964): n is a, c, g, or t
gtcttttgtccctcggcggacaccgtttgccagccaaagctatgtctgcgcgctcaccgacttcatagggtgccgaattcttttttccccaggcttgccatggctagtcgaggggctcggcagcgcctgaagggcagcggggccagcagtggggatacggccccggctgcggacaagctgcgggagctgctgggcagccgagaggcgggcggcgcggagcaccggaccgagttatctgggaacaaagcaggacaagtctgggcacctgaaggatctactgctttcaagtgtctgctttcagcaaggttatgtgctgctctcctgagcaacatctctgactgtgatgaaacattcaactactgggagccaacacactacctcatctatggggaagggtttcagacttgggaatattccccagcatatgccattcgctcctatgcttacctgttgcttcatgcctggccagctgcatttcatgcaagaattctacaaactaataagattcttgtgttttactttttgcgatgtcttctggcttttgtgagctgtatttgtgaactttacttttacaaggctgtgtgcaagaagtttgggttgcacgtgagtcgaatgatgctagccttcttggttctcagcactggcatgttttgctcatcatcagcattccttcctagtagcttctgtatgtacactacgttgatagccatgactggatggtatatggacaagacttccattgctgtgctgggagtagcagctggggctatcttaggctggccattcagtgcagctcttggtttacccattgcctttgatttgctggtcatgaaacacaggtggaagagtttctttcattggtcgctgatggccctcatactatttctggtgcctgtggtggtcattgacagctactattatgggaagttggtgattgcaccactcaacattgttttgtataatntctttactcctcatggacctgatctttatggtacagaaccctggtatttctatttaattaatggatttctgaatttcaatgtagcctttgctttggctctcctagtcctaccactgacttctcttatggaatacctgctgcagagatttcatgttcagaatttaggccacccgtattggcttaccttggctccaatgtatatttggtttataattttcttcatccagcctcacaaagaggagagatttcttttccctgtgtatccacttatatgtctctgtggcgctgtggctctctctgcacttcagcacagttttctgtacttccagaaatgttaccactttgtgtttcaacgatatcgcctggagcactatactgtgacatcgaattggctggcattaggaactgtcttcctgtttgggctcttgtcattttctcgctctgtggcactgttcagaggatatcacgggccccttgatttgtatccagaattttaccgaattgctacagacccaaccatccacactgtcccagaaggcagacctgtgaatgtctgtgtgggaaaagagtggtatcgatttcccagcagcttccttcttcctgacaattggcagcttcagttcattccatcagagttcagaggtcagttaccaaaaccttttgcagaaggacctctggccacccggattgttcctactgacatgaatgaccagaatctagaagagccatccagatatattgatatcagtaaatgccattatttagtggatttggacaccatgagagaaacaccccgggagccaaaatattcatccaataaagaagaatggatcagcttggcctatagaccattccttgatgcttctagttttgaaggctggaagaccaagatcacgatgccagtatagtcaagttctggtaaaggccatctttctggctgcagacagctgacttgtatcctcacatggctgcaagaagacaagctagctctctagcctcttcttataaggacattaatcccattgttgagtgctccactcttttgacctaattcccttccaaaggcccacctccaaataccatcacatagatcttcaaagctgctgcgggcattctatgtccccttcctgtcagatcagtatacagtgtacgtaaactacaccatcctcaaaccccggaaagcaaagcaaatcaggaagaaaagtggaggttagcaacacacctgtggccccaaaggacaaccatcttgttaactattgattccagtgacctgactccctgcaagtcatcgcctgtaacatttgtaataaaggtcttctgacatgaatactggaatctgggtgctctgggctagt

SEQ ID NO: 404589 - DNA, 829 bp, Homo sapiens
tttttttttactatcagaagacatctgttcttgattcagaagggtaaaaaaagcctaggacgtgctcattcacccatttctatgcttgcttctgaaaagatgtactatccaaacaatgatacattcttaaactctgacatataaaaatgctcaagtttaattcattttttgctttgtagttacagactttgcaaattaataaaaatgtgtcataaattgggttccttgggaagcaaattctgagatggagatggaaatttaaagaattgggaagtgattttgggaaaacctttgtggaagagcaggagtgggcagagagagaagctgacttatcaaagagtttcaacaagacctcagccaaaaccatgggcaactctggagctaggaaggcccttcagaactgaccaagctggggccaaggagcagactttgtaactctgcaaatatcagtcactggatggtggcagccctaagaagacaggagtttgggcaaggcagctctcctagcagccaaaggcagatctgggccacgtaccacaatccaccaatataccatctacaaaaaggagggcctcctaaatttaaacatcctgttcctttcctttacattttgttctctgaagatttaactctgctccttttctacttactaaaacatactacaaaggggcagcaagagggagtttttcgtgatggaattgttctaaatcccaatgtgggtgctggttacaaaaatttacctatgttaaaacacatataactggaaaagagtacagcagttcctcaaaaaattcaatataatttcatgatgacaacccacaaggaaaaa

SEQ ID NO: 404590 - DNA, 362 bp, Homo sapiens
ctcattgcccgggccggcagggccggccggctgctctgagtgcggggtctgccaagcccacgcccacccggaattccagctggcccgcaagtgccgcgcgcagccccagttcccgctcgcgcctctccctccacacctccctgcaagctgagggagctggctctggccttggccagcccagaaaggggctcccacagtgcagtggtgggctgaagggctcctcaagtgccaccaaagtgggagcccgggcagaggaggtgccgagagcgagcgagggctgtgaggactgccagcactgaacagttaggaaaatgagtggattttctgcatcaaattttcagtagttcccaggaacagttagc

SEQ ID NO: 404591 - DNA, 205 bp, Homo sapiens
aaaagtaattttaaagtaactatcttagagaactgtggattaaaccattccagccatctgatgagggttaaaatgtatattcgtaatctgacattccaaaacacgattctttccggatcaagcataaaaggcatttgctcttggaagaccaagaaagaattcatgtggttcccattagtctaaaaataaataataaataaataaa

SEQ ID NO: 404592 - DNA, 391 bp, Homo sapiens
tagtagagacggggtttcaccgtgttagccaggatggtctcaatctcctgacctcgtgatctgcccgcctcggcctcctcattgcctgtgataaacaacgcactggaagtctgagacagcatagtaagaaataaaaacatgaagaaatagaaagaaatgagaaagaaagaaaccggtcattattcagacaatatggttatctacatggaaaatttaagataatctgtgggcaaacctgtaaaataattcaacaaggtggttaataagacaattataagataaatatataaaaatcaaacaccagttttatatagcaataacaattaaaaatgtaattttaaaaatatatcatttgtaatggaaacagaaactttaagctacccatgaataa

SEQ ID NO: 404593 - DNA, 540 bp, Homo sapiens
cgataccagggctcggagggccgggctgcctagcgagggcttcttttgagtgcgtaggggtggtgggtggcatggacggtttctctgagtcgtcagcgaatgccccccctagaatcctgcttttcaaacactttggtgacactcttgcaatgttggggtgtttttaaatccaaatttgtattatgaaaacttacaaacttacagaaaagtgggaagacttgtacagtggacacatatcgacccaattgttaacattttgctatattgctatccacctgttcttccatcaaaccatcttatctttttaatgcagaccttagtactctacacccatgaacacatcagcacacattattcatttacagttctttttaaggcaaaatatccacgcaatcaaatgtacaaatcttagacaagcttcacaaatgctcatgtataggccgggcgccgtggctcacgcctgtaatcccagcactttgggaggccgaggtgggcggatcacgaggtcaggagatcgagaccatcctggctaacacggtg

SEQ ID NO: 404594 - DNA, 430 bp, Homo sapiens
tggtctcaaactcctgacctcaggtgatctgcccacctcggcctcgcaaagtgctggcattagaggcgtgagccactgcacctggcccattattctttttctaagaggggagtcttgcttgctatgttgccagggctggcctcaaactcctgggcttaagggatcctcctgtcccagcctcctgagtagcttgggactacaggcgtgtaccacattcttccatttttgcaacttttctgtaggttttaactctttcaaaatagaagttgggataaaaaatgtccttcacgtaagctacaaaattgcttgaaacaagttatttttgaaaatatttagtccttttcaggtttacatcatgtttaagcaggtatgtattcttgtaattttaatatgtatattaaaattgtgataatttttgtctagatgtgga

SEQ ID NO: 404595 - DNA, 342 bp, Homo sapiens
tgataagaattcaagtttagctatataccctgtttgtcaaagctgttaagcaacagacattttcatgcattactgtggaaatacaaactggtgcagtccttatggaggcattgacagtatcttacattttataagcgtttgtcctttgacctagcaatcccatttcagggaatcaagcctttaattacacctgcacaaatatggaatgatatgcattcagggtgattcactgggacattaattgtaatagcaggacattggaaataatccaaatatccatcagtagtgccctggttagttaaattatttatatccacacaatggaaggcaaacatcaaaaaa

SEQ ID NO: 404596 - DNA, 289 bp, Homo sapiens
atcaatcataccatcatatcatttcctggtgagatgcataggaaatacagagcatcacctattgccaaaaattgaacctaatcaagcctcaagatctaactaccagtttataggctatatagagattagcaggaatatgttaagacaccaaaggtatgaaatcaaccatatccaaaatgtaggaaattatatgggacaaatgatctgtcgtcttcaaaaaaatggcaaagtgggaaatgtgggaggggaaaacacttcagaataaaagagatttaagagatgtatcaac

SEQ ID NO: 404597 - DNA, 549 bp, Homo sapiens
tccgtctttatttatgagcaataatttcatctttttaaaggaaagaaattaaaacagctataggatcctttgaggcttttatttgtcatctggtctaggagaaacaaaaaaaccaccaccagtgggcctttctatgaagatcagcaagaaagccctgctttctatgcctcgtggaagggaaggttccttctgggttaccatttgagttgtttctcaatgcgtcattgctcctgctttcttgttttcaagagtataagacctagtattggatgttgacttgagtgccatctagcttttttgagtcaccttacagtatttaagcacttttcaatgcagtgggtcagcaggggcgttcaaatacagtggtcaacctctaacagagtcctctgaatttccatcccttcttctctcctgcttgctttcctttctgtggtggcgatgacgccgttaggttgatgtagagagcaatgttgacatccttgattgtcctctgactgtaagtcacccacgttccctttgttagcgtaaagtgggccctgctctcctgtg

SEQ ID NO: 404598 - DNA, 622 bp, Homo sapiens
ccccatctctactaaaaatacaaaaattagctgagtgtggtggcgcgtgcctgtaatcccagctactcaggaggctgaggcaggataatagcttaaacctgagagcggaagttgcagtgagccgagatcatgccactgcaatccagcctggtgacagagtgagactctgtatcaaaagtaataataataataataaaataaaattatatgatgaaaaacataattagaaagccgaatagtactattcagtttccttataaggaaataacttttactcagatctttttcttaaagtaatttttaaacttgagtcagtcaactgagactatgcaagctgcagagggctcatgtagggagtgtataataaataacttctggagttctggtataatattatctcttgatcttgatgctaacagtgttttcatgtgaaaaattcatcaaattatacacttatgattcatgtacttttctgtgggtatgttatacttgaataaggtttgcacaaaataaaatacaagtaaatattaaaacacataatttagaagaaaacaaaagaatattatcatgattttttggtaggtgaagactttttatcagggcacaaaatctgagagccata

SEQ ID NO: 404599 - DNA, 583 bp, Homo sapiens
ttggttttgtgtccatgagccatttacaaactttgcacctgattgggctcagttgcagtttcttgtatttccctaccagccaagctgttgaagctgctgagcccggaatgatgttatcactgaggcagatgacaaaccctctagttgctagaaaccaaactgctccccgagctggtgtttccgttttttgtactgactgcttatttgggcttgatatataatggtgaaaacaggaactgtttattttaggtgataagaaaccaacattatgacaagaagatgtcatcttagttactctgttaccagtaccataggccagatactatctagatgcttataaacatcttatctaatccttgtaataataagccccaagctaggttttatatccccattttatggatgggggaactgaggccaataacttcatataacttatccaaggccacaaaactagtaataaacagagtgaaattcaacccaaaaacaaactacaaatccaaatttctttacctctatgctgtctgtacttgctgttactagcaaagttctcttggtgggagttaccccatcccctctccaa

SEQ ID NO: 404600 - DNA, 521 bp, Homo sapiens
tcagtttttgtagccaattaattttgagagttactggtaaggttgaaataaagtagcactgaactgactcaattttttaaataacaaaaaaattccttggtgttctagtatttgagaattcacttttagaaccctattggtacattggtggataacactacaatgggactgtggtgtccttgttgtacagaacaggcaaagaattcaaaatgctagagagccagggagtgatgttttaaacaaaaacaacaaaacttgaaaataggcctgtaggccaggtacagtggctcatgcctgtaatcccagcactttagtaggccaaggcaggtgaatcacctgaggtcaggagttcgagaccaccctggccaacatggtgaaaccccatctctactaaaaaattacaaaaattaactaggcacagtggcaggtgcctgtaatcccagctatttgggaggctgaggcaggagaatcacttgaacccaggaggcggaggttgcagtgagccgagactgtgccattgc

SEQ ID NO: 404601 - DNA, 387 bp, Homo sapiens
tggttttctggaaagacagtattggcaagtgacacaggatggtatcccagttgtaagagggttgcatgattcttttatctttgatttgaaaagcctggtcttggaccgggctcggtggctcaagcctataatcccagcactttaggagccccaggtgggtggatcacgaggtcaagagattgagaccatcctggccaacatggtgaaaccccgtctctactaaaaatacaaaaaaattagccgggtatggtggcgggcgcctgtagtcccactgacttgggaggctggggcaggagaatcacttgaacccggggggcagaggttgcagtgagccgagattgcaccactgcaccccagcctggtgagagagtgagactccatctcaaa

SEQ ID NO: 404602 - DNA, 550 bp, Homo sapiens
gccagaatgattggagaggagaggtaggagagaatactcactccctagtttgtgcacatttaagatgaagattttgttttactgggtttgctttgttagattctctcataggcagtcaatatcttttgtgcacctacttcattcatttgtgcatttgacctacgaaatattcagcattgcactaagtgctaggtgtatatgatagacaaagtccctgccagtgggggagcacaattttaaagcaatagtaattattcacgcttgtgctaagacctgtaatgaagttcttaatgatcttatgatcccagaagatcataatggaggagcttgcctgatctttgccgatgacattcaacctggaacaaggataaggaggattgccaggtaaagagagaggaagagccccagggggagggcgcagcacaagcaaaggctgaaggtggagaggaaattggggcagtcagaaaccagagtggtggccattgtggttgagtgcaggaggtttgggggccagtggcaggagccggagctggagaggcaggtaggaccc

SEQ ID NO: 404603 - DNA, 395 bp, Homo sapiens
tagagacagggtctctatctggtgcccaggctggactgcagtggcaccagcacagctcactgcagtcttgagcagccttgagcagccttgagcagccttgaactcctcggctcaagtgatcctcctgcctcagctttccaaagcaggctgagattacaagcatgagccactgcacctggtccctaaaatgggagaattaacagcatgtttgtatgctgatgagaatgacccaacaaagacaaaaaattagtgacacaggaaagagaggggaagatttgtggaacaacatccttgaaaaagcatgggggatctgtgccaaagagagacacagacatacaaaggtgctatccttgggtcgcaatgagatcaccagtccattgatcctatcacctttt

SEQ ID NO: 404604 - DNA, 588 bp, Homo sapiens
gcatgacatcgtgaatgtcactttaaaatggtaaatattttttaaactacatgtcacctttacctagtttttcatacttcaggaaaaaaaagaaaagactaataaacttatcagaaatatctttaaaattgtatcacagattctttttttgaagaagaccatatgaaaaggtaagagaaagcaagattcattttaaaactgaaagagattctgaccagtaaacattctggtcacaagttgtgtgttccatgggacatgacggtgttgctatgtgtgtgtagaccccgtgacgtcagtatgtgccaggtgtctcatccccgagtgaccagtcctgcacacgtggtggtggtacatgctgtgtatagacagacgcgccatgccagggcccaccatttgtacgtgtgtgcacaactctgcccatctgaaggaaggcaggagagatgagcgctgcttgacttcagaaaagcatctgacattattttgagcaatgtagaacaatgttccttggccccacatggaaactagttctgttatctcctctgcctcttcttccccccaacatttgcaagacgttccaattagtgtgct

SEQ ID NO: 404605 - DNA, 638 bp, Homo sapiens
ctctacacaggtaaattttcatttaaaggctacacaaacagaaaaaaataattctaagacagtatttatattatgaaagaagaaatggtaaaagccacagccaaggctgcctttcccaagatacctaaacattccagtgggggaagagtccctgtcaagagttaaaaacaatcccctcagtccacactcccagtcacatggagctggaagagctggaagaaccgccgccaccactcattcctctttcttcatcatttatttttatcttcatccagcatttcctttctttgtgataccaccagtagataccagctcaacaacatgctatcccccgctccatgagttctcccgagggaatgaactatatacgcttatataaaacagatgtggtctcttatttgagaggaaaaactaagggtaccataactcttccctttatctttgtccctagaacagtaatccattttctctgagcaagtgaacaactgaagtcttcagaactcaactgcgaaaagctgcagacaaggcagctaatcctctgttgtcagctttcactgatggcaacccctcatatgtctcttccatttgcctcccgagtttttacagtaggatccctatggccctactgccacaagcag

SEQ ID NO: 404606 - DNA, 424 bp, Homo sapiens
caacctaaatttaatcatgaagaatcaccagacaggccgggcacggtggctcactccttgggaggctaaggcggccaaatcacttgaggtcaggagtttgagatcagcctggccaacatggtgaaaccccacctctactaaaaacacaaaaattagccaggcatggtggcgggtgcctgtaattccagctactggggaggctgaggcaggtgaatcgcttgaacctgggaggcagaggttgcaaagtgagccaggatagctcgccactgaagtccagcctgggggacagagtgagactccatctcaaaacaaacaaacaaacaaaaaggatcaccagacaaatcgaaactgagagacattctacaaaataaccagccagtactcttgaaaaaagttccaaaatcattagaggcaaagactaaaa

SEQ ID NO: 404607 - DNA, 528 bp, Homo sapiens
tttggggccaaaccaatgtataccttgcatgtattgatctatgtctttgttgatatcttctgtctccctaaaatgtataaaacctaactgcagccagacatgcagctcacacctgtaattccaaaactttgggaggccaaggcaaacggatcacttgagcccaggagtttgaggccaggctgggcaacatggcgagacctcgtctctacaaaaaatacaaacattgggtcatttttagtcacagtaaggatagtatgtttatgtaatacttctctaccataaaagcatatcaaggctttagaggtacatctctcaacaaacagtctttacccatttcttccagaaaatgaccctgctcttttgttcatcttcctcctcttattgcatcaggtttaaatctctgaaatggaggggaatgacttttgcaactaaaagaatttgctaggcctaaggctaatgccttattaaagcattttagtgaaaactcaaggcataggacagaatagacttactattatatctggccca

SEQ ID NO: 404608 - DNA, 556 bp, Homo sapiens
agtgaagcacataaataagtggctttattttttctctggtcataattgctgaaaagtcaaattcacagtttgctgacattggtacattggactaagaaatagttgtcttcgtggttgggggtggggagagtgtagaaccctaggagaatattctgcagagttggcacatcctggataaaaggtataaacgggcgcccatgatatatatatatatatatattttttttttttttttttaataatgagagctatttcagctggtgtggggttctgcttctagcaaaagaatgcctctggtccctcctgtacctgccccagcagcggggatactgtgtgctgaccgggctggcacgtgcagttgtgctcctttgcaggagaaggagctcgcccagaggccggagcagtgagccgggggccacgctggagggagcgggcagcgccgctgctcctcgcccatccccatgccctgcagcagggcgcgaaggcggaggcccaaggcagcacccctgcccctccagccctgcccgcccgcccggggctccgggacgcggccgcc

SEQ ID NO: 404609 - DNA, 515 bp, Homo sapiens
agtttccagctagtgtgttgagctcaaaatgtttctgtttgttagttgtcctagcatattggtgcttcttcacctcatcctttgagaattgctggggcttcctatttagaatggagctggctgggcacagcccattacatgcctgtaatcccagcactttgagaggccgaggcagtggatcacttgagatcaggagtttgagaccagcctggccaacatgatgaaaccctgactctactaaaaatcccaaaaaaaaaaaaaaaaaaagaatggagctgcctctggaacttcctctctaaccccagcattttcccttcctattcccaagtttagggactttaccgtcagccttccctgtcctcactttccagtcagctgaaagtttcaagggaacaaaatatttctttcaaaagataggaacctgttttaaaggtattaattgtgcttcaaaatcatgccaccttattaaaatatttgtcacttaaaaataaacttacacttcctccttgaattta

SEQ ID NO: 404610 - DNA, 442 bp, Homo sapiens
acatttgttgttgctccctcagtgttagatactgttctgaatgctttgcgtgtgtttgttggttccattttaataaccacaggaggaaattcagtccttagggaggggccacaacagttgcagccctgatccaaacccatgccatttccctccatgtcttcaacgcgatgctctcctgactcatcataccttgtttcgttccaaaaatgttttgaggtgaatgactttttactattaggctggcgcaaacataattgcagttgttgacgttagttttaagggcaagacgcgccattacatttgcaccaacctggcaatgactagccaagtgcaatggcgtgtgcctgtagtcccacttactcaggaggctgagatgaggtgatggcttgagcccaggagtttaagatgaccagactgggtaacatagcgagacaccatcaaa

SEQ ID NO: 404611 - DNA, 310 bp, Homo sapiens
aaatttacccatttccaggtgtaattccatgactcttagtaacattaccaagtgatgcaccatcaccataacccagtttaagaacattttcatccctccagtgatatccctcaggtacatttattcttaatccttatttcaattcccaaccccagctctaggcaatcactacctactccctatctctatgaatctgccttttctgggtatttcgtagaaatctttgttccataggcttgatttaaagacaattagattagatcttttactaagccttttactctataaatatatgtcttttcacaagaaa

SEQ ID NO: 404612 - DNA, 248 bp, Homo sapiens
gctccttgctggctctgcccgttctctcaaagccctgggggttctgtaaaagctctcaggattcctgtaatcctgcctcctttctcttaggctggcagcctggcagactagttcttctcggtgctgaattatgtaccccgcttccccaactcgcccgcactcctgtgtcttacgtgggtcctggggtccggcaaagcctgttctccccactcgaaatgaagtcatttcaaagtcttgtctttcattct

SEQ ID NO: 404613 - DNA, 391 bp, Homo sapiens
agggcaggggtcctcgcctgactcactgaatgccttatctaaagtgccaggcacagtgtacctattcatctggtggatggataaagacagggactgtcttggttcttcctgtgtagccttagtaacttgtacctttcctgacatggcaggggctccaaaacatctgttgcaaacaatgtatatctaaaagacctctataaaaataattagaatgtaaaactgttaacagaatggaggttgagaaaggattgtgtattttttaaatgtggtttaaatcttttcagcttgcagatgctagattttcctaagctctgcaactaactgaagaacaagtattgatgaagccttcacagttcttttttttttttttttgagatgtattttcactttt

SEQ ID NO: 404614 - DNA, 565 bp, Homo sapiens
gatgccaggtgcctgtaatcccacctacttggggggctgaggcaggagaatcgcttgaacttgagaggcagaggttgcagtgagccgagatcatgccattgcactctagcctgggcaacagagtgagactctgtctcaaaaaaaaaacaaaaacaaaaaaacccactaaattttaaaaaaggaaagaaagaactgagagaagcacaaggactatcagaagaccacggaacttgagggtccaggatgacttcctggaggaggtgacatgtgggctaagttttaaaggactattaggaattgtaaagagctgaaggtgtggagaccagactgcagaggggttgtagtgacaagctaaggagctgcggctttacaccacttgagtgggctgcccattttagtatgaataagaatttcccgtggttttcttatttaaaatccagattttcattccgtaggtcttggtggacccagacatcagcaaaagcttggctgtaagaaacagcctgggtattttgttgttactttttcttttaaaatatttaatggataaacaaaaagtgtatat

SEQ ID NO: 404615 - DNA, 519 bp, Homo sapiens
tatcctgtctgagaaactggggatcagaaaaaaggctgtcagtaccctattggagattctttctgatcttctttattccgaccccagtgtgggcctagttggatctctccttcggttgcatttatcttctacttcccaaattaaggaatttgatatttcccattgtgttcagtgtacagcatagatgggaggagcatgggaaactcctttttaaaagataaccattatcccccttggtggggcattatagcacgcctccagcatactatgtaaaatggtctcatcataaaacactagttgactcaagcaagtcagcactatcactttttccttcctaagacttactgtgattcccagatggaaggctgggccaactcaaaggctacaatctctcatttcagtcccagctactcgggaggctgaggcaggagaattgcttggaccggggaggccgaggttgcagtgagccgagatcatgccattgcactccagcctgggtgacagagcaagactgtctca

SEQ ID NO: 404616 - DNA, 400 bp, Homo sapiens
gggaagcctcaggaaactcaatcatggcgtaaggtgaaggagaagcaagtaccttcttcacaaggcagcaggaaaagagcagagagtaggggaaacagctgcttacaaaaccatcagatctagtgagaactcactcactatcacaagaatagcatgggggaaaccacccccatggtccaatcacctcccacccggtccctcccctgacatgtggggattacaatttgagatgagatttgggtagggacacagccaaaccctattatcccagcactttggaaggctgaggcgggaggattgcttgagttgaagaatttgagaccagcctgggcaatatggcaagatatcatctttatattaataataataataataataataataaaagcagaaatcaatt

SEQ ID NO: 404617 - DNA, 610 bp, Homo sapiens
cagtggctcacgcctgtaatcccagcacttcgggaggccaaggcgggcggatcacaaggtctggagatcgacaccatgttggctaacacggtgaaaccccgtctctactaaaaatacaaaaaattagccgggcctggtgtcgggcgcctgtagtcccagctattcaggaggctgaggcaggagaatggcgtgaaccccgggaggcggaggttgcggtgagctgagattgagccactgcactccagcctgggtgacagagcgagactccgtctcaaaaaaaaaaaaaaaaaaacgaaatgcatttaggaaaacatgatcttagcatgataatgattgtggcctttatagtactacctagctgcataatttgtaagtcacaatttgctattttcagagaaggaagagagtactgttcttgacttatatactataaaatttacttttagtcagtttgtgatgttgcctatgtatatcaacaaatgtactttgatgttcgaactaatatattctcaagtgaatgtttttgtcatggaagagaaaatgaatgttgttttacatgctttacatagctgttcttgagtgtgaactttctgcagcctatatgcagtaa

SEQ ID NO: 404618 - DNA, 718 bp, Homo sapiens
ctcagcctcctgagtagctgggattacaggcgcccgccaccacacccagctaatttttgtatttttaggagaaacagggtttcaccatattggccaggctggtctcgaactcctggcctcaagtgattcacccaccttggcctcccaaagtgctgggattacagtgagccactgcgtctggccctcaggcttactttagaaatgagaaggtgaaggtgggtccagagcggagcgtgtgagttccaggcttggcagggtgccctggcatccagcttacagggagtctgagtttgtgtagaatctgcctcattgttcctgtgtccgtggagaattctttccatcccaaaccatcctgtctaagctctgaggaggcacaggtggctctaaggcggcactggcttttgcctgcaggggcaccatcctcagctacaggtctaacaggaacttggtgaaataagcaggccccactggccggacctccctcccttcgtaggacagatgctctgctcagggctccatgagctgtttgagagaaggtgtggggtttgttcttagaaacatcatgctttctgttggggacttagggtccacactggccagggaagggcatcgggcatctgtcgttgtattccaacacttgggaggtgagggagagaaattttaacccgagggggagttttgaatggccaaatggccccttcctccacctgggcacaaa

SEQ ID NO: 404619 - DNA, 673 bp, Homo sapiens
tggcgtagccttgtagttgaggacgagaggggtctgatcgcgatcggccgaggctggtctcgaactcctggcctcaagtgattcacccaccttggcctcccaaagtgctgggattacagtgagccactgcgtctggccctcaggcttactttagaaatgagaaggtgaaggtgggtccagagcggagcgtgtgagttccaggcttggcagggtgccctggcatccagcttacagggagtctgagtttgtgtagaatctgcctcattgttcctgtgtccgtggagaattctttccatcccaaaccatcctgtctaagctctgaggaggcacaggtggctctaaggcggcactggcttttgcctgcaggggcaccatcctcagctacaggtctaacaggaacttggtgaaataagcaggccccactggccggacctccctcccttcgtaggacagatgctctgctcagggctccatgagctgtttgagagaaggtgtggggtttgttcttagaaacatcatgctttctgttggggacttagggtccacactggccagggaagggcatcgggcatctgtcgttgtattccaacacttgggaggtgagggagagaaattttaacccgagggggagttttgaatggccaaatggccccttcctccacctgggcacaaa

SEQ ID NO: 404620 - DNA, 1398 bp, Homo sapiens
acgagctgacgcagccatggcggaggcggctttggaagccgtgcggagcgagttacgagaattcccggccgctgcaagggagctctgcgtgcctcttgctgtgccctacctggacaaacccccaactccgctccacttctaccgggactgggtctgccccaacaggccgtgcattatccgcaacgctctgcagcactggccggccctccagaagtggtccctcccctatttcagagccacagtgggctccacagaggtgagtgtggccgtgaccccagatggttacgcggatgccgtgagaggggatcgcttcatgatgccagctgagcgccgcctgcccctgagcttcgtgctggatgtgctggagggccgggcccagcaccctggagtcctctatgtgcagaagcagtgctccaacctgcccagcgagctgccccagctgctgcctgatctggaatcccatgtgccctgggcctccgaagccctgggaaagatgcccgatgctgtgaacttctggctgggggaggcggctgcagtgacttctttgcacaaggaccactatgagaacctctactgcgtggtctcaggagagaagcatttcctgttccatccgcccagcgaccggcccttcatcccctatgagctgtacacgccggcaacctaccagctaactgaagagggcacctttaaggtggtggatgaagaggccatggagaaggtgccctggatcccactggaccccttggcgccagacctagcacggtaccctagttacagtcaggcccaggcccttcgctgcacggtgcgggccggtgagatgctctatctgccggctctgtggttccaccacgtccagcagtcccagggctgcatcgcagtgaatttctggtatgacatggaatacgacctcaagtatagttacttccagctgctcgactccctcaccaaggcttcaggccttgactgatggagcactggtgaacacgaccaagcacgcctcgggggacggagccagcccctccctggccaggtcaattctcgagagagcctggagtgtgcatgctggctgctggccccgggtccagcatggcttgagatcagctttggaggatcttggaatgtggtcataaggactcaaggtgccaggcaggtctgggtgagggttctcaggaagttgccacacaggtgagcagagtggggatcaggtgcagcggcacctctccccagcgctgtgatgttgggcgagtcactgcgtctcgggcattggtgtcctgtcagtaaagagataataatggctgtacctcgcggggctgttgtgggcttggagatgatgtctatgaggaccagcatggagctggcacacaggacatgttgaataaaaggtagctgtgagtcgta

SEQ ID NO: 404621 - DNA, 1540 bp, Homo sapiens
acgagctgacgcagccatggcggaggcggctttggaagccgtgcggagcgagttacgagaattcccggccgctgcaagggtctatgtcctgttacattctaagtgagaacgtggacaatcaaccacaggtgtactgaatgagtacattgtagagtagaagaagtaggttagaaggtaagtgcaggcaaagccctctttgggagtatgcctgatgtgtttaggaaacagtgaagaagccagtctgcaggagcagcgtcttctgcgcatgtagctctgcgtgcctcttgctgtgccctacctggacaaacccccaactccgctccacttctaccgggaactggccggccctccagaagtggtccctcccctatttcagagccacagtgggctccacagaggtgagtgtggccgtgaccccagatggttacgcggatgccgtgagaggggatcgcttcatgatgccagctgagcgccgcctgcccctgagcttcgtgctggatgtgctggagggccgggcccagcaccctggagtcctctatgtgcagaagcagtgctccaacctgcccagcgagctgccccagctgctgcctgatctggaatcccatgtgccctgggcctccgaagccctgggaaagatgcccgatgctgtgaacttctggctgggggaggcggctgcagtgacttctttgcacaaggaccactatgagaacctctactgcgtggtctcaggagagaagcatttcctgttccatccgcccagcgaccggcccttcatcccctatgagctgtacacgccggcaacctaccagctaactgaagagggcacctttaaggtggtggatgaagaggccatggagaaggtgccctggatcccactggaccccttggcgccagacctagcacggtaccctagttacagtcaggcccaggcccttcgctgcacggtgcgggccggtgagatgctctatctgccggctctgtggttccaccacgtccagcagtcccagggctgcatcgcagtgaatttctggtatgacatggaatacgacctcaagtatagttacttccagctgctcgactccctcaccaaggcttcaggccttgactgatggagcactggtgaacacgaccaagcacgcctcgggggacggagccagcccctccctggccaggtcaattctcgagagagcctggagtgtgcatgctggctgctggccccgggtccagcatggcttgagatcagctttggaggatcttggaatgtggtcataaggactcaaggtgccaggcaggtctgggtgagggttctcaggaagttgccacacaggtgagcagagtggggatcaggtgcagcggcacctctccccagcgctgtgatgttgggcgagtcactgcgtctcgggcattggtgtcctgtcagtaaagagataataatggctgtacctcgcggggctgttgtgggcttggagatgatgtctatgaggaccagcatggagctggcacacaggacatgttgaataaaaggtagctgtgagtcgta

SEQ ID NO: 404622 - DNA, 7913 bp, Homo sapiens
  misc_feature (3249)..(3249): n is a, c, g, or t
  misc_feature (3263)..(3263): n is a, c, g, or t
  misc_feature (7911)..(7911): n is a, c, g, or t
acgagctgacgcagccatggcggaggcggctttggaagccgtgcggagcgagttacgagaattcccggccgctgcaagggagctctgcgtgcctcttgctgtgccctacctggacaaacccccaactccgctccacttctaccgggactgggtctgccccaacaggccgtgcattatccgcaacgctctgcagcactggccggccctccagaagtggtccctcccctatttcaggtgggagctgccctggggtcaggtgtgagcagtgattactggcatctgggcatgggctgagtgtccattcctctagagccacagtgggctccacagaggtgagtgtggccgtgaccccagatggttacgcggatgccgtgagaggggatcgcttcatgatgccagctgagcgccgcctgcccctgagcttcgtgctggatgtgctggagggccgggcccagcaccctggagtcctctatgtgcagaagcagtgctccaacctgcccagcgagctgccccagctgctgcctgatctggaatcccatgtgccctgggcctccgaagccctgggaaagatgcccgatgctgtgaacttctggctgggggaggcggctgcagtgacttctttgcacaaggaccactatgagaacctctactgcgtggtctcaggagagaagcatttcctgttccatccgcccagcgaccggcccttcatcccctatgagctgtacacgccggcaacctaccagctaactgaagagggcacctttaaggtggtggatgaagaggccatggagaaggtgccctggatcccactggaccccttggcgccagacctagcacggtaccctagttacagtcaggcccaggcccttcgctgcacggtgcgggccggtgagatgctctatctgccggctctgtggttccaccacgtccagcagtcccagggctgcatcgcagtgaatttctggtatgacatggaatacgacctcaagtatagttacttccagctgctcgactccctcaccaaggcttcaggccttgactgatggagcactggtgaacacgaccaagcacgcctcgggggacggagccagcccctccctggccaggtcaattctcgagagagcctggagtgtgcatgctggctgctggccccgggtccagcatggcttgagatcagctttggaggatcttggaatgtggtcataaggactcaaggtgccaggcaggtctgggtgagggttctcaggaagttgccacacaggtgagcagagtggggatcaggtgcagcggcacctctccccagcgctgtgatgttgggcgagtcactgcgtctcgggcattggtgtcctgtcagtaaagagataataatggctgtacctcgcggggctgttgtgggcttggagatgatgtctatgaggaccagcatggagctggcacacaggacatgttgaataaaaggtagctgtgagtcgtatgtccttttttttttttttttaagatggggtctcgctctgtcacccaggctggagtgcagtggtgtgatgtcagctcactgcaagctccgcctcccaggttcacactattctgcctcagcctcccaagtagctgggactacaggtgcgtgccaccatgcccggctaatttttttgtatttttagtagagacggggtttcaccgtgttagccagtatggtcttgatctcctgacctcgtgatccacctgcctcggcctcccaaaagtgctgggattacaggtgtgagctgctgcgcctggcttatgagtcgtatgttctgatcctccctcttgaagttgccttctgtggtctaaggagggcctgaaggttcaggtaaaaacttcagggtgaccttcactgggggtgagggctggatcccagcctgggcccaaagagccgtcagctgcccaagtcccgctgtccatgagagtcaccgcagcccctccctgggacaagcaagcagacctgagtcttgtagctctctggtccggacctctttgcccaggaccttgagagctattcctagctctcctatggttactgtcctcccccagttcaggggcagcaggtgggacctggtgccctggggataacccctgtttctcccataacaggcacaggcaggaagggacggaagcccccgcctctcctggggctgtccctctgaggaaagagttggtctccacacgctgacccccccacaaaccatgccctggaggcagaagaaccccctgcccctgagtgccaacccacaggcctcatccctggccactcagcacctagctttgaagggctgttttatgtgacagccactcccctgcctgtcgtgagggggcccgggtgttcatctcagattgatggatccctgccatcaagactgggcattcctgtccaacaggtgccagagttgcgaaaggcctgtgacagggaactccactcttcccttggctgctgttctgggactcacccctgctttccttctgctcagcccctggcagcaagctctccaggctgggattgcagggctgggtggggcaggcccagctggtaaaggctggcgagtgccacagaggtatcaggagctctagtataggcttagggtgcctcatttcctggacaggtggctggttcaggagtgggtgtggagcttaggtggagcagaggcggcgggtaggagggacttgggaccaattgggacatcacatccctggctctgggttagaaagctgacagtccttgatcctgtggccactgccccatcattcctgctcctgaggactcagtctcatggctgtggtaaggcctggcagggccctgggtccctactgggacccctggtctctacctggggcctagttaatatgtttcttatgggagctgtggtcttctccaggggtagggaggggagtttattgaccacaagaccagggtagcgggcagaagccaggggaggaggaggcttggggatgagggatccgtcctgagtgttttctgtcctgggaacgggctcctggcagagctccctggcaccacagatttgggccctggagactcagaggctcccagctgccgccctgaggccctggaagcaagtggctcctccatgctcctctgactcagttgcctggagtgtgagggccctgggctgaccctggtggatgaggccctccagcactgccctggacctggttgctccctggacttgacctgttagggtccttgtggaggcaggtggnaggccgaaaggaancagttggcacaggcttccctggtcccggtgcgcctgccaggctgcattcccagaaccaggggcatgggtttggagggagctaccgggggaccatcttcagcctgacctggcaggacctggaggacatgacagcctgtgaggggtctgagctaggagccgcctcccctgcccaggagagagcccatttccaggatgctcttctgaccagggtggatggagggtacgagagcagctcagcctggggcccaaggccctgatgtgctacttcccctccctcgatagcttatgtcccctgccacccaagaccagccggaaagctgcttagctggggtgtgggctggggatgtggggtggagagcctaaaggatactagcccgagaaggtggaagcaggtctgtgtgaggcataaatctggagccagcctgcccgggctccaaccccaattgtggacctcaggcaagtgactgcttctctgtgcctcagtttccttgtggagtgggccatcgtaaatagtatctgtgcataaggtggttgtgcgataaatgagttaatgtatgcaaagcccttggcccagagccggcgcagagcattgtgtaagtgctggcaggcgtcatgatggagatatcatgtctcctcttgttgattcaggattctgatgagatggaggatgggcctggggttcaggattaggccttgaggcactgctccagcctcctttgtggcccctgtcacccttggcttcatcggcccgtagcaggtctcccctctcccacctctgcaggcagaggtgtccaggacctgcctgctcacggttcgtgtcctgcaggcccatcgcctaccctctaaggacctagtgaccccctctgactgctacgtgactctctggctgcccacggcctgcagccacaggctccagacacgcacggtcaagaacagcagtagccctgtctggaaccagagctttcacttcaggatccacaggcagctcaagaatgtcatggaactgaaagtctttgaccaggacctggtgaccggagatgaccctgtgttgtcagtactgtttgatgcggggactctgcgggctggggagttccggcgcgagagcttctcactgagccctcagggtgaggggcgcctggaagttgaatttcgcctgcagagtctggctgaccgtggcgagtggctcgtcagcaatggcgttctggtggcccgggagctctcctgcttgcacgttcaactggaggagacaggagaccagaagtcctcagagcacagagttcagcttgtggttcctgggtcctgtgagggtccgcaggaggcctctgtgggcactggcaccttccgcttccactgcccagcctgctgggagcaggagctgagtattcgcctgcaggatgcccccgaggagcaactaaaggcgccactgagtgccctgccctctggtcaagtggtgaggcttgtcttccccacgtcccaggagcccctgatgagagtggagctgaaaaaagaagcagggctggagtgcaatggcgtgatcttggctcactgcaacctccgcctctggggttcaagcgattctcctgcctcagcctcccgagtagctgggattacagactgagggagctggccgtgcgactgggcttcgggccctgtgcagaggagcaggccttcctgagcaggaggaagcaggtggtggccgcggccttgaggcaggccctgcagctggatggagacctgcaggaggatgagatcccagtggtagctattatggccactggtggtgggatccgggcaatgacttccctgtatgggcagctggctggcctgaaggagctgggcctcttggattgcgtctcctacatcaccggggcctcgggctccacctgggccttggccaacctttatgaggacccagagtggtctcagaaggacctggcagggcccactgagttgctgaagacccaggtgaccaagaacaagctgggtgtgctggcccccagccagctgcagcggtaccggcaggagctggccgagcgtgcccgcttgggctacccaagctgcttcaccaacctgtgggccctcatcaacgaggcgctgctgcatgatgagccccatgatcacaagctctcagatcaacgggaggccctgagtcatggccagaaccctctgcccatctactgtgccctcaacaccaaagggcagagcctgaccacttttgaatttgggggtgagtggcccaagagctgagacctgtgcccttgcagttggtggaataaggggagaacgaggactgtgtgcagattgcagatgtcacacccacctctcctgagccaggtcccgtgctttctggagaccggcaccctaccagggtccctcagccctttgggaaggaggcaggggccttaggtcctatgcacgaagcccaggccacaaggcctgggcctcctggtcctcagctgccctaaagcaaaaccctgggtcggggtgggggtgtgggtgcctaagggctctgcaccatgaggctgaggcgtggactcctcacagagtggtgcgagttctctccctacgaggtcggcttccccaagtacggggccttcatcccctctgagctctttggctccgagttctttatggggcagctgatgaagaggcttcctgagtcccgcatctgcttcttagaaggtatctggagcaacctgtatgcagccaacctccaggacagcttatactgggcctcagagcccagccagttctgggaccgctgggtcaggaaccaggccaacctgggtaagtgctccgggcccttcataagggtgccaaggggcagccagctggggctgcaccagggggcggggggttcacacctcttccccctccagggtcaccaccaaggtggggataaaggtgcaggagtccccatttcccccaccttgcctgtgtagacaaggagcaggtcccccttctgaagatagaagaaccaccctcaacagccggcaggatagctgagtttttcaccgatcttctgacgtggcgtccactggcccaggccacacataatttcctgcgtggcctccatttccacaaagactactttcagcatcctcacttctccacatggaaagctaccactctggatgggctccccaaccagctgacaccctcggagccccacctgtgcctgctggatgttggctacctcatcaataccagctgcctgcccctcctgcagcccactcgggacgtggacctcatcctgtcattggactacaacctccacggagccttccagcagttgcagctcctgggccggttctgccaggagcaggggatcccgttcccacccatctcgcccagccccgaagagcagctccagcctcgggagtgccacaccttctccgaccccacctgccccggagcccctgcggtgctgcactttcctctggtcagcgactccttccgggagtactcggcccctggggtccggcggacacccgaggaggcggcagctggggaggtgaacctgtcttcatcggactctccctaccactacacgaaggtgacctacagccaggaggacgtggacaagctgctgcacctgacacattacaatgtctgcaacaaccaggagcagctgctggaggctctgcgccaggcagtgcagcggaggcggcagcgcaggccccactgatggccggggcccctgccacccctaactctcattcattccctggctgctgagttgcaggtgggaactgtcatcacgcagtgcttcagagcctcgggctcaggtggcactgtcccagggtccaggctgagggctgggagctcccttgcgcctcagcagtttgcagtggggtaaggaggccaagcccatttgtgtaatcacccaaaaccccccggcctgtgcctgttttcccttctgcgctaccttgagtagttggagcacttgatacatcacagactcatacaaaaaaaaaaaaaaaaaaaaaaaaaaaaaaaaaaaaaaaaaaaaaaaaaaaaaaaaaaaaagaggggggcgcgcgcgccccaaaaaatctctctcccgcgagggggcgcgcccacataaagcgcgcgcagcaccccgatatttttgtgtgatgaaaaagaggggggtcgccctatatagataggggggttggtcttatattatagataatcaacagcagaagaccgggaggggcacagttgatataaacaacaaagatgtgttagtgttggcgtggagaaaacaagcgagtcagcagactaaggggggaatcaatcttgtagggaaagagaggagacccatctcattttagtgggggaggggagggaacaataattgatggggaggagaagacaatctcctatcagagtagaatatattaaaagcagcctcttaagagggggagtataattatataagatcatttgatacaaggtggggtcggataaataagtgggtgtgagtaaaacaaaacaagagcgtgagatattaatatgggccgcgcagagggtgcgtagaaagaagttatttgtgcgagtaacatagagaaggatgttgattaattagtctagagacaaattttattatactacaacgcgagggggtagcgtattattttaatgaatataagacggaggaganag

SEQ ID NO: 404623 - DNA, 4715 bp, Homo sapiens
  misc_feature (4713)..(4713): n is a, c, g, or t
acgagctgacgcagccatggcggaggcggctttggaagccgtgcggagcgagttacgagaattcccggccgctgcaagggagctctgcgtgcctcttgctgtgccctacctggacaaacccccaactccgctccacttctaccgggactgggtctgccccaacaggccgtgcattatccgcaacgctctgcagcactggccggccctccagaagtggtccctcccctatttcagagccacagtgggctccacagaggtgagtgtggccgtgaccccagatggttacgcggatgccgtgagaggggatcgcttcatgatgccagctgagcgccgcctgcccctgagcttcgtgctggatgtgctggagggccgggcccagcaccctggagtcctctatgtgcagaagcagtgctccaacctgcccagcgagctgccccagctgctgcctgatctggaatcccatgtgccctgggcctccgaagccctgggaaagatgcccgatgctgtgaacttctggctgggggaggcggctgcagtgacttctttgcacaaggaccactatgagaacctctactgcgtggtctcaggagagaagcatttcctgttccatccgcccagcgaccggcccttcatcccctatgagctgtacacgccggcaacctaccagctaactgaagagggcacctttaaggtggtggatgaagaggccatggagaaggtgccctggatcccactggaccccttggcgccagacctagcacggtaccctagttacagtcaggcccaggcccttcgctgcacggtgcgggccggtgagatgctctatctgccggctctgtggttccaccacgtccagcagtcccagggctgcatcgcagtgaatttctggtatgacatggaatacgacctcaagtatagttacttccagctgctcgactccctcaccaaggcttcaggccttgactgatggagcactggtgaacacgaccaagcacgcctcgggggacggagccagcccctccctggccaggtcaattctcgagagagcctggagtgtgcatgctggctgctggccccgggtccagcatggcttgagatcagctttggaggatcttggaatgtggtcataaggactcaaggtgccaggcaggtctgggtgagggttctcaggaagttgccacacaggattctgatgagatggaggatgggcctggggttcaggattaggccttgaggcactgctccagcctcctttgtggcccctgtcacccttggcttcatcggcccgtagcaggtctcccctctcccacctctgcaggcagaggtgtccaggacctgcctgctcacggttcgtgtcctgcaggcccatcgcctaccctctaaggacctagtgaccccctctgactgctacgtgactctctggctgcccacggcctgcagccacaggctccagacacgcacggtcaagaacagcagtagccctgtctggaaccagagctttcacttcaggatccacaggcagctcaagaatgtcatggaactgaaagtctttgaccaggacctggtgaccggagatgaccctgtgttgtcagtactgtttgatgcggggactctgcgggctggggagttccggcgcgagagcttctcactgagccctcagggtgaggggcgcctggaagttgaatttcgcctgcagagtctggctgaccgtggcgagtggctcgtcagcaatggcgttctggtggcccgggagctctcctgcttgcacgttcaactggaggagacaggagaccagaagtcctcagagcacagagttcagcttgtggttcctgggtcctgtgagggtccgcaggaggcctctgtgggcactggcaccttccgcttccactgcccagcctgctgggagcaggagctgagtattcgcctgcaggatgcccccgaggagcaactaaaggcgccactgagtgccctgccctctggtcaagtggtgaggcttgtcttccccacgtcccaggagcccctgatgagagtggagctgaaaaaagaagcagggctggagtgcaatggcgtgatcttggctcactgcaacctccgcctctggggttcaagcgattctcctgcctcagcctcccgagtagctgggattacagactgagggagctggccgtgcgactgggcttcgggccctgtgcagaggagcaggccttcctgagcaggaggaagcaggtggtggccgcggccttgaggcaggccctgcagctggatggagacctgcaggaggatgagatcccagtggtagctattatggccactggtggtgggatccgggcaatgacttccctgtatgggcagctggctggcctgaaggagctgggcctcttggattgcgtctcctacatcaccggggcctcgggctccacctgggccttggccaacctttatgaggacccagagtggtctcagaaggacctggcagggcccactgagttgctgaagacccaggtgaccaagaacaagctgggtgtgctggcccccagccagctgcagcggtaccggcaggagctggccgagcgtgcccgcttgggctacccaagctgcttcaccaacctgtgggccctcatcaacgaggcgctgctgcatgatgagccccatgatcacaagctctcagatcaacgggaggccctgagtcatggccagaaccctctgcccatctactgtgccctcaacaccaaagggcagagcctgaccacttttgaatttggggagtggtgcgagttctctccctacgaggtcggcttccccaagtacggggccttcatcccctctgagctctttggctccgagttctttatggggcagctgatgaagaggcttcctgagtcccgcatctgcttcttagaaggtatctggagcaacctgtatgcagccaacctccaggacagcttatactgggcctcagagcccagccagttctgggaccgctgggtcaggaaccaggccaacctggacaaggagcaggtcccccttctgaagatagaagaaccaccctcaacagccggcaggatagctgagtttttcaccgatcttctgacgtggcgtccactggcccaggccacacataatttcctgcgtggcctccatttccacaaagactactttcagcatcctcacttctccacatggaaagctaccactctggatgggctccccaaccagctgacaccctcggagccccacctgtgcctgctggatgttggctacctcatcaataccagctgcctgcccctcctgcagcccactcgggacgtggacctcatcctgtcattggactacaacctccacggagccttccagcagttgcagctcctgggccggttctgccaggagcaggggatcccgttcccacccatctcgcccagccccgaagagcagctccagcctcgggagtgccacaccttctccgaccccacctgccccggagcccctgcggtgctgcactttcctctggtcagcgactccttccgggagtactcggcccctggggtccggcggacacccgaggaggcggcagctggggaggtgaacctgtcttcatcggactctccctaccactacacgaaggtgacctacagccaggaggacgtggacaagctgctgcacctgacacattacaatgtctgcaacaaccaggagcagctgctggaggctctgcgccaggcagtgcagcggaggcggcagcgcaggccccactgatggccggggcccctgccacccctaactctcattcattccctggctgctgagttgcaggtgggaactgtcatcacgcagtgcttcagagcctcgggctcaggtggcactgtcccagggtccaggctgagggctgggagctcccttgcgcctcagcagtttgcagtggggtaaggaggccaagcccatttgtgtaatcacccaaaaccccccggcctgtgcctgttttcccttctgcgctaccttgagtagttggagcacttgatacatcacagactcatacaaaaaaaaaaaaaaaaaaaaaaaaaaaaaaaaaaaaaaaaaaaaaaaaaaaaaaaaaaaaagaggggggcgcgcgcgccccaaaaaatctctctcccgcgagggggcgcgcccacataaagcgcgcgcagcaccccgatatttttgtgtgatgaaaaagaggggggtcgccctatatagataggggggttggtcttatattatagataatcaacagcagaagaccgggaggggcacagttgatataaacaacaaagatgtgttagtgttggcgtggagaaaacaagcgagtcagcagactaaggggggaatcaatcttgtagggaaagagaggagacccatctcattttagtgggggaggggagggaacaataattgatggggaggagaagacaatctcctatcagagtagaatatattaaaagcagcctcttaagagggggagtataattatataagatcatttgatacaaggtggggtcggataaataagtgggtgtgagtaaaacaaaacaagagcgtgagatattaatatgggccgcgcagagggtgcgtagaaagaagttatttgtgcgagtaacatagagaaggatgttgattaattagtctagagacaaattttattatactacaacgcgagggggtagcgtattattttaatgaatataagacggaggaganag

SEQ ID NO: 404624 - DNA, 7549 bp, Homo sapiens
  misc_feature (3357)..(3357): n is a, c, g, or t
  misc_feature (3371)..(3371): n is a, c, g, or t
  misc_feature (7547)..(7547): n is a, c, g, or t
acgagctgacgcagccatggcggaggcggctttggaagccgtgcggagcgagttacgagaattcccggccgctgcaaggggcccggtgccgtcttgaccgtggtcgcggcgaagccctgtgtttcctacagtcttgagcagcttgctgttacccttgttgaaagctcatcgaaggcacacagctggtgagctctgcgtgcctcttgctgtgccctacctggacaaacccccaactccgctccacttctaccgggactgggtctgccccaacaggccgtgcattatccgcaacgctctgcagcactggccggccctccagaagtggtccctcccctatttcaggtgggagctgccctggggtcaggtgtgagcagtgattactggcatctgggcatgggctgagtgtccattcctctagagccacagtgggctccacagaggtgagtgtggccgtgaccccagatggttacgcggatgccgtgagaggggatcgcttcatgatgccagctgagcgccgcctgcccctgagcttcgtgctggatgtgctggagggccgggcccagcaccctggagtcctctatgtgcagaagcagtgctccaacctgcccagcgagctgccccagctgctgcctgatctggaatcccatgtgccctgggcctccgaagccctgggaaagatgcccgatgctgtgaacttctggctgggggaggcggctgcagtgacttctttgcacaaggaccactatgagaacctctactgcgtggtctcaggagagaagcatttcctgttccatccgcccagcgaccggcccttcatcccctatgagctgtacacgccggcaacctaccagctaactgaagagggcacctttaaggtggtggatgaagaggccatggagaaggtgccctggatcccactggaccccttggcgccagacctagcacggtaccctagttacagtcaggcccaggcccttcgctgcacggtgcgggccggtgagatgctctatctgccggctctgtggttccaccacgtccagcagtcccagggctgcatcgcagtgaatttctggtatgacatggaatacgacctcaagtatagttacttccagctgctcgactccctcaccaaggcttcaggccttgactgatggagcactggtgaacacgaccaagcacgcctcgggggacggagccagcccctccctggccaggtcaattctcgagagagcctggagtgtgcatgctggctgctggccccgggtccagcatggcttgagatcagctttggaggatcttggaatgtggtcataaggactcaaggtgccaggcaggtctgggtgagggttctcaggaagttgccacacaggtgagcagagtggggatcaggtgcagcggcacctctccccagcgctgtgatgttgggcgagtcactgcgtctcgggcattggtgtcctgtcagtaaagagataataatggctgtacctcgcggggctgttgtgggcttggagatgatgtctatgaggaccagcatggagctggcacacaggacatgttgaataaaaggtagctgtgagtcgtatgtccttttttttttttttttaagatggggtctcgctctgtcacccaggctggagtgcagtggtgtgatgtcagctcactgcaagctccgcctcccaggttcacactattctgcctcagcctcccaagtagctgggactacaggtgcgtgccaccatgcccggctaatttttttgtatttttagtagagacggggtttcaccgtgttagccagtatggtcttgatctcctgacctcgtgatccacctgcctcggcctcccaaaagtgctgggattacaggtgtgagctgctgcgcctggcttatgagtcgtatgttctgatcctccctcttgaagttgccttctgtggtctaaggagggcctgaaggttcaggtaaaaacttcagggtgaccttcactgggggtgagggctggatcccagcctgggcccaaagagccgtcagctgcccaagtcccgctgtccatgagagtcaccgcagcccctccctgggacaagcaagcagacctgagtcttgtagctctctggtccggacctctttgcccaggaccttgagagctattcctagctctcctatggttactgtcctcccccagttcaggggcagcaggtgggacctggtgccctggggataacccctgtttctcccataacaggcacaggcaggaagggacggaagcccccgcctctcctggggctgtccctctgaggaaagagttggtctccacacgctgacccccccacaaaccatgccctggaggcagaagaaccccctgcccctgagtgccaacccacaggcctcatccctggccactcagcacctagctttgaagggctgttttatgtgacagccactcccctgcctgtcgtgagggggcccgggtgttcatctcagattgatggatccctgccatcaagactgggcattcctgtccaacaggtgccagagttgcgaaaggcctgtgacagggaactccactcttcccttggctgctgttctgggactcacccctgctttccttctgctcagcccctggcagcaagctctccaggctgggattgcagggctgggtggggcaggcccagctggtaaaggctggcgagtgccacagaggtatcaggagctctagtataggcttagggtgcctcatttcctggacaggtggctggttcaggagtgggtgtggagcttaggtggagcagaggcggcgggtaggagggacttgggaccaattgggacatcacatccctggctctgggttagaaagctgacagtccttgatcctgtggccactgccccatcattcctgctcctgaggactcagtctcatggctgtggtaaggcctggcagggccctgggtccctactgggacccctggtctctacctggggcctagttaatatgtttcttatgggagctgtggtcttctccaggggtagggaggggagtttattgaccacaagaccagggtagcgggcagaagccaggggaggaggaggcttggggatgagggatccgtcctgagtgttttctgtcctgggaacgggctcctggcagagctccctggcaccacagatttgggccctggagactcagaggctcccagctgccgccctgaggccctggaagcaagtggctcctccatgctcctctgactcagttgcctggagtgtgagggccctgggctgaccctggtggatgaggccctccagcactgccctggacctggttgctccctggacttgacctgttagggtccttgtggaggcaggtggnaggccgaaaggaancagttggcacaggcttccctggtcccggtgcgcctgccaggctgcattcccagaaccaggggcatgggtttggagggagctaccgggggaccatcttcagcctgacctggcaggacctggaggacatgacagcctgtgaggggtctgagctaggagccgcctcccctgcccaggagagagcccatttccaggatgctcttctgaccagggtggatggagggtacgagagcagctcagcctggggcccaaggccctgatgtgctacttcccctccctcgatagcttatgtcccctgccacccaagaccagccggaaagctgcttagctggggtgtgggctggggatgtggggtggagagcctaaaggatactagcccgagaaggtggaagcaggtctgtgtgaggcataaatctggagccagcctgcccgggctccaaccccaattgtggacctcaggcaagtgactgcttctctgtgcctcagtttccttgtggagtgggccatcgtaaatagtatctgtgcataaggtggttgtgcgataaatgagttaatgtatgcaaagcccttggcccagagccggcgcagagcattgtgtaagtgctggcaggcgtcatgatggagatatcatgtctcctcttgttgattcaggattctgatgagatggaggatgggcctggggttcaggattaggccttgaggcactgctccagcctcctttgtggcccctgtcacccttggcttcatcggcccgtagcaggtctcccctctcccacctctgcaggcagaggtgtccaggacctgcctgctcacggttcgtgtcctgcaggcccatcgcctaccctctaaggacctagtgaccccctctgactgctacgtgactctctggctgcccacggcctgcagccacaggctccagacacgcacggtcaagaacagcagtagccctgtctggaaccagagctttcacttcaggatccacaggcagctcaagaatgtcatggaactgaaagtctttgaccaggacctggtgaccggagatgaccctgtgttgtcagtactgtttgatgcggggactctgcgggctggggagttccggcgcgagagcttctcactgagccctcagggtgaggggcgcctggaagttgaatttcgcctgcagagtctggctgaccgtggcgagtggctcgtcagcaatggcgttctggtggcccgggagctctcctgcttgcacgttcaactggaggagacaggagaccagaagtcctcagagcacagagttcagcttgtggttcctgggtcctgtgagggtccgcaggaggcctctgtgggcactggcaccttccgcttccactgcccagcctgctgggagcaggagctgagtattcgcctgcaggatgcccccgaggagcaactaaaggcgccactgagtgccctgccctctggtcaagtggtgaggcttgtcttccccacgtcccaggagcccctgatgagagtggagctgaaaaaagaagcagggctggagtgcaatggcgtgatcttggctcactgcaacctccgcctctggggttcaagcgattctcctgcctcagcctcccgagtagctgggattacagactgagggagctggccgtgcgactgggcttcgggccctgtgcagaggagcaggccttcctgagcaggaggaagcaggtggtggccgcggccttgaggcaggccctgcagctggatggagacctgcaggaggatgagatcccagtggtagctattatggccactggtggtgggatccgggcaatgacttccctgtatgggcagctggctggcctgaaggagctgggcctcttggattgcgtctcctacatcaccggggcctcgggctccacctgggccttggccaacctttatgaggacccagagtggtctcagaaggacctggcagggcccactgagttgctgaagacccaggtgaccaagaacaagctgggtgtgctggcccccagccagctgcagcggtaccggcaggagctggccgagcgtgcccgcttgggctacccaagctgcttcaccaacctgtgggccctcatcaacgaggcgctgctgcatgatgagccccatgatcacaagctctcagatcaacgggaggccctgagtcatggccagaaccctctgcccatctactgtgccctcaacaccaaagggcagagcctgaccacttttgaatttggggagtggtgcgagttctctccctacgaggtcggcttccccaagtacggggccttcatcccctctgagctctttggctccgagttctttatggggcagctgatgaagaggcttcctgagtcccgcatctgcttcttagaaggtatctggagcaacctgtatgcagccaacctccaggacagcttatactgggcctcagagcccagccagttctgggaccgctgggtcaggaaccaggccaacctggacaaggagcaggtcccccttctgaagatagaagaaccaccctcaacagccggcaggatagctgagtttttcaccgatcttctgacgtggcgtccactggcccaggccacacataatttcctgcgtggcctccatttccacaaagactactttcagcatcctcacttctccacatggaaagctaccactctggatgggctccccaaccagctgacaccctcggagccccacctgtgcctgctggatgttggctacctcatcaataccagctgcctgcccctcctgcagcccactcgggacgtggacctcatcctgtcattggactacaacctccacggagccttccagcagttgcagctcctgggccggttctgccaggagcaggggatcccgttcccacccatctcgcccagccccgaagagcagctccagcctcgggagtgccacaccttctccgaccccacctgccccggagcccctgcggtgctgcactttcctctggtcagcgactccttccgggagtactcggcccctggggtccggcggacacccgaggaggcggcagctggggaggtgaacctgtcttcatcggactctccctaccactacacgaaggtgacctacagccaggaggacgtggacaagctgctgcacctgacacattacaatgtctgcaacaaccaggagcagctgctggaggctctgcgccaggcagtgcagcggaggcggcagcgcaggccccactgatggccggggcccctgccacccctaactctcattcattccctggctgctgagttgcaggtgggaactgtcatcacgcagtgcttcagagcctcgggctcaggtggcactgtcccagggtccaggctgagggctgggagctcccttgcgcctcagcagtttgcagtggggtaaggaggccaagcccatttgtgtaatcacccaaaaccccccggcctgtgcctgttttcccttctgcgctaccttgagtagttggagcacttgatacatcacagactcatacaaaaaaaaaaaaaaaaaaaaaaaaaaaaaaaaaaaaaaaaaaaaaaaaaaaaaaaaaaaaagaggggggcgcgcgcgccccaaaaaatctctctcccgcgagggggcgcgcccacataaagcgcgcgcagcaccccgatatttttgtgtgatgaaaaagaggggggtcgccctatatagataggggggttggtcttatattatagataatcaacagcagaagaccgggaggggcacagttgatataaacaacaaagatgtgttagtgttggcgtggagaaaacaagcgagtcagcagactaaggggggaatcaatcttgtagggaaagagaggagacccatctcattttagtgggggaggggagggaacaataattgatggggaggagaagacaatctcctatcagagtagaatatattaaaagcagcctcttaagagggggagtataattatataagatcatttgatacaaggtggggtcggataaataagtgggtgtgagtaaaacaaaacaagagcgtgagatattaatatgggccgcgcagagggtgcgtagaaagaagttatttgtgcgagtaacatagagaaggatgttgattaattagtctagagacaaattttattatactacaacgcgagggggtagcgtattattttaatgaatataagacggaggaganag

SEQ ID NO: 404625 - DNA, 4475 bp, Homo sapiens
  misc_feature (4473)..(4473): n is a, c, g, or t
acgagctgacgcagccatggcggaggcggctttggaagccgtgcggagcgagttacgagaattcccggccgctgcaagggagctctgcgtgcctcttgctgtgccctacctggacaaacccccaactccgctccacttctaccgggactgggtctgccccaacaggccgtgcattatccgcaacgctctgcagcactggccggccctccagaagtggtccctcccctatttcagagccacagtgggctccacagaggtgagtgtggccgtgaccccagatggttacgcggatgccgtgagaggggtgcacaaggaccactatgagaacctctactgcgtggtctcaggagagaagcatttcctgttccatccgcccagcgaccggcccttcatcccctatgagctgtacacgccggcaacctaccagctaactgaagagggcacctttaaggtggtggatgaagaggccatggagaaggtgccctggatcccactggaccccttggcgccagacctagcacggtaccctagttacagtcaggcccaggcccttcgctgcacggtgcgggccggtgagatgctctatctgccggctctgtggttccaccacgtccagcagtcccagggctgcatcgcagtgaatttctggtatgacatggaatacgacctcaagtatagttacttccagctgctcgactccctcaccaaggcttcaggccttgactgatggagcactggtgaacacgaccaagcacgcctcgggggacggagccagcccctccctggccaggtcaattctcgagagagcctggagtgtgcatgctggctgctggccccgggtccagcatggcttgagatcagctttggaggatcttggaatgtggtcataaggactcaaggtgccaggcaggtctgggtgagggttctcaggaagttgccacacaggattctgatgagatggaggatgggcctggggttcaggattaggccttgaggcactgctccagcctcctttgtggcccctgtcacccttggcttcatcggcccgtagcaggtctcccctctcccacctctgcaggcagaggtgtccaggacctgcctgctcacggttcgtgtcctgcaggcccatcgcctaccctctaaggacctagtgaccccctctgactgctacgtgactctctggctgcccacggcctgcagccacaggctccagacacgcacggtcaagaacagcagtagccctgtctggaaccagagctttcacttcaggatccacaggcagctcaagaatgtcatggaactgaaagtctttgaccaggacctggtgaccggagatgaccctgtgttgtcagtactgtttgatgcggggactctgcgggctggggagttccggcgcgagagcttctcactgagccctcagggtgaggggcgcctggaagttgaatttcgcctgcagagtctggctgaccgtggcgagtggctcgtcagcaatggcgttctggtggcccgggagctctcctgcttgcacgttcaactggaggagacaggagaccagaagtcctcagagcacagagttcagcttgtggttcctgggtcctgtgagggtccgcaggaggcctctgtgggcactggcaccttccgcttccactgcccagcctgctgggagcaggagctgagtattcgcctgcaggatgcccccgaggagcaactaaaggcgccactgagtgccctgccctctggtcaagtggtgaggcttgtcttccccacgtcccaggagcccctgatgagagtggagctgaaaaaagaagcagggctggagtgcaatggcgtgatcttggctcactgcaacctccgcctctggggttcaagcgattctcctgcctcagcctcccgagtagctgggattacagactgagggagctggccgtgcgactgggcttcgggccctgtgcagaggagcaggccttcctgagcaggaggaagcaggtggtggccgcggccttgaggcaggccctgcagctggatggagacctgcaggaggatgagatcccagtggtagctattatggccactggtggtgggatccgggcaatgacttccctgtatgggcagctggctggcctgaaggagctgggcctcttggattgcgtctcctacatcaccggggcctcgggctccacctgggccttggccaacctttatgaggacccagagtggtctcagaaggacctggcagggcccactgagttgctgaagacccaggtgaccaagaacaagctgggtgtgctggcccccagccagctgcagcggtaccggcaggagctggccgagcgtgcccgcttgggctacccaagctgcttcaccaacctgtgggccctcatcaacgaggcgctgctgcatgatgagccccatgatcacaagctctcagatcaacgggaggccctgagtcatggccagaaccctctgcccatctactgtgccctcaacaccaaagggcagagcctgaccacttttgaatttggggagtggtgcgagttctctccctacgaggtcggcttccccaagtacggggccttcatcccctctgagctctttggctccgagttctttatggggcagctgatgaagaggcttcctgagtcccgcatctgcttcttagaaggtatctggagcaacctgtatgcagccaacctccaggacagcttatactgggcctcagagcccagccagttctgggaccgctgggtcaggaaccaggccaacctggacaaggagcaggtcccccttctgaagatagaagaaccaccctcaacagccggcaggatagctgagtttttcaccgatcttctgacgtggcgtccactggcccaggccacacataatttcctgcgtggcctccatttccacaaagactactttcagcatcctcacttctccacatggaaagctaccactctggatgggctccccaaccagctgacaccctcggagccccacctgtgcctgctggatgttggctacctcatcaataccagctgcctgcccctcctgcagcccactcgggacgtggacctcatcctgtcattggactacaacctccacggagccttccagcagttgcagctcctgggccggttctgccaggagcaggggatcccgttcccacccatctcgcccagccccgaagagcagctccagcctcgggagtgccacaccttctccgaccccacctgccccggagcccctgcggtgctgcactttcctctggtcagcgactccttccgggagtactcggcccctggggtccggcggacacccgaggaggcggcagctggggaggtgaacctgtcttcatcggactctccctaccactacacgaaggtgacctacagccaggaggacgtggacaagctgctgcacctgacacattacaatgtctgcaacaaccaggagcagctgctggaggctctgcgccaggcagtgcagcggaggcggcagcgcaggccccactgatggccggggcccctgccacccctaactctcattcattccctggctgctgagttgcaggtgggaactgtcatcacgcagtgcttcagagcctcgggctcaggtggcactgtcccagggtccaggctgagggctgggagctcccttgcgcctcagcagtttgcagtggggtaaggaggccaagcccatttgtgtaatcacccaaaaccccccggcctgtgcctgttttcccttctgcgctaccttgagtagttggagcacttgatacatcacagactcatacaaaaaaaaaaaaaaaaaaaaaaaaaaaaaaaaaaaaaaaaaaaaaaaaaaaaaaaaaaaaagaggggggcgcgcgcgccccaaaaaatctctctcccgcgagggggcgcgcccacataaagcgcgcgcagcaccccgatatttttgtgtgatgaaaaagaggggggtcgccctatatagataggggggttggtcttatattatagataatcaacagcagaagaccgggaggggcacagttgatataaacaacaaagatgtgttagtgttggcgtggagaaaacaagcgagtcagcagactaaggggggaatcaatcttgtagggaaagagaggagacccatctcattttagtgggggaggggagggaacaataattgatggggaggagaagacaatctcctatcagagtagaatatattaaaagcagcctcttaagagggggagtataattatataagatcatttgatacaaggtggggtcggataaataagtgggtgtgagtaaaacaaaacaagagcgtgagatattaatatgggccgcgcagagggtgcgtagaaagaagttatttgtgcgagtaacatagagaaggatgttgattaattagtctagagacaaattttattatactacaacgcgagggggtagcgtattattttaatgaatataagacggaggaganag

SEQ ID NO: 404626 - DNA, 5020 bp, Homo sapiens
  misc_feature (5018)..(5018): n is a, c, g, or t
acgagctgacgcagccatggcggaggcggctttggaagccgtgcggagcgagttacgagaattcccggccgctgcaagggagctctgcgtgcctcttgctgtgccctacctggacaaacccccaactccgctccacttctaccgggactgggtctgccccaacaggccgtgcattatccgcaacgctctgcagcactggccggccctccagaagtggtccctcccctatttcaggtgggagctgccctggggtcaggtgtgagcagtgattactggcatctgggcatgggctgagtgtccattcctctagagccacagtgggctccacagaggtgagtgtggccgtgaccccagatggttacgcggatgccgtgagaggggatcgcttcatgatgccagctgagcgccgcctgcccctgagcttcgtgctggatgtgctggagggccgggcccagcaccctggagtcctctatgtgcagaagcagtgctccaacctgcccagcgagctgccccagctgctgcctgatctggaatcccatgtgccctgggcctccgaagccctgggaaagatgcccgatgctgtgaacttctggctgggggaggcggctgcagtgacttctttgcacaaggaccactatgagaacctctactgcgtggtctcaggagagaagcatttcctgttccatccgcccagcgaccggcccttcatcccctatgagctgtacacgccggcaacctaccagctaactgaagagggcacctttaaggtggtggatgaagaggccatggagaaggtgtctgtcctgttcttgggctctagggagggagaagggcagaagcctggctctgaagaacaggcacaaaagatctggggaggtggcaccttgctctgaaaagtctctaagtctgaggcctttcactgctgagccaagcagggcctgtggtgttgacctttggaagggacagagcctgaagtcctggggggtctggggggctgctccctggcatctgatgtgttcccaggtgccctggatcccactggaccccttggcgccagacctagcacggtaccctagttacagtcaggcccaggcccttcgctgcacggtgcgggccggtgagatgctctatctgccggctctgtggttccaccacgtccagcagtcccagggctgcatcgcagtgaatttctggtatgacatggaatacgacctcaagtatagttacttccagctgctcgactccctcaccaaggcttcaggccttgactgatggagcactggtgaacacgaccaagcacgcctcgggggacggagccagcccctccctggccaggtcaattctcgagagagcctggagtgtgcatgctggctgctggccccgggtccagcatggcttgagatcagctttggaggatcttggaatgtggtcataaggactcaaggtgccaggcaggtctgggtgagggttctcaggaagttgccacacaggattctgatgagatggaggatgggcctggggttcaggattaggccttgaggcactgctccagcctcctttgtggcccctgtcacccttggcttcatcggcccgtagcaggtctcccctctcccacctctgcaggcagaggtgtccaggacctgcctgctcacggttcgtgtcctgcaggcccatcgcctaccctctaaggacctagtgaccccctctgactgctacgtgactctctggctgcccacggcctgcagccacaggctccagacacgcacggtcaagaacagcagtagccctgtctggaaccagagctttcacttcaggatccacaggcagctcaagaatgtcatggaactgaaagtctttgaccaggacctggtgaccggagatgaccctgtgttgtcagtactgtttgatgcggggactctgcgggctggggagttccggcgcgagagcttctcactgagccctcagggtgaggggcgcctggaagttgaatttcgcctgcagagtctggctgaccgtggcgagtggctcgtcagcaatggcgttctggtggcccgggagctctcctgcttgcacgttcaactggaggagacaggagaccagaagtcctcagagcacagagttcagcttgtggttcctgggtcctgtgagggtccgcaggaggcctctgtgggcactggcaccttccgcttccactgcccagcctgctgggagcaggagctgagtattcgcctgcaggatgcccccgaggagcaactaaaggcgccactgagtgccctgccctctggtcaagtggtgaggcttgtcttccccacgtcccaggagcccctgatgagagtggagctgaaaaaagaagcagggctggagtgcaatggcgtgatcttggctcactgcaacctccgcctctggggttcaagcgattctcctgcctcagcctcccgagtagctgggattacagactgagggagctggccgtgcgactgggcttcgggccctgtgcagaggagcaggccttcctgagcaggaggaagcaggtggtggccgcggccttgaggcaggccctgcagctggatggagacctgcaggaggatgagatcccagtggtagctattatggccactggtggtgggatccgggcaatgacttccctgtatgggcagctggctggcctgaaggagctgggcctcttggattgcgtctcctacatcaccggggcctcgggctccacctgggccttggccaacctttatgaggacccagagtggtctcagaaggacctggcagggcccactgagttgctgaagacccaggtgaccaagaacaagctgggtgtgctggcccccagccagctgcagcggtaccggcaggagctggccgagcgtgcccgcttgggctacccaagctgcttcaccaacctgtgggccctcatcaacgaggcgctgctgcatgatgagccccatgatcacaagctctcagatcaacgggaggccctgagtcatggccagaaccctctgcccatctactgtgccctcaacaccaaagggcagagcctgaccacttttgaatttggggagtggtgcgagttctctccctacgaggtcggcttccccaagtacggggccttcatcccctctgagctctttggctccgagttctttatggggcagctgatgaagaggcttcctgagtcccgcatctgcttcttagaaggtatctggagcaacctgtatgcagccaacctccaggacagcttatactgggcctcagagcccagccagttctgggaccgctgggtcaggaaccaggccaacctggacaaggagcaggtcccccttctgaagatagaagaaccaccctcaacagccggcaggatagctgagtttttcaccgatcttctgacgtggcgtccactggcccaggccacacataatttcctgcgtggcctccatttccacaaagactactttcagcatcctcacttctccacatggaaagctaccactctggatgggctccccaaccagctgacaccctcggagccccacctgtgcctgctggatgttggctacctcatcaataccagctgcctgcccctcctgcagcccactcgggacgtggacctcatcctgtcattggactacaacctccacggagccttccagcagttgcagctcctgggccggttctgccaggagcaggggatcccgttcccacccatctcgcccagccccgaagagcagctccagcctcgggagtgccacaccttctccgaccccacctgccccggagcccctgcggtgctgcactttcctctggtcagcgactccttccgggagtactcggcccctggggtccggcggacacccgaggaggcggcagctggggaggtgaacctgtcttcatcggactctccctaccactacacgaaggtgacctacagccaggaggacgtggacaagctgctgcacctgacacattacaatgtctgcaacaaccaggagcagctgctggaggctctgcgccaggcagtgcagcggaggcggcagcgcaggccccactgatggccggggcccctgccacccctaactctcattcattccctggctgctgagttgcaggtgggaactgtcatcacgcagtgcttcagagcctcgggctcaggtggcactgtcccagggtccaggctgagggctgggagctcccttgcgcctcagcagtttgcagtggggtaaggaggccaagcccatttgtgtaatcacccaaaaccccccggcctgtgcctgttttcccttctgcgctaccttgagtagttggagcacttgatacatcacagactcatacaaaaaaaaaaaaaaaaaaaaaaaaaaaaaaaaaaaaaaaaaaaaaaaaaaaaaaaaaaaaagaggggggcgcgcgcgccccaaaaaatctctctcccgcgagggggcgcgcccacataaagcgcgcgcagcaccccgatatttttgtgtgatgaaaaagaggggggtcgccctatatagataggggggttggtcttatattatagataatcaacagcagaagaccgggaggggcacagttgatataaacaacaaagatgtgttagtgttggcgtggagaaaacaagcgagtcagcagactaaggggggaatcaatcttgtagggaaagagaggagacccatctcattttagtgggggaggggagggaacaataattgatggggaggagaagacaatctcctatcagagtagaatatattaaaagcagcctcttaagagggggagtataattatataagatcatttgatacaaggtggggtcggataaataagtgggtgtgagtaaaacaaaacaagagcgtgagatattaatatgggccgcgcagagggtgcgtagaaagaagttatttgtgcgagtaacatagagaaggatgttgattaattagtctagagacaaattttattatactacaacgcgagggggtagcgtattattttaatgaatataagacggaggaganag

SEQ ID NO: 404627 - DNA, 1882 bp, Homo sapiens
  misc_feature (1880)..(1880): n is a, c, g, or t
ctggccatggggaagggtaggattgggacaagagtcgggggccctcttccctcacggccgctctttcaggtatctggagcaacctgtatgcagccaacctccaggacagcttatactgggcctcagagcccagccagttctgggaccgctgggtcaggaaccaggccaacctggacaaggagcaggtcccccttctgaagatagaagaaccaccctcaacagccggcaggatagctgagtttttcaccgatcttctgacgtggcgtccactggcccaggccacacataatttcctgcgtggcctccatttccacaaagactactttcagcatcctcacttctccacatggaaagctaccactctggatgggctccccaaccagctgacaccctcggagccccacctgtgcctgctggatgttggctacctcatcaataccagctgcctgcccctcctgcagcccactcgggacgtggacctcatcctgtcattggactacaacctccacggagccttccagcagttgcagctcctgggccggttctgccaggagcaggggatcccgttcccacccatctcgcccagccccgaagagcagctccagcctcgggagtgccacaccttctccgaccccacctgccccggagcccctgcggtgctgcactttcctctggtcagcgactccttccgggagtactcggcccctggggtccggcggacacccgaggaggcggcagctggggaggtgaacctgtcttcatcggactctccctaccactacacgaaggtgacctacagccaggaggacgtggacaagctgctgcacctgacacattacaatgtctgcaacaaccaggagcagctgctggaggctctgcgccaggcagtgcagcggaggcggcagcgcaggccccactgatggccggggcccctgccacccctaactctcattcattccctggctgctgagttgcaggtgggaactgtcatcacgcagtgcttcagagcctcgggctcaggtggcactgtcccagggtccaggctgagggctgggagctcccttgcgcctcagcagtttgcagtggggtaaggaggccaagcccatttgtgtaatcacccaaaaccccccggcctgtgcctgttttcccttctgcgctaccttgagtagttggagcacttgatacatcacagactcatacaaaaaaaaaaaaaaaaaaaaaaaaaaaaaaaaaaaaaaaaaaaaaaaaaaaaaaaaaaaaagaggggggcgcgcgcgccccaaaaaatctctctcccgcgagggggcgcgcccacataaagcgcgcgcagcaccccgatatttttgtgtgatgaaaaagaggggggtcgccctatatagataggggggttggtcttatattatagataatcaacagcagaagaccgggaggggcacagttgatataaacaacaaagatgtgttagtgttggcgtggagaaaacaagcgagtcagcagactaaggggggaatcaatcttgtagggaaagagaggagacccatctcattttagtgggggaggggagggaacaataattgatggggaggagaagacaatctcctatcagagtagaatatattaaaagcagcctcttaagagggggagtataattatataagatcatttgatacaaggtggggtcggataaataagtgggtgtgagtaaaacaaaacaagagcgtgagatattaatatgggccgcgcagagggtgcgtagaaagaagttatttgtgcgagtaacatagagaaggatgttgattaattagtctagagacaaattttattatactacaacgcgagggggtagcgtattattttaatgaatataagacggaggaganag

SEQ ID NO: 404628 - DNA, 932 bp, Homo sapiens
  misc_feature (930)..(930): n is a, c, g, or t
ccttcgactcttcgtgccacttatttgccgcctgcctgcatgccattgagggttcccagcaccatgagggcctggatcttctttatcctttgcctggccgggagggccttggcagcccctcagcagtttgcagtggggtaaggaggccaagcccatttgtgtaatcacccaaaaccccccggcctgtgcctgttttcccttctgcgctaccttgagtagttggagcacttgatacatcacagactcatacaaaaaaaaaaaaaaaaaaaaaaaaaaaaaaaaaaaaaaaaaaaaaaaaaaaaaaaaaaaaagaggggggcgcgcgcgccccaaaaaatctctctcccgcgagggggcgcgcccacataaagcgcgcgcagcaccccgatatttttgtgtgatgaaaaagaggggggtcgccctatatagataggggggttggtcttatattatagataatcaacagcagaagaccgggaggggcacagttgatataaacaacaaagatgtgttagtgttggcgtggagaaaacaagcgagtcagcagactaaggggggaatcaatcttgtagggaaagagaggagacccatctcattttagtgggggaggggagggaacaataattgatggggaggagaagacaatctcctatcagagtagaatatattaaaagcagcctcttaagagggggagtataattatataagatcatttgatacaaggtggggtcggataaataagtgggtgtgagtaaaacaaaacaagagcgtgagatattaatatgggccgcgcagagggtgcgtagaaagaagttatttgtgcgagtaacatagagaaggatgttgattaattagtctagagacaaattttattatactacaacgcgagggggtagcgtattattttaatgaatataagacggaggaganag

SEQ ID NO: 404629 - DNA, 580 bp, Homo sapiens
agccccacctgtgcctgctggatgttggctacctcatcaataccagctgcctgcccctcctgcagcccactcgggacgtggacctcatcctgtcattggactacaacctccacggagccttccaggttgggaagggtgggcagcccaccagggaggcggtgggtggcccctgtcccctgaagagaggggctttggagtccagtgtctggttcagcttcctttaggagctgtgattgggacactggaatcttaatttgccaccagaggagctcattcttttccggaagttgggaggctggcgaggttctcctggtatcttgtagctgggtcccctttactgacctgcgaggtgtggtcctgggcctctgggcccacctgctgagtctgctttggctcccagtgtcagaactggaatgctgggagtaacccggctccgtctagccccagaggagctgccaccgaggcctgtcaggtgtggagagtttttttccaacgactggcttcataggccccactggagaccgttttggcatttgagccccaggtcctgtgcatcttacgtcagccccagtgttgagga

SEQ ID NO: 404630 - DNA, 4017 bp, Homo sapiens
  misc_feature (4015)..(4015): n is a, c, g, or t
acgagctgacgcagccatggcggaggcggctttggaagccgtgcggagcgagttacgagaattcccggccgctgcaagggagctctgcgtgcctcttgctgtgccctacctggacaaacccccaactccgctccacttctaccgggactgggtctgccccaacaggccgtgcattatccgcaacgctctgcagcactggccggccctccagaagtggtccctcccctatttcagagccacagtgggctccacagaggtgagtgtggccgtgaccccagatggttacgcggatgccgtgagaggggatcgcttcatgatgccagctgagcgccgcctgcccctgagcttcgtgctggatgtgctggagggccgggcccagcaccctggagtcctctatgtgcagaagcagtgctccaacctgcccagcgagctgccccagctgctgcctgatctggaatcccatgtgccctgggcctccgaagccctgggaaagatgcccgatgctgtgaacttctggctgggggaggcggctgcagtgacttctttgcacaaggaccactatgagaacctctactgcgtggtctcaggagagaagcatttcctgttccatccgcccagcgaccggcccttcatcccctatgagctgtacacgccggcaacctaccagctaactgaagagggcacctttaaggtggtggatgaagaggccatggagaaggcagaggtgtccaggacctgcctgctcacggttcgtgtcctgcaggcccatcgcctaccctctaaggacctagtgaccccctctgactgctacgtgactctctggctgcccacggcctgcagccacaggctccagacacgcacggtcaagaacagcagtagccctgtctggaaccagagctttcacttcaggatccacaggcagctcaagaatgtcatggaactgaaagtctttgaccaggacctggtgaccggagatgaccctgtgttgtcagtactgtttgatgcggggactctgcgggctggggagttccggcgcgagagcttctcactgagccctcagggtgaggggcgcctggaagttgaatttcgcctgcagagtctggctgaccgtggcgagtggctcgtcagcaatggcgttctggtggcccgggagctctcctgcttgcacgttcaactggaggagacaggagaccagaagtcctcagagcacagagttcagcttgtggttcctgggtcctgtgagggtccgcaggaggcctctgtgggcactggcaccttccgcttccactgcccagcctgctgggagcaggagctgagtattcgcctgcaggatgcccccgaggagcaactaaaggcgccactgagtgccctgccctctggtcaagtggtgaggcttgtcttccccacgtcccaggagcccctgatgagagtggagctgaaaaaagaagcaggactgagggagctggccgtgcgactgggcttcgggccctgtgcagaggagcaggccttcctgagcaggaggaagcaggtggtggccgcggccttgaggcaggccctgcagctggatggagacctgcaggaggatgagatcccagtggtagctattatggccactggtggtgggatccgggcaatgacttccctgtatgggcagctggctggcctgaaggagctgggcctcttggattgcgtctcctacatcaccggggcctcgggctccacctgggccttggccaacctttatgaggacccagagtggtctcagaaggacctggcagggcccactgagttgctgaagacccaggtgaccaagaacaagctgggtgtgctggcccccagccagctgcagcggtaccggcaggagctggccgagcgtgcccgcttgggctacccaagctgcttcaccaacctgtgggccctcatcaacgaggcgctgctgcatgatgagccccatgatcacaagctctcagatcaacgggaggccctgagtcatggccagaaccctctgcccatctactgtgccctcaacaccaaagggcagagcctgaccacttttgaatttggggagtggtgcgagttctctccctacgaggtcggcttccccaagtacggggccttcatcccctctgagctctttggctccgagttctttatggggcagctgatgaagaggcttcctgagtcccgcatctgcttcttagaaggtatctggagcaacctgtatgcagccaacctccaggacagcttatactgggcctcagagcccagccagttctgggaccgctgggtcaggaaccaggccaacctggacaaggagcaggtcccccttctgaagatagaagaaccaccctcaacagccggcaggatagctgagtttttcaccgatcttctgacgtggcgtccactggcccaggccacacataatttcctgcgtggcctccatttccacaaagactactttcagcatcctcacttctccacatggaaagctaccactctggatgggctccccaaccagctgacaccctcggagccccacctgtgcctgctggatgttggctacctcatcaataccagctgcctgcccctcctgcagcccactcgggacgtggacctcatcctgtcattggactacaacctccacggagccttccagcagttgcagctcctgggccggttctgccaggagcaggggatcccgttcccacccatctcgcccagccccgaagagcagctccagcctcgggagtgccacaccttctccgaccccacctgccccggagcccctgcggtgctgcactttcctctggtcagcgactccttccgggagtactcggcccctggggtccggcggacacccgaggaggcggcagctggggaggtgaacctgtcttcatcggactctccctaccactacacgaaggtgacctacagccaggaggacgtggacaagctgctgcacctgacacattacaatgtctgcaacaaccaggagcagctgctggaggctctgcgccaggcagtgcagcggaggcggcagcgcaggccccactgatggccggggcccctgccacccctaactctcattcattccctggctgctgagttgcaggtgggaactgtcatcacgcagtgcttcagagcctcgggctcaggtggcactgtcccagggtccaggctgagggctgggagctcccttgcgcctcagcagtttgcagtggggtaaggaggccaagcccatttgtgtaatcacccaaaaccccccggcctgtgcctgttttcccttctgcgctaccttgagtagttggagcacttgatacatcacagactcatacaaaaaaaaaaaaaaaaaaaaaaaaaaaaaaaaaaaaaaaaaaaaaaaaaaaaaaaaaaaaagaggggggcgcgcgcgccccaaaaaatctctctcccgcgagggggcgcgcccacataaagcgcgcgcagcaccccgatatttttgtgtgatgaaaaagaggggggtcgccctatatagataggggggttggtcttatattatagataatcaacagcagaagaccgggaggggcacagttgatataaacaacaaagatgtgttagtgttggcgtggagaaaacaagcgagtcagcagactaaggggggaatcaatcttgtagggaaagagaggagacccatctcattttagtgggggaggggagggaacaataattgatggggaggagaagacaatctcctatcagagtagaatatattaaaagcagcctcttaagagggggagtataattatataagatcatttgatacaaggtggggtcggataaataagtgggtgtgagtaaaacaaaacaagagcgtgagatattaatatgggccgcgcagagggtgcgtagaaagaagttatttgtgcgagtaacatagagaaggatgttgattaattagtctagagacaaattttattatactacaacgcgagggggtagcgtattattttaatgaatataagacggaggaganag

SEQ ID NO: 404631 - DNA, 7365 bp, Homo sapiens
  misc_feature (3173)..(3173): n is a, c, g, or t
  misc_feature (3187)..(3187): n is a, c, g, or t
  misc_feature (7363)..(7363): n is a, c, g, or t
acgagctgacgcagccatggcggaggcggctttggaagccgtgcggagcgagttacgagaattcccggccgctgcaagggagctctgcgtgcctcttgctgtgccctacctggacaaacccccaactccgctccacttctaccgggactgggtctgccccaacaggccgtgcattatccgcaacgctctgcagcactggccggccctccagaagtggtccctcccctatttcagagccacagtgggctccacagaggtgagtgtggccgtgaccccagatggttacgcggatgccgtgagaggggatcgcttcatgatgccagctgagcgccgcctgcccctgagcttcgtgctggatgtgctggagggccgggcccagcaccctggagtcctctatgtgcagaagcagtgctccaacctgcccagcgagctgccccagctgctgcctgatctggaatcccatgtgccctgggcctccgaagccctgggaaagatgcccgatgctgtgaacttctggctgggggaggcggctgcagtgacttctttgcacaaggaccactatgagaacctctactgcgtggtctcaggagagaagcatttcctgttccatccgcccagcgaccggcccttcatcccctatgagctgtacacgccggcaacctaccagctaactgaagagggcacctttaaggtggtggatgaagaggccatggagaaggtgccctggatcccactggaccccttggcgccagacctagcacggtaccctagttacagtcaggcccaggcccttcgctgcacggtgcgggccggtgagatgctctatctgccggctctgtggttccaccacgtccagcagtcccagggctgcatcgcagtgaatttctggtatgacatggaatacgacctcaagtatagttacttccagctgctcgactccctcaccaaggcttcaggccttgactgatggagcactggtgaacacgaccaagcacgcctcgggggacggagccagcccctccctggccaggtcaattctcgagagagcctggagtgtgcatgctggctgctggccccgggtccagcatggcttgagatcagctttggaggatcttggaatgtggtcataaggactcaaggtgccaggcaggtctgggtgagggttctcaggaagttgccacacaggtgagcagagtggggatcaggtgcagcggcacctctccccagcgctgtgatgttgggcgagtcactgcgtctcgggcattggtgtcctgtcagtaaagagataataatggctgtacctcgcggggctgttgtgggcttggagatgatgtctatgaggaccagcatggagctggcacacaggacatgttgaataaaaggtagctgtgagtcgtatgtccttttttttttttttttaagatggggtctcgctctgtcacccaggctggagtgcagtggtgtgatgtcagctcactgcaagctccgcctcccaggttcacactattctgcctcagcctcccaagtagctgggactacaggtgcgtgccaccatgcccggctaatttttttgtatttttagtagagacggggtttcaccgtgttagccagtatggtcttgatctcctgacctcgtgatccacctgcctcggcctcccaaaagtgctgggattacaggtgtgagctgctgcgcctggcttatgagtcgtatgttctgatcctccctcttgaagttgccttctgtggtctaaggagggcctgaaggttcaggtaaaaacttcagggtgaccttcactgggggtgagggctggatcccagcctgggcccaaagagccgtcagctgcccaagtcccgctgtccatgagagtcaccgcagcccctccctgggacaagcaagcagacctgagtcttgtagctctctggtccggacctctttgcccaggaccttgagagctattcctagctctcctatggttactgtcctcccccagttcaggggcagcaggtgggacctggtgccctggggataacccctgtttctcccataacaggcacaggcaggaagggacggaagcccccgcctctcctggggctgtccctctgaggaaagagttggtctccacacgctgacccccccacaaaccatgccctggaggcagaagaaccccctgcccctgagtgccaacccacaggcctcatccctggccactcagcacctagctttgaagggctgttttatgtgacagccactcccctgcctgtcgtgagggggcccgggtgttcatctcagattgatggatccctgccatcaagactgggcattcctgtccaacaggtgccagagttgcgaaaggcctgtgacagggaactccactcttcccttggctgctgttctgggactcacccctgctttccttctgctcagcccctggcagcaagctctccaggctgggattgcagggctgggtggggcaggcccagctggtaaaggctggcgagtgccacagaggtatcaggagctctagtataggcttagggtgcctcatttcctggacaggtggctggttcaggagtgggtgtggagcttaggtggagcagaggcggcgggtaggagggacttgggaccaattgggacatcacatccctggctctgggttagaaagctgacagtccttgatcctgtggccactgccccatcattcctgctcctgaggactcagtctcatggctgtggtaaggcctggcagggccctgggtccctactgggacccctggtctctacctggggcctagttaatatgtttcttatgggagctgtggtcttctccaggggtagggaggggagtttattgaccacaagaccagggtagcgggcagaagccaggggaggaggaggcttggggatgagggatccgtcctgagtgttttctgtcctgggaacgggctcctggcagagctccctggcaccacagatttgggccctggagactcagaggctcccagctgccgccctgaggccctggaagcaagtggctcctccatgctcctctgactcagttgcctggagtgtgagggccctgggctgaccctggtggatgaggccctccagcactgccctggacctggttgctccctggacttgacctgttagggtccttgtggaggcaggtggnaggccgaaaggaancagttggcacaggcttccctggtcccggtgcgcctgccaggctgcattcccagaaccaggggcatgggtttggagggagctaccgggggaccatcttcagcctgacctggcaggacctggaggacatgacagcctgtgaggggtctgagctaggagccgcctcccctgcccaggagagagcccatttccaggatgctcttctgaccagggtggatggagggtacgagagcagctcagcctggggcccaaggccctgatgtgctacttcccctccctcgatagcttatgtcccctgccacccaagaccagccggaaagctgcttagctggggtgtgggctggggatgtggggtggagagcctaaaggatactagcccgagaaggtggaagcaggtctgtgtgaggcataaatctggagccagcctgcccgggctccaaccccaattgtggacctcaggcaagtgactgcttctctgtgcctcagtttccttgtggagtgggccatcgtaaatagtatctgtgcataaggtggttgtgcgataaatgagttaatgtatgcaaagcccttggcccagagccggcgcagagcattgtgtaagtgctggcaggcgtcatgatggagatatcatgtctcctcttgttgattcaggattctgatgagatggaggatgggcctggggttcaggattaggccttgaggcactgctccagcctcctttgtggcccctgtcacccttggcttcatcggcccgtagcaggtctcccctctcccacctctgcaggcagaggtgtccaggacctgcctgctcacggttcgtgtcctgcaggcccatcgcctaccctctaaggacctagtgaccccctctgactgctacgtgactctctggctgcccacggcctgcagccacaggctccagacacgcacggtcaagaacagcagtagccctgtctggaaccagagctttcacttcaggatccacaggcagctcaagaatgtcatggaactgaaagtctttgaccaggacctggtgaccggagatgaccctgtgttgtcagtactgtttgatgcggggactctgcgggctggggagttccggcgcgagagcttctcactgagccctcagggtgaggggcgcctggaagttgaatttcgcctgcagagtctggctgaccgtggcgagtggctcgtcagcaatggcgttctggtggcccgggagctctcctgcttgcacgttcaactggaggagacaggagaccagaagtcctcagagcacagagttcagcttgtggttcctgggtcctgtgagggtccgcaggaggcctctgtgggcactggcaccttccgcttccactgcccagcctgctgggagcaggagctgagtattcgcctgcaggatgcccccgaggagcaactaaaggcgccactgagtgccctgccctctggtcaagtggtgaggcttgtcttccccacgtcccaggagcccctgatgagagtggagctgaaaaaagaagcagggctggagtgcaatggcgtgatcttggctcactgcaacctccgcctctggggttcaagcgattctcctgcctcagcctcccgagtagctgggattacagactgagggagctggccgtgcgactgggcttcgggccctgtgcagaggagcaggccttcctgagcaggaggaagcaggtggtggccgcggccttgaggcaggccctgcagctggatggagacctgcaggaggatgagatcccagtggtagctattatggccactggtggtgggatccgggcaatgacttccctgtatgggcagctggctggcctgaaggagctgggcctcttggattgcgtctcctacatcaccggggcctcgggctccacctgggccttggccaacctttatgaggacccagagtggtctcagaaggacctggcagggcccactgagttgctgaagacccaggtgaccaagaacaagctgggtgtgctggcccccagccagctgcagcggtaccggcaggagctggccgagcgtgcccgcttgggctacccaagctgcttcaccaacctgtgggccctcatcaacgaggcgctgctgcatgatgagccccatgatcacaagctctcagatcaacgggaggccctgagtcatggccagaaccctctgcccatctactgtgccctcaacaccaaagggcagagcctgaccacttttgaatttggggagtggtgcgagttctctccctacgaggtcggcttccccaagtacggggccttcatcccctctgagctctttggctccgagttctttatggggcagctgatgaagaggcttcctgagtcccgcatctgcttcttagaaggtatctggagcaacctgtatgcagccaacctccaggacagcttatactgggcctcagagcccagccagttctgggaccgctgggtcaggaaccaggccaacctggacaaggagcaggtcccccttctgaagatagaagaaccaccctcaacagccggcaggatagctgagtttttcaccgatcttctgacgtggcgtccactggcccaggccacacataatttcctgcgtggcctccatttccacaaagactactttcagcatcctcacttctccacatggaaagctaccactctggatgggctccccaaccagctgacaccctcggagccccacctgtgcctgctggatgttggctacctcatcaataccagctgcctgcccctcctgcagcccactcgggacgtggacctcatcctgtcattggactacaacctccacggagccttccagcagttgcagctcctgggccggttctgccaggagcaggggatcccgttcccacccatctcgcccagccccgaagagcagctccagcctcgggagtgccacaccttctccgaccccacctgccccggagcccctgcggtgctgcactttcctctggtcagcgactccttccgggagtactcggcccctggggtccggcggacacccgaggaggcggcagctggggaggtgaacctgtcttcatcggactctccctaccactacacgaaggtgacctacagccaggaggacgtggacaagctgctgcacctgacacattacaatgtctgcaacaaccaggagcagctgctggaggctctgcgccaggcagtgcagcggaggcggcagcgcaggccccactgatggccggggcccctgccacccctaactctcattcattccctggctgctgagttgcaggtgggaactgtcatcacgcagtgcttcagagcctcgggctcaggtggcactgtcccagggtccaggctgagggctgggagctcccttgcgcctcagcagtttgcagtggggtaaggaggccaagcccatttgtgtaatcacccaaaaccccccggcctgtgcctgttttcccttctgcgctaccttgagtagttggagcacttgatacatcacagactcatacaaaaaaaaaaaaaaaaaaaaaaaaaaaaaaaaaaaaaaaaaaaaaaaaaaaaaaaaaaaaagaggggggcgcgcgcgccccaaaaaatctctctcccgcgagggggcgcgcccacataaagcgcgcgcagcaccccgatatttttgtgtgatgaaaaagaggggggtcgccctatatagataggggggttggtcttatattatagataatcaacagcagaagaccgggaggggcacagttgatataaacaacaaagatgtgttagtgttggcgtggagaaaacaagcgagtcagcagactaaggggggaatcaatcttgtagggaaagagaggagacccatctcattttagtgggggaggggagggaacaataattgatggggaggagaagacaatctcctatcagagtagaatatattaaaagcagcctcttaagagggggagtataattatataagatcatttgatacaaggtggggtcggataaataagtgggtgtgagtaaaacaaaacaagagcgtgagatattaatatgggccgcgcagagggtgcgtagaaagaagttatttgtgcgagtaacatagagaaggatgttgattaattagtctagagacaaattttattatactacaacgcgagggggtagcgtattattttaatgaatataagacggaggaganag

SEQ ID NO: 404632 - DNA, 7407 bp, Homo sapiens
  misc_feature (3215)..(3215): n is a, c, g, or t
  misc_feature (3229)..(3229): n is a, c, g, or t
  misc_feature (7405)..(7405): n is a, c, g, or t
acgagctgacgcagccatggcggaggcggctttggaagccgtgcggagcgagttacgagaattcccggccgctgcaagggagctctgcgtgcctcttgctgtgccctacctggacaaacccccaactccgctccacttctaccgggactgggtctgccccaacaggccgtgcattatccgcaacgctctgcagcactggccggccctccagaagtggtccctcccctatttcagagccacagtgggctccacagaggtgagtgtggccgtgaccccagatggttacgcggatgccgtgagaggggatcgcttcatgatgccagctgagcgccgcctgcccctgagcttcgtgctggatgtgctggagggccgggcccagcaccctggagtcctctatgtgcagaagcagtgctccaacctgcccagcgagctgccccagctgctgcctgatctggaatcccatgtgccctgggcctccgaagccctgggaaagatgcccgatgctgtgaacttctggctgggggaggcggctgcagtgacttctttgcacaaggaccactatgagaacctctactgcgtggtctcaggagagaagcatttcctgttccatccgcccagcgaccggcccttcatcccctatgagctgtacacgccggcaacctaccagctaactgaagagggcacctttaaggtggtggatgaagaggccatggagaaggtgccctggatcccactggaccccttggcgccagacctagcacggtaccctagttacagtcaggcccaggcccttcgctgcacggtgcgggccggtgagatgctctatctgccggctctgtggttccaccacgtccagcagtcccagggctgcatcgcaggtgaagagttgcccaggccacctggggaagagccctgccaagtgaatttctggtatgacatggaatacgacctcaagtatagttacttccagctgctcgactccctcaccaaggcttcaggccttgactgatggagcactggtgaacacgaccaagcacgcctcgggggacggagccagcccctccctggccaggtcaattctcgagagagcctggagtgtgcatgctggctgctggccccgggtccagcatggcttgagatcagctttggaggatcttggaatgtggtcataaggactcaaggtgccaggcaggtctgggtgagggttctcaggaagttgccacacaggtgagcagagtggggatcaggtgcagcggcacctctccccagcgctgtgatgttgggcgagtcactgcgtctcgggcattggtgtcctgtcagtaaagagataataatggctgtacctcgcggggctgttgtgggcttggagatgatgtctatgaggaccagcatggagctggcacacaggacatgttgaataaaaggtagctgtgagtcgtatgtccttttttttttttttttaagatggggtctcgctctgtcacccaggctggagtgcagtggtgtgatgtcagctcactgcaagctccgcctcccaggttcacactattctgcctcagcctcccaagtagctgggactacaggtgcgtgccaccatgcccggctaatttttttgtatttttagtagagacggggtttcaccgtgttagccagtatggtcttgatctcctgacctcgtgatccacctgcctcggcctcccaaaagtgctgggattacaggtgtgagctgctgcgcctggcttatgagtcgtatgttctgatcctccctcttgaagttgccttctgtggtctaaggagggcctgaaggttcaggtaaaaacttcagggtgaccttcactgggggtgagggctggatcccagcctgggcccaaagagccgtcagctgcccaagtcccgctgtccatgagagtcaccgcagcccctccctgggacaagcaagcagacctgagtcttgtagctctctggtccggacctctttgcccaggaccttgagagctattcctagctctcctatggttactgtcctcccccagttcaggggcagcaggtgggacctggtgccctggggataacccctgtttctcccataacaggcacaggcaggaagggacggaagcccccgcctctcctggggctgtccctctgaggaaagagttggtctccacacgctgacccccccacaaaccatgccctggaggcagaagaaccccctgcccctgagtgccaacccacaggcctcatccctggccactcagcacctagctttgaagggctgttttatgtgacagccactcccctgcctgtcgtgagggggcccgggtgttcatctcagattgatggatccctgccatcaagactgggcattcctgtccaacaggtgccagagttgcgaaaggcctgtgacagggaactccactcttcccttggctgctgttctgggactcacccctgctttccttctgctcagcccctggcagcaagctctccaggctgggattgcagggctgggtggggcaggcccagctggtaaaggctggcgagtgccacagaggtatcaggagctctagtataggcttagggtgcctcatttcctggacaggtggctggttcaggagtgggtgtggagcttaggtggagcagaggcggcgggtaggagggacttgggaccaattgggacatcacatccctggctctgggttagaaagctgacagtccttgatcctgtggccactgccccatcattcctgctcctgaggactcagtctcatggctgtggtaaggcctggcagggccctgggtccctactgggacccctggtctctacctggggcctagttaatatgtttcttatgggagctgtggtcttctccaggggtagggaggggagtttattgaccacaagaccagggtagcgggcagaagccaggggaggaggaggcttggggatgagggatccgtcctgagtgttttctgtcctgggaacgggctcctggcagagctccctggcaccacagatttgggccctggagactcagaggctcccagctgccgccctgaggccctggaagcaagtggctcctccatgctcctctgactcagttgcctggagtgtgagggccctgggctgaccctggtggatgaggccctccagcactgccctggacctggttgctccctggacttgacctgttagggtccttgtggaggcaggtggnaggccgaaaggaancagttggcacaggcttccctggtcccggtgcgcctgccaggctgcattcccagaaccaggggcatgggtttggagggagctaccgggggaccatcttcagcctgacctggcaggacctggaggacatgacagcctgtgaggggtctgagctaggagccgcctcccctgcccaggagagagcccatttccaggatgctcttctgaccagggtggatggagggtacgagagcagctcagcctggggcccaaggccctgatgtgctacttcccctccctcgatagcttatgtcccctgccacccaagaccagccggaaagctgcttagctggggtgtgggctggggatgtggggtggagagcctaaaggatactagcccgagaaggtggaagcaggtctgtgtgaggcataaatctggagccagcctgcccgggctccaaccccaattgtggacctcaggcaagtgactgcttctctgtgcctcagtttccttgtggagtgggccatcgtaaatagtatctgtgcataaggtggttgtgcgataaatgagttaatgtatgcaaagcccttggcccagagccggcgcagagcattgtgtaagtgctggcaggcgtcatgatggagatatcatgtctcctcttgttgattcaggattctgatgagatggaggatgggcctggggttcaggattaggccttgaggcactgctccagcctcctttgtggcccctgtcacccttggcttcatcggcccgtagcaggtctcccctctcccacctctgcaggcagaggtgtccaggacctgcctgctcacggttcgtgtcctgcaggcccatcgcctaccctctaaggacctagtgaccccctctgactgctacgtgactctctggctgcccacggcctgcagccacaggctccagacacgcacggtcaagaacagcagtagccctgtctggaaccagagctttcacttcaggatccacaggcagctcaagaatgtcatggaactgaaagtctttgaccaggacctggtgaccggagatgaccctgtgttgtcagtactgtttgatgcggggactctgcgggctggggagttccggcgcgagagcttctcactgagccctcagggtgaggggcgcctggaagttgaatttcgcctgcagagtctggctgaccgtggcgagtggctcgtcagcaatggcgttctggtggcccgggagctctcctgcttgcacgttcaactggaggagacaggagaccagaagtcctcagagcacagagttcagcttgtggttcctgggtcctgtgagggtccgcaggaggcctctgtgggcactggcaccttccgcttccactgcccagcctgctgggagcaggagctgagtattcgcctgcaggatgcccccgaggagcaactaaaggcgccactgagtgccctgccctctggtcaagtggtgaggcttgtcttccccacgtcccaggagcccctgatgagagtggagctgaaaaaagaagcagggctggagtgcaatggcgtgatcttggctcactgcaacctccgcctctggggttcaagcgattctcctgcctcagcctcccgagtagctgggattacagactgagggagctggccgtgcgactgggcttcgggccctgtgcagaggagcaggccttcctgagcaggaggaagcaggtggtggccgcggccttgaggcaggccctgcagctggatggagacctgcaggaggatgagatcccagtggtagctattatggccactggtggtgggatccgggcaatgacttccctgtatgggcagctggctggcctgaaggagctgggcctcttggattgcgtctcctacatcaccggggcctcgggctccacctgggccttggccaacctttatgaggacccagagtggtctcagaaggacctggcagggcccactgagttgctgaagacccaggtgaccaagaacaagctgggtgtgctggcccccagccagctgcagcggtaccggcaggagctggccgagcgtgcccgcttgggctacccaagctgcttcaccaacctgtgggccctcatcaacgaggcgctgctgcatgatgagccccatgatcacaagctctcagatcaacgggaggccctgagtcatggccagaaccctctgcccatctactgtgccctcaacaccaaagggcagagcctgaccacttttgaatttggggagtggtgcgagttctctccctacgaggtcggcttccccaagtacggggccttcatcccctctgagctctttggctccgagttctttatggggcagctgatgaagaggcttcctgagtcccgcatctgcttcttagaaggtatctggagcaacctgtatgcagccaacctccaggacagcttatactgggcctcagagcccagccagttctgggaccgctgggtcaggaaccaggccaacctggacaaggagcaggtcccccttctgaagatagaagaaccaccctcaacagccggcaggatagctgagtttttcaccgatcttctgacgtggcgtccactggcccaggccacacataatttcctgcgtggcctccatttccacaaagactactttcagcatcctcacttctccacatggaaagctaccactctggatgggctccccaaccagctgacaccctcggagccccacctgtgcctgctggatgttggctacctcatcaataccagctgcctgcccctcctgcagcccactcgggacgtggacctcatcctgtcattggactacaacctccacggagccttccagcagttgcagctcctgggccggttctgccaggagcaggggatcccgttcccacccatctcgcccagccccgaagagcagctccagcctcgggagtgccacaccttctccgaccccacctgccccggagcccctgcggtgctgcactttcctctggtcagcgactccttccgggagtactcggcccctggggtccggcggacacccgaggaggcggcagctggggaggtgaacctgtcttcatcggactctccctaccactacacgaaggtgacctacagccaggaggacgtggacaagctgctgcacctgacacattacaatgtctgcaacaaccaggagcagctgctggaggctctgcgccaggcagtgcagcggaggcggcagcgcaggccccactgatggccggggcccctgccacccctaactctcattcattccctggctgctgagttgcaggtgggaactgtcatcacgcagtgcttcagagcctcgggctcaggtggcactgtcccagggtccaggctgagggctgggagctcccttgcgcctcagcagtttgcagtggggtaaggaggccaagcccatttgtgtaatcacccaaaaccccccggcctgtgcctgttttcccttctgcgctaccttgagtagttggagcacttgatacatcacagactcatacaaaaaaaaaaaaaaaaaaaaaaaaaaaaaaaaaaaaaaaaaaaaaaaaaaaaaaaaaaaaagaggggggcgcgcgcgccccaaaaaatctctctcccgcgagggggcgcgcccacataaagcgcgcgcagcaccccgatatttttgtgtgatgaaaaagaggggggtcgccctatatagataggggggttggtcttatattatagataatcaacagcagaagaccgggaggggcacagttgatataaacaacaaagatgtgttagtgttggcgtggagaaaacaagcgagtcagcagactaaggggggaatcaatcttgtagggaaagagaggagacccatctcattttagtgggggaggggagggaacaataattgatggggaggagaagacaatctcctatcagagtagaatatattaaaagcagcctcttaagagggggagtataattatataagatcatttgatacaaggtggggtcggataaataagtgggtgtgagtaaaacaaaacaagagcgtgagatattaatatgggccgcgcagagggtgcgtagaaagaagttatttgtgcgagtaacatagagaaggatgttgattaattagtctagagacaaattttattatactacaacgcgagggggtagcgtattattttaatgaatataagacggaggaganag

SEQ ID NO: 404633 - DNA, 4944 bp, Homo sapiens
  misc_feature (4942)..(4942): n is a, c, g, or t
acgagctgacgcagccatggcggaggcggctttggaagccgtgcggagcgagttacgagaattcccggccgctgcaagggagctctgcgtgcctcttgctgtgccctacctggacaaacccccaactccgctccacttctaccgggactgggtctgccccaacaggccgtgcattatccgcaacgctctgcagcactggccggccctccagaagtggtccctcccctatttcagagccacagtgggctccacagaggtgagtgtggccgtgaccccagatggttacgcggatgccgtgagaggggatcgcttcatgatgccagctgagcgccgcctgcccctgagcttcgtgctggatgtgctggagggccgggcccagcaccctggagtcctctatgtgcagaagcagtgctccaacctgcccagcgagctgccccagctgctgcctgatctggaatcccatgtgccctgggcctccgaagccctgggaaagatgcccgatgctgtgaacttctggctgggggaggcggctgcagtgacttctttgcacaaggaccactatgagaacctctactgcgtggtctcaggagagaagcatttcctgttccatccgcccagcgaccggcccttcatcccctatgagctgtacacgccggcaacctaccagctaactgaagagggcacctttaaggtggtggatgaagaggccatggagaaggtgtctgtcctgttcttgggctctagggagggagaagggcagaagcctggctctgaagaacaggcacaaaagatctggggaggtggcaccttgctctgaaaagtctctaagtctgaggcctttcactgctgagccaagcagggcctgtggtgttgacctttggaagggacagagcctgaagtcctggggggtctggggggctgctccctggcatctgatgtgttcccaggtgccctggatcccactggaccccttggcgccagacctagcacggtaccctagttacagtcaggcccaggcccttcgctgcacggtgcgggccggtgagatgctctatctgccggctctgtggttccaccacgtccagcagtcccagggctgcatcgcagtgaatttctggtatgacatggaatacgacctcaagtatagttacttccagctgctcgactccctcaccaaggcttcaggccttgactgatggagcactggtgaacacgaccaagcacgcctcgggggacggagccagcccctccctggccaggtcaattctcgagagagcctggagtgtgcatgctggctgctggccccgggtccagcatggcttgagatcagctttggaggatcttggaatgtggtcataaggactcaaggtgccaggcaggtctgggtgagggttctcaggaagttgccacacaggattctgatgagatggaggatgggcctggggttcaggattaggccttgaggcactgctccagcctcctttgtggcccctgtcacccttggcttcatcggcccgtagcaggtctcccctctcccacctctgcaggcagaggtgtccaggacctgcctgctcacggttcgtgtcctgcaggcccatcgcctaccctctaaggacctagtgaccccctctgactgctacgtgactctctggctgcccacggcctgcagccacaggctccagacacgcacggtcaagaacagcagtagccctgtctggaaccagagctttcacttcaggatccacaggcagctcaagaatgtcatggaactgaaagtctttgaccaggacctggtgaccggagatgaccctgtgttgtcagtactgtttgatgcggggactctgcgggctggggagttccggcgcgagagcttctcactgagccctcagggtgaggggcgcctggaagttgaatttcgcctgcagagtctggctgaccgtggcgagtggctcgtcagcaatggcgttctggtggcccgggagctctcctgcttgcacgttcaactggaggagacaggagaccagaagtcctcagagcacagagttcagcttgtggttcctgggtcctgtgagggtccgcaggaggcctctgtgggcactggcaccttccgcttccactgcccagcctgctgggagcaggagctgagtattcgcctgcaggatgcccccgaggagcaactaaaggcgccactgagtgccctgccctctggtcaagtggtgaggcttgtcttccccacgtcccaggagcccctgatgagagtggagctgaaaaaagaagcagggctggagtgcaatggcgtgatcttggctcactgcaacctccgcctctggggttcaagcgattctcctgcctcagcctcccgagtagctgggattacagactgagggagctggccgtgcgactgggcttcgggccctgtgcagaggagcaggccttcctgagcaggaggaagcaggtggtggccgcggccttgaggcaggccctgcagctggatggagacctgcaggaggatgagatcccagtggtagctattatggccactggtggtgggatccgggcaatgacttccctgtatgggcagctggctggcctgaaggagctgggcctcttggattgcgtctcctacatcaccggggcctcgggctccacctgggccttggccaacctttatgaggacccagagtggtctcagaaggacctggcagggcccactgagttgctgaagacccaggtgaccaagaacaagctgggtgtgctggcccccagccagctgcagcggtaccggcaggagctggccgagcgtgcccgcttgggctacccaagctgcttcaccaacctgtgggccctcatcaacgaggcgctgctgcatgatgagccccatgatcacaagctctcagatcaacgggaggccctgagtcatggccagaaccctctgcccatctactgtgccctcaacaccaaagggcagagcctgaccacttttgaatttggggagtggtgcgagttctctccctacgaggtcggcttccccaagtacggggccttcatcccctctgagctctttggctccgagttctttatggggcagctgatgaagaggcttcctgagtcccgcatctgcttcttagaaggtatctggagcaacctgtatgcagccaacctccaggacagcttatactgggcctcagagcccagccagttctgggaccgctgggtcaggaaccaggccaacctggacaaggagcaggtcccccttctgaagatagaagaaccaccctcaacagccggcaggatagctgagtttttcaccgatcttctgacgtggcgtccactggcccaggccacacataatttcctgcgtggcctccatttccacaaagactactttcagcatcctcacttctccacatggaaagctaccactctggatgggctccccaaccagctgacaccctcggagccccacctgtgcctgctggatgttggctacctcatcaataccagctgcctgcccctcctgcagcccactcgggacgtggacctcatcctgtcattggactacaacctccacggagccttccagcagttgcagctcctgggccggttctgccaggagcaggggatcccgttcccacccatctcgcccagccccgaagagcagctccagcctcgggagtgccacaccttctccgaccccacctgccccggagcccctgcggtgctgcactttcctctggtcagcgactccttccgggagtactcggcccctggggtccggcggacacccgaggaggcggcagctggggaggtgaacctgtcttcatcggactctccctaccactacacgaaggtgacctacagccaggaggacgtggacaagctgctgcacctgacacattacaatgtctgcaacaaccaggagcagctgctggaggctctgcgccaggcagtgcagcggaggcggcagcgcaggccccactgatggccggggcccctgccacccctaactctcattcattccctggctgctgagttgcaggtgggaactgtcatcacgcagtgcttcagagcctcgggctcaggtggcactgtcccagggtccaggctgagggctgggagctcccttgcgcctcagcagtttgcagtggggtaaggaggccaagcccatttgtgtaatcacccaaaaccccccggcctgtgcctgttttcccttctgcgctaccttgagtagttggagcacttgatacatcacagactcatacaaaaaaaaaaaaaaaaaaaaaaaaaaaaaaaaaaaaaaaaaaaaaaaaaaaaaaaaaaaaagaggggggcgcgcgcgccccaaaaaatctctctcccgcgagggggcgcgcccacataaagcgcgcgcagcaccccgatatttttgtgtgatgaaaaagaggggggtcgccctatatagataggggggttggtcttatattatagataatcaacagcagaagaccgggaggggcacagttgatataaacaacaaagatgtgttagtgttggcgtggagaaaacaagcgagtcagcagactaaggggggaatcaatcttgtagggaaagagaggagacccatctcattttagtgggggaggggagggaacaataattgatggggaggagaagacaatctcctatcagagtagaatatattaaaagcagcctcttaagagggggagtataattatataagatcatttgatacaaggtggggtcggataaataagtgggtgtgagtaaaacaaaacaagagcgtgagatattaatatgggccgcgcagagggtgcgtagaaagaagttatttgtgcgagtaacatagagaaggatgttgattaattagtctagagacaaattttattatactacaacgcgagggggtagcgtattattttaatgaatataagacggaggaganag

SEQ ID NO: 404634 - DNA, 6977 bp, Homo sapiens
  misc_feature (3173)..(3173): n is a, c, g, or t
  misc_feature (3187)..(3187): n is a, c, g, or t
  misc_feature (6975)..(6975): n is a, c, g, or t
acgagctgacgcagccatggcggaggcggctttggaagccgtgcggagcgagttacgagaattcccggccgctgcaagggagctctgcgtgcctcttgctgtgccctacctggacaaacccccaactccgctccacttctaccgggactgggtctgccccaacaggccgtgcattatccgcaacgctctgcagcactggccggccctccagaagtggtccctcccctatttcagagccacagtgggctccacagaggtgagtgtggccgtgaccccagatggttacgcggatgccgtgagaggggatcgcttcatgatgccagctgagcgccgcctgcccctgagcttcgtgctggatgtgctggagggccgggcccagcaccctggagtcctctatgtgcagaagcagtgctccaacctgcccagcgagctgccccagctgctgcctgatctggaatcccatgtgccctgggcctccgaagccctgggaaagatgcccgatgctgtgaacttctggctgggggaggcggctgcagtgacttctttgcacaaggaccactatgagaacctctactgcgtggtctcaggagagaagcatttcctgttccatccgcccagcgaccggcccttcatcccctatgagctgtacacgccggcaacctaccagctaactgaagagggcacctttaaggtggtggatgaagaggccatggagaaggtgccctggatcccactggaccccttggcgccagacctagcacggtaccctagttacagtcaggcccaggcccttcgctgcacggtgcgggccggtgagatgctctatctgccggctctgtggttccaccacgtccagcagtcccagggctgcatcgcagtgaatttctggtatgacatggaatacgacctcaagtatagttacttccagctgctcgactccctcaccaaggcttcaggccttgactgatggagcactggtgaacacgaccaagcacgcctcgggggacggagccagcccctccctggccaggtcaattctcgagagagcctggagtgtgcatgctggctgctggccccgggtccagcatggcttgagatcagctttggaggatcttggaatgtggtcataaggactcaaggtgccaggcaggtctgggtgagggttctcaggaagttgccacacaggtgagcagagtggggatcaggtgcagcggcacctctccccagcgctgtgatgttgggcgagtcactgcgtctcgggcattggtgtcctgtcagtaaagagataataatggctgtacctcgcggggctgttgtgggcttggagatgatgtctatgaggaccagcatggagctggcacacaggacatgttgaataaaaggtagctgtgagtcgtatgtccttttttttttttttttaagatggggtctcgctctgtcacccaggctggagtgcagtggtgtgatgtcagctcactgcaagctccgcctcccaggttcacactattctgcctcagcctcccaagtagctgggactacaggtgcgtgccaccatgcccggctaatttttttgtatttttagtagagacggggtttcaccgtgttagccagtatggtcttgatctcctgacctcgtgatccacctgcctcggcctcccaaaagtgctgggattacaggtgtgagctgctgcgcctggcttatgagtcgtatgttctgatcctccctcttgaagttgccttctgtggtctaaggagggcctgaaggttcaggtaaaaacttcagggtgaccttcactgggggtgagggctggatcccagcctgggcccaaagagccgtcagctgcccaagtcccgctgtccatgagagtcaccgcagcccctccctgggacaagcaagcagacctgagtcttgtagctctctggtccggacctctttgcccaggaccttgagagctattcctagctctcctatggttactgtcctcccccagttcaggggcagcaggtgggacctggtgccctggggataacccctgtttctcccataacaggcacaggcaggaagggacggaagcccccgcctctcctggggctgtccctctgaggaaagagttggtctccacacgctgacccccccacaaaccatgccctggaggcagaagaaccccctgcccctgagtgccaacccacaggcctcatccctggccactcagcacctagctttgaagggctgttttatgtgacagccactcccctgcctgtcgtgagggggcccgggtgttcatctcagattgatggatccctgccatcaagactgggcattcctgtccaacaggtgccagagttgcgaaaggcctgtgacagggaactccactcttcccttggctgctgttctgggactcacccctgctttccttctgctcagcccctggcagcaagctctccaggctgggattgcagggctgggtggggcaggcccagctggtaaaggctggcgagtgccacagaggtatcaggagctctagtataggcttagggtgcctcatttcctggacaggtggctggttcaggagtgggtgtggagcttaggtggagcagaggcggcgggtaggagggacttgggaccaattgggacatcacatccctggctctgggttagaaagctgacagtccttgatcctgtggccactgccccatcattcctgctcctgaggactcagtctcatggctgtggtaaggcctggcagggccctgggtccctactgggacccctggtctctacctggggcctagttaatatgtttcttatgggagctgtggtcttctccaggggtagggaggggagtttattgaccacaagaccagggtagcgggcagaagccaggggaggaggaggcttggggatgagggatccgtcctgagtgttttctgtcctgggaacgggctcctggcagagctccctggcaccacagatttgggccctggagactcagaggctcccagctgccgccctgaggccctggaagcaagtggctcctccatgctcctctgactcagttgcctggagtgtgagggccctgggctgaccctggtggatgaggccctccagcactgccctggacctggttgctccctggacttgacctgttagggtccttgtggaggcaggtggnaggccgaaaggaancagttggcacaggcttccctggtcccggtgcgcctgccaggctgcattcccagaaccaggggcatgggtttggagggagctaccgggggaccatcttcagcctgacctggcaggacctggaggacatgacagcctgtgaggggtctgagctaggagccgcctcccctgcccaggagagagcccatttccaggatgctcttctgaccagggtggatggagggtacgagagcagctcagcctggggcccaaggccctgatgtgctacttcccctccctcgatagcttatgtcccctgccacccaagaccagccggaaagctgcttagctggggtgtgggctggggatgtggggtggagagcctaaaggatactagcccgagaaggtggaagcaggtctgtgtgaggcataaatctggagccagcctgcccgggctccaaccccaattgtggacctcaggcaagtgactgcttctctgtgcctcagtttccttgtggagtgggccatcgtaaatagtatctgtgcataaggtggttgtgcgataaatgagttaatgtatgcaaagcccttggcccagagccggcgcagagcattgtgtaagtgctggcaggcgtcatgatggagatatcatgtctcctcttgttgattcaggattctgatgagatggaggatgggcctggggttcaggattaggccttgaggcactgctccagcctcctttgtggcccctgtcacccttggcttcatcggcccgtagcaggtctcccctctcccacctctgcaggcagaggtgtccaggacctgcctgctcacggttcgtgtcctgcaggcccatcgcctaccctctaaggacctagtgaccccctctgactgctacgtgactctctggctgcccacggcctgcagccacaggctccagacacgcacggtcaagaacagcagtagccctgtctggaaccagagctttcacttcaggatccacaggcagctcaagaatgtcatggaactgaaagtctttgaccaggacctggtgaccggagatgaccctgtgttgtcagtactgtttgatgcggggactctgcgggctggggagttccggcgcgagagcttctcactgagccctcagggtgaggggcgcctggaagttgaatttcgcctgcagagtctggctgaccgtggcgagtggctcgtcagcaatggcgttctggtggcccgggagctctcctgcttgcacgttcaactggaggagacaggagaccagaagtcctcagagcacagagttcagcttgtggttcctgggtcctgtgagggtccgcaggaggcctctgtgggcactggcaccttccgcttccactgcccagcctgctgggagcaggagctgagtattcgcctgcaggatgcccccgaggagcaactaaaggcgccactgagtgccctgccctctggtcaagtggtgaggcttgtcttccccacgtcccaggagcccctgatgagagtggagctgaaaaaagaagcagggctggagtgcaatggcgtgatcttggctcactgcaacctccgcctctggggttcaagcgattctcctgcctcagcctcccgagtagctgggattacagactgagggagctggccgtgcgactgggcttcgggccctgtgcagaggagcaggccttcctgagcaggaggaagcaggtggtggccgcggccttgaggcaggccctgcagctggatggagacctgcaggaggatgagatcccagtggtagctattatggccactggtggtgggatccgggcaatgacttccctgtatgggcagctggctggcctgaaggagctgggcctcttggattgcgtctcctacatcaccggggcctcgggctccacctgggccttggccaacctttatgaggacccagagtggtctcagaaggacctggcagggcccactgagttgctgaagacccaggtgaccaagaacaagctgggtgtgctggcccccagccagctgcagcggtaccggcaggagctggccgagcgtgcccgcttgggctacccaagctgcttcaccaacctgtgggccctcatcaacgaggcgctgctgcatgatgagccccatgatcacaagctctcagatcaacgggaggccctgagtcatggccagaaccctctgcccatctactgtgccctcaacaccaaagggcagagcctgaccacttttgaatttggggagtggtgcgagttctctccctacgaggtcggcttccccaagtacggggccttcatcccctctgagctctttggctccgagttctttatggggcagctgatgaagaggcttcctgagtcccgcatctgcttcttagaaggtatctggagcaacctgtatgcagccaacctccaggacagcttatactgggcctcagagcccagccagttctgggaccgctgggtcaggaaccaggccaacctggacaaggagcaggtcccccttctgaagatagaagaaccaccctcaacagccggcaggatagctgagtttttcaccgatcttctgacgtggcgtccactggcccaggccacacataatttcctgcgtggcctccatttccacaaagactactttcagcatcctcacttctccacatggaaagctaccactctggatgggctccccaaccagctgacaccctcggagccccacctgtgcctgctggatgttggctacctcatcaataccagctgcctgcccctcctgcagcccactcgggacgtggacctcatcctgtcattggactacaacctccacggagccttccagcagttgcagctcctgggccggttctgccacccctaactctcattcattccctggctgctgagttgcaggtgggaactgtcatcacgcagtgcttcagagcctcgggctcaggtggcactgtcccagggtccaggctgagggctgggagctcccttgcgcctcagcagtttgcagtggggtaaggaggccaagcccatttgtgtaatcacccaaaaccccccggcctgtgcctgttttcccttctgcgctaccttgagtagttggagcacttgatacatcacagactcatacaaaaaaaaaaaaaaaaaaaaaaaaaaaaaaaaaaaaaaaaaaaaaaaaaaaaaaaaaaaaagaggggggcgcgcgcgccccaaaaaatctctctcccgcgagggggcgcgcccacataaagcgcgcgcagcaccccgatatttttgtgtgatgaaaaagaggggggtcgccctatatagataggggggttggtcttatattatagataatcaacagcagaagaccgggaggggcacagttgatataaacaacaaagatgtgttagtgttggcgtggagaaaacaagcgagtcagcagactaaggggggaatcaatcttgtagggaaagagaggagacccatctcattttagtgggggaggggagggaacaataattgatggggaggagaagacaatctcctatcagagtagaatatattaaaagcagcctcttaagagggggagtataattatataagatcatttgatacaaggtggggtcggataaataagtgggtgtgagtaaaacaaaacaagagcgtgagatattaatatgggccgcgcagagggtgcgtagaaagaagttatttgtgcgagtaacatagagaaggatgttgattaattagtctagagacaaattttattatactacaacgcgagggggtagcgtattattttaatgaatataagacggaggaganag

SEQ ID NO: 404635 - DNA, 1776 bp, Homo sapiens
  misc_feature (1774)..(1774): n is a, c, g, or t
acgagctgacgcagccatggcggaggcggctttggaagccgtgcggagcgagttacgagaattcccggccgctgcaagggagctctgcgtgcctcttgctgtgccctacctggacaaacccccaactccgctccacttctaccgggactgggtctgccccaacaggccgtgcattatccgcaacgctctgcagcactggccggccctccagaagtggtccctcccctatttcagagccacagtgggctccacagaggtgagtgtggccgtgaccccagatggttacgcggatgccgtgagaggggatcgcttcatgatgccagctgagcgccgcctgcccctgagcctcctgcagcccactcgggacgtggacctcatcctgtcattggactacaacctccacggagccttccagcagttgcagctcctgggccggttctgccaggagcaggggatcccgttcccacccatctcgcccagccccgaagagcagctccagcctcgggagtgccacaccttctccgaccccacctgccccggagcccctgcggtgctgcactttcctctggtcagcgactccttccgggagtactcggcccctggggtccggcggacacccgaggaggcggcagctggggaggtgaacctgtcttcatcggactctccctaccactacacgaaggtgacctacagccaggaggacgtggacaagctgctgcacctgacacattacaatgtctgcaacaaccaggagcagctgctggaggctctgcgccaggcagtgcagcggaggcggcagcgcaggccccactgatggccggggcccctgccacccctaactctcattcattccctggctgctgagttgcaggtgggaactgtcatcacgcagtgcttcagagcctcgggctcaggtggcactgtcccagggtccaggctgagggctgggagctcccttgcgcctcagcagtttgcagtggggtaaggaggccaagcccatttgtgtaatcacccaaaaccccccggcctgtgcctgttttcccttctgcgctaccttgagtagttggagcacttgatacatcacagactcatacaaaaaaaaaaaaaaaaaaaaaaaaaaaaaaaaaaaaaaaaaaaaaaaaaaaaaaaaaaaaagaggggggcgcgcgcgccccaaaaaatctctctcccgcgagggggcgcgcccacataaagcgcgcgcagcaccccgatatttttgtgtgatgaaaaagaggggggtcgccctatatagataggggggttggtcttatattatagataatcaacagcagaagaccgggaggggcacagttgatataaacaacaaagatgtgttagtgttggcgtggagaaaacaagcgagtcagcagactaaggggggaatcaatcttgtagggaaagagaggagacccatctcattttagtgggggaggggagggaacaataattgatggggaggagaagacaatctcctatcagagtagaatatattaaaagcagcctcttaagagggggagtataattatataagatcatttgatacaaggtggggtcggataaataagtgggtgtgagtaaaacaaaacaagagcgtgagatattaatatgggccgcgcagagggtgcgtagaaagaagttatttgtgcgagtaacatagagaaggatgttgattaattagtctagagacaaattttattatactacaacgcgagggggtagcgtattattttaatgaatataagacggaggaganag

SEQ ID NO: 404636 - DNA, 442 bp, Homo sapiens
tggggggctgctccctggcatctgatgtgttcccaggtgccctggatcccactggaccccttggcgccagacctagcacggtaccctagttacagtcaggcccaggcccttcgctgcacggtgcgggccggtgagatgctctatctgccggctctgtggttccaccacgtccagcagtcccagggctgcatcgcaggtgaagagttgcccaggccacctggggaagagccctgccaaggtccagcagggcctctggggggaggcttgggaggctctaggtcagaagagggatcttcatgctcagatccccgttcttcccacatgaatttctggtatgacatggaatacgacctcaagtatagttacttccagctgctcgactccctcaccaaggcttcaggccttgactgatggagcactggtgaacacgaccaagcacgcc

SEQ ID NO: 404637 - DNA, 743 bp, Homo sapiens
ccttgagtagtggttgcaacattcatgtataagttagttaaactgaaaataaagtgaaacctaataacccattacatgttttaaagttatttcttaggccaggcgcagtggctcatgcctataatcccagcactttgggaggcccagggggtggatcacctgaggtcaggagttcgagaccagcctggctaacatggtgaaaccccgtttctactaaaaatacaaaaaattagctggctgtggtggcgcacatctgtaatcccagctatttgggaggctgaggcaggagaattgcttgaacctcaggggtggaggttgcagtgagctgagatcatgccattgcactccaacttgagcaacaagagcgaaactgtctcaaaaaaaataataataaagttatttctttcacccctaggtgttcaatgttcaattcatatatgaataactaaaaatattcttagccaggcgtggtggctaacacctgtaacttcagcactttgggaggctgagacaggagaagtgtttgaactctggagtttgagaccagcttaggcaacatagccagaccttgtctctactaaaaatcaaaaaaattagccaggcatggtggtgcacacctgtggtcccagctattcaggaggctgaggcttgagccctagggattgaaacttcagtgaaccatgaccgtgccactgcactccagcttgggcaacgtaacaagactctgtctcaaaaaaaaaaaa

SEQ ID NO: 404638 - DNA, 474 bp, Homo sapiens
atttagaattaaataacccataacaagggaaaacttgtcaataatgatactagaacacaaaagaagagaaaatgccaaagattcaacttggttgtatgtaaaagcctttgccatctcagtcaactgagaaatgaccaaactttaagactgttcttaccctaggatatcgttaggagtgtcacgtatacacatcagattcattttgagtcatgttttattcagttcctcacttatacttactttgtgctgtatctactcttgcctgaagaagcaatattgcatgcttaggatttttaaaaaaaattttcaggagatgctgagtgttgctacaaggaggaactgcctttggttcttcactctatgaagagctttattattttataattgcataatgagttcttggaacattgtctttaaaaggacagatgttgtattgtaataaaataatgttattaaaatttgataacctggaaa

SEQ ID NO: 404639 - DNA, 450 bp, Homo sapiens
ggaggtggggaggagggagaggatcaggaaaaataactaatgcatactagcttaatacctgggtgatgaaataatctgtacaacaaacccccatgacacaagttcacccatgtaacaaacctgcacatatatccctgaaattataatagaaattataaaacaacaacaagaacaataaaataaaaacactttacatttgagaaagaatgacaatatcagtaggtaaaaccaacatcaacagttacaagaccatccttccagccaagtaaggcagtcaaaagaggtgtagatctggtagcagaaactgggtccataattatcaaagtggaagttcacagagcaattataactgagaagataaaaactcatgtaacttccattcagtactgcaatttaaaaatagatttttttcacaataactatatacaagataatatatttaacacataa

SEQ ID NO: 404640 - DNA, 216 bp, Homo sapiens
ctgtgataaaatttcagaggtgtttctgtaaaaaaaaaagaaagaaaagaaaaagagaaaaaaagatgtaacattaaatgcgtggtttggtggtttggttgggcacagtggctcacacctgtaatcccagcactttgagaggccaaggcaggaggatggcttgagctcaggagtttgagaccagcctgttaacagagaaagattttgtctctatta

SEQ ID NO: 404641 - DNA, 395 bp, Homo sapiens
agagaccaaggtgttggtgctggagagtcttcaaggccttcaggtaagagctaaaggcgtaggatggatactttccaggtttcttttgtggtcagaaagatgagaaaagatcaaaacaataaacaaactaaacctaaacacaaatgaaaacatactgccaagagtaacaacaaaatattctaccacgccctacaattttccatacttcaaatcttagcctggtaaggacatcagtgtcacattctattatagataagtttctaaaactaaccaggcctagctcatgcctgtaatcccaccactttgggaggctgagatgggtgaatcacttgagcccaggagttcaagaccaccctgggcaacatggtaaaaccccgtttctacaaaaaaaaaaa

SEQ ID NO: 404642 - DNA, 430 bp, Homo sapiens
gagagagacattgatgaggagggagaacctgagtttaggccaggattccaaccgtccgtttcaagagaaaatgttcctgctgaataacaagggggaaacttgaccaggcagggcctggaaattaagatggaagctcgaggttatgagaggccagcgtttcgggtgctgtccaggtgactaggcctctagaggttcttagaaagagaaagcattctgtgtgggactcagtctgggaaacactgcatactgtgttcttgtggagtttcacaattaatgcaaacacattaaaggctcagagaagtcctgcagtaaagaacatttccaatacaaccctgtattcccagcacagatggccacaaagccacttttgttggaagactcgccaaggcaggacatttattaatattttgtgaaagaagaattattttat

SEQ ID NO: 404643 - DNA, 348 bp, Homo sapiens
ttaccatttccgaaaaaagtttttaaaagaaagaaaacacattatgaatctccaataataaaaaacaatgggtattagctgaagagactgaccagtgtaactgtgtcacttatcaatctgttgcttctcagttttgttttgttttggttttgtctttgtttttgagacaaggtctcactctgtcacccaggctggagtgcagtggcatgatctcggctcactgcaacctcctgcctcccaggttctagtgattctcctgcctcagcctcacgagtagctgagactatgggtgcgcaccactgtgactggctaatttgttgtattttttagtagggatggggtttcacc

SEQ ID NO: 404644 - DNA, 468 bp, Homo sapiens
agaggacttcaaaaaaccgtctgaaagagtcagactacaggcagtgcagggtccccagctcctgctccttcacttcctgtctgacttgtaaaacacacataacaagcttcaggggctcaaagtgggagtgtcagggatgaggagtctgatcattaagactggattcatttgggttcagatttcttccccaattcactgattgacaggaatgacataggacaggacagaaaaaagaacaggagaaaggatagttgggagacagacccatataagctgctgctgacagccacttggcccccacttgataggaatgtatcatttatatattaggattgtctcaggcaataaaagtagcatggcttggcagtcagctctgttgttaaaacaaatgcaaatataggcagtaaaatgttttgacttctcaatggtatttggtaataaagtgatgatccggatgatctaaaatgt

SEQ ID NO: 404645 - DNA, 729 bp, Homo sapiens
ctctatccaacccttggcttcccaactgcgtatttaaaccccgcccctgttgaacccttcggcttttcttcactcccggcttcctccgtcacgtttggcccggctcagccgccgtgacaggcctttgcgcatgtgcagaagggaaacgtgaagaagcctcccacatgaccaaggacatgttcccggggccctatcctaggaccccagaagaacgggccgccgccgccaagaagtataatatgcgtgtggaagactacgaaccttacccggatgatggcatggggtatggcgactacccgaagctccctgaccgctcacagcatgagagagatccatggtatagctgggaccagccgggcctgaggttgaactggggtgaaccgatgcactggcacctagacatgtacaacaggaaccgtgtggatacatcccccacacctgtttcttggcatgtcatgtgtatgcagctcttcggtttcctggctttcatgatattcatgtgctgggtgggggacgtgtaccctgtctaccagcctgtgggaccaaagcagtatccttacaataatctgtacctggaacgaggcggtgatccctccaaagaaccagagcgggtggttcactatgagatctgaggaggcttcgtgggcttttgggtcctctaactaggactccctcattcctagaaatttaaccttaatgaaatccctaataaaactcagtgctgtgtta

SEQ ID NO: 404646 - DNA, 846 bp, Homo sapiens
ctctatccaacccttggcttcccaactgcgtatttaaaccccgcccctgttgaacccttcggcttttcttcactcccggcttcctccgtcacgtttggcccggctcagccgccgtgacaggcctttgcgcatgtgcagaagggaaacgtgaagaaggtgaagatggcggtggccagggccggggtcttgggagtccagtggctgcaaagggcatcccggaacgtgatgccgctgggcgcacggacagcctcccacatgaccaaggacatgttcccggggccctatcctaggaccccagaagaacgggccgccgccgccaagaagtataatatgcgtgtggaagactacgaaccttacccggatgatggcatggggtatggcgactacccgaagctccctgaccgctcacagcatgagagagatccatggtatagctgggaccagccgggcctgaggttgaactggggtgaaccgatgcactggcacctagacatgtacaacaggaaccgtgtggatacatcccccacacctgtttcttggcatgtcatgtgtatgcagctcttcggtttcctggctttcatgatattcatgtgctgggtgggggacgtgtaccctgtctaccagcctgtgggaccaaagcagtatccttacaataatctgtacctggaacgaggcggtgatccctccaaagaaccagagcgggtggttcactatgagatctgaggaggcttcgtgggcttttgggtcctctaactaggactccctcattcctagaaatttaaccttaatgaaatccctaataaaactcagtgctgtgttaaaaaagaaaaaaaactctccagcgct

SEQ ID NO: 404647 - DNA, 483 bp, Homo sapiens
  misc_feature (12)..(12): n is a, c, g, or t
  misc_feature (15)..(15): n is a, c, g, or t
gggctgcaggtnttnggacgagggatgatggcatggggtatggcgactacccgaagctccctgaccgctcacagcatgagagagatccatggtatagctgggaccagccgggcctgaggttgaactggggtgaaccgatgcactggcacctagacatgtacaacaggaaccgtgtggatacatcccccacacctgtttcttggcatgtcatgtgtatgcagctcttcggtttcctggctttcatgatattcatgtgctgggtgggggacgtgtaccctgtctaccagcctgtgggaccaaagcagtatccttacaataatctgtacctggaacgaggcggtgatccctccaaagaaccagagcgggtggttcactatgagatctgaggaggcttcgtgggcttttgggtcctctaactaggactccctcattcctagaaatttaaccttaatgaaatccctaataaaactcagtgctgtgtta

SEQ ID NO: 404648 - DNA, 536 bp, Homo sapiens
  misc_feature (12)..(12): n is a, c, g, or t
  misc_feature (15)..(15): n is a, c, g, or t
  misc_feature (498)..(499): n is a, c, g, or t
gggctgcaggtnttnggacgagggatgatggcatggggtatggcgactacccgaagctccctgaccgctcacagcatgagagagatccatggtatagctgggaccagccgggcctgaggttgaactggggtgaaccgatgcactggcacctagacatgtacaacaggaaccgtgtggatacatcccccacacctgtttcttggcatgtcatgtgtatgcagctcttcggtttcctggctttcatgatattcatgtgctgggtgggggacgtgtaccctgtctaccagcctgtgggaccaaagcagtatccttacaataatctgtacctggaacgaggcggtgatccctccaaagaaccagagcgggtggttcactatgagatctgaggaggcttcgtgggcttttgggtcctctaactaggactccctcattcctagaaatttaaccttaatgaaatccctaataaaactcagtgctgtgttaaaaaaaaaaacattnntggaagtcgacgcggccgcgaatttagtagtagtagt

SEQ ID NO: 404649 - DNA, 214 bp, Homo sapiens
gtacccctcgctgggggcgaactgagtaacattagggatttcattaaggttaaatttctggaacgaggcggtgatccctccaaagaaccagagcgggtggttcactatgagatctgaggaggcttcgtgggcttttgggtcctctaactaggactccctcattcctagaaatttaaccttaatgaaatccctaataaaactcagtgctgtgtta

SEQ ID NO: 404650 - DNA, 269 bp, Homo sapiens
caccaccgcgactctctctcatattagtcttgctactgattctagagccagagactctacactgacttcttagttttaaagacacacacacacacacacacacacacacacacacgctttgggtggtgggaagttggagaaaacatttggggcaagagaaaacaatgaaggcggccaggtatggtggtttgcgcctgtaatcccggcacattgggaggctgaggtgggcagattgcttgagctcaggagttcaagaccagcctgggcaa

SEQ ID NO: 404651 - DNA, 686 bp, Homo sapiens
ctctatccaacccttggcttcccaactgcgtatttaaaccccgcccctgttgaacccttcggcttttcttcactcccggcttcctccgtcacgtttggcccggctcagccgccgtgacaggcctttgcgcatgtgcagaagggaaacgtgaagaaggaccccagaagaacgggccgccgccgccaagaagtataatatgcgtgtggaagactacgaaccttacccggatgatggcatggggtatggcgactacccgaagctccctgaccgctcacagcatgagagagatccatggtatagctgggaccagccgggcctgaggttgaactggggtgaaccgatgcactggcacctagacatgtacaacaggaaccgtgtggatacatcccccacacctgtttcttggcatgtcatgtgtatgcagctcttcggtttcctggctttcatgatattcatgtgctgggtgggggacgtgtaccctgtctaccagcctgtgggaccaaagcagtatccttacaataatctgtacctggaacgaggcggtgatccctccaaagaaccagagcgggtggttcactatgagatctgaggaggcttcgtgggcttttgggtcctctaactaggactccctcattcctagaaatttaaccttaatgaaatccctaataaaactcagtgctgtgtta

SEQ ID NO: 404652 - DNA, 873 bp, Homo sapiens
  misc_feature (835)..(836): n is a, c, g, or t
ctctatccaacccttggcttcccaactgcgtatttaaaccccgcccctgttgaacccttcggcttttcttcactcccggcttcctccgtcacgtttggcccggctcagccgccgtgacaggcctttgcgcatgtgcagaagggaaacgtgaagaaggtgaagatggcggtggccagggccggggtcttgggagtccagtggctgcaaagggcatcccggaacgtgatgccgctgggcgcacggacagcctcccacatgaccaaggacatgttcccggggccctatcctaggaccccagaagaacgggccgccgccgccaagaagtataatatgcgtgtggaagactacgaaccttacccggatgatggcatggggtatggcgactacccgaagctccctgaccgctcacagcatgagagagatccatggtatagctgggaccagccgggcctgaggttgaactggggtgaaccgatgcactggcacctagacatgtacaacaggaaccgtgtggatacatcccccacacctgtttcttggcatgtcatgtgtatgcagctcttcggtttcctggctttcatgatattcatgtgctgggtgggggacgtgtaccctgtctaccagcctgtgggaccaaagcagtatccttacaataatctgtacctggaacgaggcggtgatccctccaaagaaccagagcgggtggttcactatgagatctgaggaggcttcgtgggcttttgggtcctctaactaggactccctcattcctagaaatttaaccttaatgaaatccctaataaaactcagtgctgtgttaaaaaaaaaaacattnntggaagtcgacgcggccgcgaatttagtagtagtagt

SEQ ID NO: 404653 - DNA, 959 bp, Homo sapiens
  misc_feature (826)..(826): n is a, c, g, or t
ctctatccaacccttggcttcccaactgcgtatttaaaccccgcccctgttgaacccttcggcttttcttcactcccggcttcctccgtcacgtttggcccggctcagccgccgtgacaggcctttgcgcatgtgcagaagggaaacgtgaagaaggtgaagatggcggtggccagggccggggtcttgggagtccagtggctgcaaagggcatcccggaacgtgatgccgctgggcgcacggacagcctcccacatgaccaaggacatgttcccggggccctatcctaggaccccagaagaacgggccgccgccgccaagaagtataatatgcgtgtggaagactacgaaccttacccggatgatggcatggggtatggcgactacccgaagctccctgaccgctcacagcatgagagagatccatggtatagctgggaccagccgggcctgaggttgaactggggtgaaccgatgcactggcacctagacatgtacaacaggaaccgtgtggatacatcccccacacctgtttcttggcatgtcatgtgtatgcagctcttcggtttcctggctttcatgatattcatgtgctgggtgggggacgtgtaccctgtctaccagcctgtgggaccaaagcagtatccttacaataatctgtacctggaacgaggcggtgatccctccaaagaaccagagcgggtggttcactatgagatctgaggaggcttcgtgggcttttgggtcctctaactaggactccctcattcctagaaatttaaccttaatgaaatccctaataaaactcagtgctgtgttaacgtantacctctttcagaatttttatagtataggtctgcttgccaaggcatttctctcaggtttgcataacatgtgggccgctttggaccagtgcgatcatagactggacaagcgtaatcagtgcggcccgaattgct

SEQ ID NO: 404654 - DNA, 1023 bp, Homo sapiens
ctctatccaacccttggcttcccaactgcgtatttaaaccccgcccctgttgaacccttcggcttttcttcactcccggcttcctccgtcacgtttggcccggctcagccgccgtgacaggcctttgcgcatgtgcagaagggaaacgtgaagaaggtgaagatggcggtggccagggccggggtcttgggagtccagtggctgcaaagggcatcccggaacgtgatgccgctgggcgcacggacagcctcccacatgaccaaggacatgttcccggggccctatcctaggaccccagaagaacgggccgccgccgccaagaagtataatatgcgtgtggaagactacgaaccttacccggatgatggcatggggtatggcgactacccgaagctccctgaccgctcacagcatgagagagatccatggtatagctgggaccagccgggcctgaggttgaactggggtgaaccgatgcactggcacctagacatgtacaacaggaaccgtgtggatacatcccccacacctgtttcttggcatgtcatgtgtatgcagctcttcggtttcctggctttcatgatattcatgtgctgggtgggggacgtgtaccctgtctaccagcctgtggtgagtatccgagaagtgctcccttaggcacgcttgcttagccccatttcctgagggagtgaagtctctggggtaggaatccagtcaataccaagcttggcttcctggagtcttaggagataggaagataggagggccttgacccattggcctgccacaagtaccacagcacttctccacccctacttcttggaccagtctggggaccaaagcagtatccttacaataatctgtacctggaacgaggcggtgatccctccaaagaaccagagcgggtggttcactatgagatctgaggaggcttcgtgggcttttgggtcctctaactaggactccctcattcctagaaatttaaccttaatgaaatccctaataaaactcagtgctgtgtta

SEQ ID NO: 404655 - DNA, 1762 bp, Homo sapiens
gcgcaatcttggctcactgcaacctccacctcctgggttcaagcaattctcccgtctctacaaagtatacaaaaaaattagccaggcatggtggtgcgtgcctgtaatcccagctacttgggaggctggggcacaggaatcctttgaacttgggaggcagaggttgcagtgagctgaaatcacactactgccccccagcctgggcaacagagcaagactctgtctcgaaaaaaaaaaaagaaaacaatgaaggaaaaggagggtgagttagctggagtagaatagaggtatagaatcgttcctaaataaccggctgcattggtttcctggagacttgctaaaaacccagattcccaggccccacttcttggtgctcctaattcagtagcatcacagtagggttccagaagcggtatttttaacaagctcccaggtaattctgatgtgcacctagatttggaaatcactgtgttaaaaaatattgtgaggtaagttggtcagttaggttgggcagcttttatttcattgctaagggatttggacttgatggtgtaataaagcattaattgaacaaatatttatggagcctgtactatgtaccagatgcagactgtgctagcggttggggatacagtgatgacttggtctgcctctaggtggcagggagccattttgggttttcgaacagaaaagtgacataatgaatgctgagttcttaggaagattaatccaggagtagtctccaggatgtactggaaggagagaagctgaaagcagggaggctgctgtgtttgcagttggctgcccagtgctacctctgcagagacaatcaatgtcctgaaggtagctggtatgtctgtgtgcactgacacgagccttcctaccaagccccaggggctccatgctggagaatgcacgtagggctagggtgagcactaacttcacttcaggagagcaaggaacagtgtggctcttccatttttcagttctgtaagcacatcacccttttctcctccccttgagctgtgttctctgacagctgtttgttggtaaagccagcagcccctaaagcacgtcccagccttgtctcctctgtgctttcccccaccactgctgctgcacgcctcatttgctgggccactttagtggtgggaaccattagaggctgagtgacttaaaggagattgagtctgtctcgaccccgagagagagtgggatggatggatgcatcgtctcatttagaaagtgttgcctctgactctaacacactcttctctctttctttacctccctccctgtcttcctcccttcccctcctttccctaacccccttccctccccctttctccttctctctcacagtgtaggcaccacttctcttacaatttaggctttctctctgccttgggctgagtgaggaagaggagtgctgttcctgccttcctagcccagctgggtctgaccagaggctactgtgtacccatttaccatgcgtgattgttaactcagagtggggtgtagccaggtattgactgaatgtatgttcttgctgacctgtgtttttttctgtagggaccaaagcagtatccttacaataatctgtacctggaacgaggcggtgatccctccaaagaaccagagcgggtggttcactatgagatctgaggaggcttcgtgggcttttgggtcctctaactaggactccctcattcctagaaatttaaccttaatgaaatccctaataaaactcagtgctgtgtta

SEQ ID NO: 404656 - DNA, 1763 bp, Homo sapiens
atgcacaacaaataactgctcatacacaagctcttgttctctccatggaaataatagctctacattttatttttgaaaaacagtaacaagtctgaaataaaatagtattaactttttactccattagaaaaaatttaaactggttcactcatcctttctttccatgcaattactgtattattttaaaacatctgagtaaaaagaaatctataatatatccatttaattcaacctaaactctaaatatacaaatgaaggccagggtgagttagctggagtagaatagaggtatagaatcgttcctaaataaccggctgcattggtttcctggagacttgctaaaaacccagattcccaggccccacttcttggtgctcctaattcagtagcatcacagtagggttccagaagcggtatttttaacaagctcccaggtaattctgatgtgcacctagatttggaaatcactgtgttaaaaaatattgtgaggtaagttggtcagttaggttgggcagcttttatttcattgctaagggatttggacttgatggtgtaataaagcattaattgaacaaatatttatggagcctgtactatgtaccagatgcagactgtgctagcggttggggatacagtgatgacttggtctgcctctaggtggcagggagccattttgggttttcgaacagaaaagtgacataatgaatgctgagttcttaggaagattaatccaggagtagtctccaggatgtactggaaggagagaagctgaaagcagggaggctgctgtgtttgcagttggctgcccagtgctacctctgcagagacaatcaatgtcctgaaggtagctggtatgtctgtgtgcactgacacgagccttcctaccaagccccaggggctccatgctggagaatgcacgtagggctagggtgagcactaacttcacttcaggagagcaaggaacagtgtggctcttccatttttcagttctgtaagcacatcacccttttctcctccccttgagctgtgttctctgacagctgtttgttggtaaagccagcagcccctaaagcacgtcccagccttgtctcctctgtgctttcccccaccactgctgctgcacgcctcatttgctgggccactttagtggtgggaaccattagaggctgagtgacttaaaggagattgagtctgtctcgaccccgagagagagtgggatggatggatgcatcgtctcatttagaaagtgttgcctctgactctaacacactcttctctctttctttacctccctccctgtcttcctcccttcccctcctttccctaacccccttccctccccctttctccttctctctcacagtgtaggcaccacttctcttacaatttaggctttctctctgccttgggctgagtgaggaagaggagtgctgttcctgccttcctagcccagctgggtctgaccagaggctactgtgtacccatttaccatgcgtgattgttaactcagagtggggtgtagccaggtattgactgaatgtatgttcttgctgacctgtgtttttttctgtagggaccaaagcagtatccttacaataatctgtacctggaacgaggcggtgatccctccaaagaaccagagcgggtggttcactatgagatctgaggaggcttcgtgggcttttgggtcctctaactaggactccctcattcctagaaatttaaccttaatgaaatccctaataaaactcagtgctgtgtta

SEQ ID NO: 404657 - DNA, 455 bp, Homo sapiens
ctctatccaacccttggcttcccaactgcgtatttaaaccccgcccctgttgaacccttcggcttttcttcactcccggcttcctccgtcacgtttggcccggctcagccgccgtgacaggcctttgcgcatgtgcagaagggaaacgtgaagaaggtgaagatggcggtggccagggccggggtcttgggagtccagtggctgcaaagggcatcccggaacgtgatgccgctgggcgcacggacagcctcccacatgaccaaggacatgttcccggggccctatcctaggaccccagaagaacgggccgccgccgccaagaagtataatatgccgggtggttcactatgagatctgaggaggcttcgtgggcttttgggtcctctaactaggactccctcattcctagaaatttaaccttaatgaaatccctaataaaactcagtgctgtgtta

SEQ ID NO: 404658 - DNA, 612 bp, Homo sapiens
gttacatgagcaacatttgaacagatatatgggaattctgtacaatctatgtgtatatatgtgtatagtgaatgtatgtgcttagtggtatgagttactgtcaaggagaagggctacctagatgctaacacacacacacacacacacacacacacacacacacacacacacacacgtatgtgcttagtggtatgagttactgtcaaggagaagggctacctagatgctaacacacacacacacacacacacacacacacacacacacacacacacacgctttgggtggtgggaagttggagaaaacatttggggcaagagaaaacaatgaaggcggccaggtatggtggtttgcgcctgtaatcccggcacattgggaggctgaggtgggcagattgcttgagctcaggagttcaagaccagcctgggcaacatagtgaaaccccgtctctacaaagtatacaaaaaaattagccaggcatggtggtgcgtgcctgtaatcccagctacttgggaggctggggcacaggaatcctttgaacttgggaggcagaggttgcagtgagctgaaatcacactactgccccccagcctgggcaacagagcaagactc

SEQ ID NO: 404659 - DNA, 381 bp, Homo sapiens
cgccgccaagaagtataatatgcgtgtggaagactacgaaccttacccggatgatggcatggggtgagacagagagggtatgctcgcacccaagtagtgatgggagaaggccggctgggttgggtggcttgactgtgaccctttttcccgaaccttctcgtgacccctcagagtcaatggagtgggtgcttttctctgtggagggaggtgggaggggggtgggtgagcagctgcagctgagaggacttcaattttctccttggctcaggctgtttcctcaaatgaggaagccgaggttttaatggctccctcgaggacccccgaatagcaggagccttccttggctctatccagagcgtcgagtttcatttagattgagca

SEQ ID NO: 404660 - DNA, 820 bp, Homo sapiens
ctctatccaacccttggcttcccaactgcgtatttaaaccccgcccctgttgaacccttcggcttttcttcactcccggcttcctccgtcacgtttggcccggctcagccgccgtgacaggcctttgcgcatgtgcagaagggaaacgtgaagaaggtgaagatggcggtggccagggccggggtcttgggagtccagtggctgcaaagggcatcccggaacgtgatgccgctgggcgcacggacagcctcccacatgaccaaggacatgttcccggggccctatcctaggaccccagaagaacgggccgccgccgccaagaagtataatatgcgtgtggaagactacgaaccttacccggatgatggcatggggtatggcgactacccgaagctccctgaccgctcacagcatgagagagatccatggtatagctgggaccagccgggcctgaggttgaactggggtgaaccgatgcactggcacctagacatgtacaacaggaaccgtgtggatacatcccccacacctgtttcttggcatgtcatgtgtatgcagctcttcggtttcctggctttcatgatattcatgtgctgggtgggggacgtgtaccctgtctaccagcctgtgggaccaaagcagtatccttacaataatctgtacctggaacgaggcggtgatccctccaaagaaccagagcgggtggttcactatgagatctgaggaggcttcgtgggcttttgggtcctctaactaggactccctcattcctagaaatttaaccttaatgaaatccctaataaaactcagtgctgtgtta

SEQ ID NO: 404661 - DNA, 960 bp, Homo sapiens
ctctatccaacccttggcttcccaactgcgtatttaaaccccgcccctgttgaacccttcggcttttcttcactcccggcttcctccgtcacgtttggcccggctcagccgccgtgacaggcctttgcgcatgtgcagaagggaaacgtgaagaaggtgaagatggcggtggccagggccggggtcttgggagtccagtggctgcaaagggcatcccggaacgtgatgccgctgggcgcacggacagcctcccacatgaccaaggacatgttcccggggccctatcctaggaccccagaagaacgggccgccgccgccaagaagtataatatgcgtgtggaagactacgaaccttacccggatgatggcatggggtatggcgactacccgaagctccctgaccgctcacagcatgagagagatccatggtatagctgggaccagccgggcctgaggttgaactggggtgaaccgatgcactggcacctagacatgtacaacaggaaccgtgtggatacatcccccacacctgtttcttggcatgtcatgtgtatgcagctcttcggtttcctggctttcatgatattcatgtgctgggtgggggacgtgtaccctgtctaccagcctgtgggaccaaagcagtatccttacaataatctgtacctggaacgaggcggtgatccctccaaagaaccagagcgggtggttcactatgagatctgaggaggcttcgtgggcttttgggtcctctaactaggactccctcattcctagaaatttaaccttaatgaaatccctaataaaactcagtgctgtgttatcaaaaaaaaaaaaaaaaaaaaaaaatggggggtttattgtggggggggggaaaaaggggtaggaagggggggcaaaggtttggacagtttttgtacaaggggaattgggggccccaaagggaggataaatggaacgtag

SEQ ID NO: 404662 - DNA, 1036 bp, Homo sapiens
  misc_feature (742)..(742): n is a, c, g, or t
ctctatccaacccttggcttcccaactgcgtatttaaaccccgcccctgttgaacccttcggcttttcttcactcccggcttcctccgtcacgtttggcccggctcagccgccgtgacaggcctttgcgcatgtgcagaagggaaacgtgaagaagcctcccacatgaccaaggacatgttcccggggccctatcctaggaccccagaagaacgggccgccgccgccaagaagtataatatgcgtgtggaagactacgaaccttacccggatgatggcatggggtatggcgactacccgaagctccctgaccgctcacagcatgagagagatccatggtatagctgggaccagccgggcctgaggttgaactggggtgaaccgatgcactggcacctagacatgtacaacaggaaccgtgtggatacatcccccacacctgtttcttggcatgtcatgtgtatgcagctcttcggtttcctggctttcatgatattcatgtgctgggtgggggacgtgtaccctgtctaccagcctgtgggaccaaagcagtatccttacaataatctgtacctggaacgaggcggtgatccctccaaagaaccagagcgggtggttcactatgagatctgaggaggcttcgtgggcttttgggtcctctaactaggactccctcattcctagaaatttaaccttaatgaaatccctaataaaactcagtgctgtgttaacaaagaacaaanaaaaaaaaaaaaagaaattggggggagggaggggccgggagaaggttgtaaggaacaatcggagtgggccgggggcccaagagaggaagagtgaaatgggccaaccgggtacaaggagaaccgggcacagaacgaggggggaattcacaccatacaacgccggggaacacagagaggttggacgaacccagagggagcccggaggcaaaagggggacaccaacagggaccagggagacgaataaacagcgaggagggacgaaaggggaggcacaacacaggaagaggagaagca

SEQ ID NO: 404663 - DNA, 288 bp, Homo sapiens
gcggccgcctactactactactgctcgaattcaagcttctaacgatgtacggggacatgtgctgggtgggggacgtgtaccctgtctaccagcctgtgggaccaaagcagtatccttacaataatctgtacctggaacgaggcggtgatccctccaaagaaccagagcgggtggttcactatgagatctgaggaggcttcgtgggcttttgggtcctctaactaggactccctcattcctagaaatttaaccttaatgaaatccctaataaaactcagtgctgtgtta

SEQ ID NO: 404664 - DNA, 1082 bp, Homo sapiens
  misc_feature (823)..(824): n is a, c, g, or t
  misc_feature (831)..(831): n is a, c, g, or t
ctctatccaacccttggcttcccaactgcgtatttaaaccccgcccctgttgaacccttcggcttttcttcactcccggcttcctccgtcacgtttggcccggctcagccgccgtgacaggcctttgcgcatgtgcagaagggaaacgtgaagaaggtgaagatggcggtggccagggccggggtcttgggagtccagtggctgcaaagggcatcccggaacgtgatgccgctgggcgcacggacagcctcccacatgaccaaggacatgttcccggggccctatcctaggaccccagaagaacgggccgccgccgccaagaagtataatatgcgtgtggaagactacgaaccttacccggatgatggcatggggtatggcgactacccgaagctccctgaccgctcacagcatgagagagatccatggtatagctgggaccagccgggcctgaggttgaactggggtgaaccgatgcactggcacctagacatgtacaacaggaaccgtgtggatacatcccccacacctgtttcttggcatgtcatgtgtatgcagctcttcggtttcctggctttcatgatattcatgtgctgggtgggggacgtgtaccctgtctaccagcctgtgggaccaaagcagtatccttacaataatctgtacctggaacgaggcggtgatccctccaaagaaccagagcgggtggttcactatgagatctgaggaggcttcgtgggcttttgggtcctctaactaggactccctcattcctagaaatttaaccttaatgaaatccctaataaaactcagtgctgtgttacannacacacncacaaagacagaccgagacgtcggagagactacaaaggagagagagacgaggaaaaaacacgagggtacagcaaacagtgggaacccatggcggcagccaaaaacggaacaccgagacaccgaaacaaaccagagagcaacaacagcagggaagagagaaggacgggacacccgaccaaagcagggggagcgacacgatgctaaataccaccacaacgagccaaggtgaaaacacacgacataaacgaaac

SEQ ID NO: 404665 - DNA, 1127 bp, Homo sapiens
  misc_feature (833)..(833): n is a, c, g, or t
ctctatccaacccttggcttcccaactgcgtatttaaaccccgcccctgttgaacccttcggcttttcttcactcccggcttcctccgtcacgtttggcccggctcagccgccgtgacaggcctttgcgcatgtgcagaagggaaacgtgaagaaggtgaagatggcggtggccagggccggggtcttgggagtccagtggctgcaaagggcatcccggaacgtgatgccgctgggcgcacggacagcctcccacatgaccaaggacatgttcccggggccctatcctaggaccccagaagaacgggccgccgccgccaagaagtataatatgcgtgtggaagactacgaaccttacccggatgatggcatggggtatggcgactacccgaagctccctgaccgctcacagcatgagagagatccatggtatagctgggaccagccgggcctgaggttgaactggggtgaaccgatgcactggcacctagacatgtacaacaggaaccgtgtggatacatcccccacacctgtttcttggcatgtcatgtgtatgcagctcttcggtttcctggctttcatgatattcatgtgctgggtgggggacgtgtaccctgtctaccagcctgtgggaccaaagcagtatccttacaataatctgtacctggaacgaggcggtgatccctccaaagaaccagagcgggtggttcactatgagatctgaggaggcttcgtgggcttttgggtcctctaactaggactccctcattcctagaaatttaaccttaatgaaatccctaataaaactcagtgctgtgttaacaaagaacaaanaaaaaaaaaaaaagaaattggggggagggaggggccgggagaaggttgtaaggaacaatcggagtgggccgggggcccaagagaggaagagtgaaatgggccaaccgggtacaaggagaaccgggcacagaacgaggggggaattcacaccatacaacgccggggaacacagagaggttggacgaacccagagggagcccggaggcaaaagggggacaccaacagggaccagggagacgaataaacagcgaggagggacgaaaggggaggcacaacacaggaagaggagaagca

SEQ ID NO: 404666 - DNA, 871 bp, Homo sapiens
atgtatggacacccagacttacacagggagagctgacggccttggctgcacctaaggggacacacactgacccctcaggaaatcctgctggtcccgtccccagggtgggaaaggtcaacaagggaaggacgtgatgacgctagcctcacagggaatgccctccccttcctcctcgggtcacacaggctggtgtgcactggcctctctgactcagattcccgaaggaaggattgactgactgcctcttctataagagccaacctccaatctccatgtgagtgctctgcaccagccttgagtgaagcagatcccaggcccctttgaggaaaggcaaaaatcttactgcccaaccccctagcagtgcctctgagcttgctccacggggtacagggaaaggggccgactgggccggaagggccccagcgaaggaggcacacctggtagttccatttcctgactagcaacttccagcccacatcaattttaaggagtccagaatatttgtagtatgcaaaaaggggcattacgaaacttttaaaagtctgttttaattataaaagtaatatatgcacatggttttaaaaaaaatgctggctgggtgcggtggcgcatgcctgtaattccagcactttgggaggccgaggtgggtggatcacgaggtcaggagttcgagaccagcctggccagcttggtaaaaccccgtctctactaaaaatacaaaaaatcagctgggtatggtggcacgtgcctgtaatcccagctactcagggggctgaggcagaattgcttgaacccaggaggcggaggttgcagtgagcagagatggcgccactgcagtccagcctgggcaacagagagagactccatctca

SEQ ID NO: 404667 - DNA, 219 bp, Homo sapiens
ctttcctatccttcccaaaaaggaaaccaaattaagtaacaaactgaaatttaaaaaggatgtgagttccctgtaaggggaagtagcgagtctaaacttcagggtttgttgttgttgttgttgttgttttaaatagaatctctctctgtcactcaggccgagattgcaccattgtactccagcctggatgacagagtgacactccatctcaaaaaaaaa

SEQ ID NO: 404668 - DNA, 598 bp, Homo sapiens
gcacgtattagatactcagtaagtacatttgtctggggctaaaccttcagggtctccaggaagtctttctgagccccagagtcctaaaaagcccaggtgctgctgaggaataataactgtatcatcctggggcggagggctgctgcctcttcccagctggggtttcagcctctgccctgcccccgcaccagccggcccccaacctgaagcctagagcatcaaattattattgcctccgggaatgactgggagccttaggcacaggtgggtccttggagacaggggatggtcctttaacagtgttctggatcctgatggagaagagagggggttctcctctgcccacactgaggcacactcggcttgtggaggaaaacggctgactagtgcccccagcttcaagcaggcagagctgtcagggctggtcgtgtgggttggactttctcctccaagaaagctcagagttgtaaatacctgtttctcatctgcggtgtctagggttgcctggggagtcaaggcatcagggagcaggacaggctcaggcccttcccgactgacattttccagcctatggggggccttggctagcctggtggct

SEQ ID NO: 404669 - DNA, 453 bp, Homo sapiens
cactgatagcataaacaattaaaaaaaacttcatcaataattggaatgcaattagaatttttatcctcttgagtttatatgagatgcttgtggacttgagaggaaatatttacaactcatcagtgaaccagcaaaccagtggccaaaatttaattaaaagtttacattggtccgggcacggtggctcacgcctgtaatcccagcactttgggaggccagggtgggcggatcaccagaggtctggagtttgagaccagactgaccaacatggtgaaaccccatgtctacgaaaaacacaaaattaaccaggcggggtggcggatacctgtaatcccagctacttgggaggctgaggcgagagaattacttgaacccgggaggtggaggttgtggtgagccgagatcacgccattgcgctccagcctgggtaacaagagtgaaactctgtctcaa

SEQ ID NO: 404670 - DNA, 474 bp, Homo sapiens
caccctctgtcccagccagaatgcagttagaggcatagtccttgaaatgattttaaagttatgcctacattttcttttcttaattacaaaagttgtatatattgagaactcctgattagagcccccaggctcttagcttccccgctatggccacagaaaagcacaaggtcaagcagaaatccataatctcgggctgagcgtagtggctcatgcctgtaatcccagcactctgggaggccgaggtgggtgaatcacttgaggtcaggagttcgagaccagcctggccaacatggcaaaaccccatgtctacaaaaaatacaaaaattagccgggcatggtggcacacgcctgtagtcccccctacttgggaggctgaggcacgagaattgtttgtacccaggaggcggagattgcagtgagccgagattgcgcccttgcactccagcctgggtgacagagtaagactctgtctca

SEQ ID NO: 404671 - DNA, 460 bp, Homo sapiens
ctttatagcagtgtgagaacagactgatacacagtctgctcagcgagatcaatcacttctcacataggaaaagcaaatgagaaatggaagtggacaaatggaaacctgagacgggacaggaaaaggatgtttcttcctacttttctgggctataagaatggattgaaaacgtagaaaaattgaagcactttcaaagggaaaatgtagggcaataaaggctttcctggtgccatttaatcatattttatatacagaaacctgctataatttcgtgattatttgttgttttaagcagcctctgttgtcttgccttttaaaaagtagtcattcatggctggacacagtggctcatgcctgtaatcctagcactttgggaagccaaggtgggtggatcatttgaggtcaagacttcaagaccaacttgactgacatggtgagactctgtctttactaaaaatac

SEQ ID NO: 404672 - DNA, 659 bp, Homo sapiens
tttttttttggtggcgtggaggggaatgagatatcctgttattccagtgccacttgtggaaaaaattaccgtttttccttgtctctgctcctttgtcaaggatcaatttactatattcgtggtctacctatgcgctattttgcttcaatgatctatttattctttcaacaataccacaatgtcttgattactgtggcttcataagtctttaagtacaatagtgtcagtctgactttgttctcctataatattgtgttgcctagtctaggtctctgaccaatataaactttagaataactttgctgatagccacaaaataacctgctgcgattctgaattaaattacactgaatctatagatcacgttgggaagaacttgacatcttaacaatattgagtctgcctaagcatgaacatggaatatctgtttatttagatcttcgattttttatttttgtcattttcctcgatcttgtacttatgttgcaagatttatatctaaggactttaatttttttgtgctaatataaatggtattgcaacactgctatagtcttttattttttttggagacaaagtcttgctctgtcacccaggctggagagcagtggcgtgatctcagctctctgcaacatccacctcccaggttcaagcgattc

SEQ ID NO: 404673 - DNA, 714 bp, Homo sapiens
ggtttccctgtctcagacaactgtgctgtgaaagtttcttcagtgcatgatactggcccccctcctgcctctggacagaagcctgtcattattgtcaccggtgaggagacatttgtcccccatcacgcatgagggacggagaagagaactcctggcattccacaggggatggagggatgggggtgcagagccacccgctggccctcagccctgactcccagcctctgaaaaacaactctacgacaaatcctccttctgagcctccactcagtgtgcacatgagtggctcctgtcagcgggagctccatgggaagcttctaaatacggaaaaagtggaaatggcatgttgccatgcaaatgtggccccactagacgtttgtcccaaaatggagcatcctagagtacccattcttcatctctgccttgggaagatgttcgcccaagcgcttgcttgatttgcagatagaaacgttgtccccactcttgtgtgcagttcaaagacttcacacttgacaactgagagtccaccaaagggagaagtcggaccagcccccagccaaacacgggagaaaataaggacttaggaaaaccagcactgaggcctggaggcctggagctccaaggggcaggtcccatgagcatcccgttccacgtggttttcaccagcttaagtcccatcattggcacattccttctgaaaaaaaaaaaaatcaa

SEQ ID NO: 404674 - DNA, 287 bp, Homo sapiens
gcggaagggatggaagaggctcatttttataaatagacttctaattttgttctgtgttatctcccttttgctatatttagtagcttctcaggatcatcaaagaactgaaaaaaaaaaaggcaaatgagaagaaggaaggaagggggtaggaagggaggcacagaaggatagaaaaggaaaaaaaagaaaggatgaaagaaaggaaggccccaaggttggctgacttttgctgggctggaatccagaatcactgtatgagaggagaggtggaatgctggtccccaaga

SEQ ID NO: 404675 - DNA, 328 bp, Homo sapiens
ggtgctttggctttgtaaagaatttgcaaatcacttaacagctgcaggggcaaggggagagtttcatcatccccatgatatttgggaatattctgtttacttcttagatagttaagaatgtattcagctactatgtactaacttgaaccgtgtttaaggaaaactcctatttcatcctcttcttgcgccatcccctctccctaacttggtaatgtgaagaaactaaaacctgataccacagctcctataggcattttagagatcttggatttttatgtacagtcttagtcatttttaataaatgtggttcagtaagggaacggacata

SEQ ID NO: 404676 - DNA, 1039 bp, Homo sapiens
tcctttaatataaaaatctttattaatggaataaacaagcccctgtaattttatttatcaacgcttacagagcgcttactatgtatgcaatgcatgatttcaagagctttgcaaaatataatctatttaattttcacagcagccctacgagagaggtacgattattatcccattttatagatgaagagactgatggcagaaatgccaaatgtaataggaaacagcctttcttcatgcattccacaaatattggctcggcgcccgggaagctcatcttccacgatctgtacttccggaggagtcccagaggaacacctcctcagttcagaggagtcaagggttacagcggtgccctctcccatcactactcttttcccttcaggcgccctaattgacattcgatttgtagccatttgcacaatgctaagtgacaggcttgggctgcacacaggaccaggccgtcttccctctcctggggatcagtcgttcacagaaccaaaaacaagttgcatggacgcgcgcgttggctgcagattttcttcacagccaggagaaagagcacgcgctctccagccccgcctcttcttccgggacgacgaattgcggggctcggattgggctgaggcgggccacgcctcctcatatcctccaatcaactccctctctggtgcgctccctccttctcagccccgccccaccgccccacgttacgtcgctccttctggcctcctccgttatcccggcggctgcggctcgcgcggcaaacccacctcccattgcttcccattggctggtcaggtcccgcgcgagcgggatcgcgcccttcgccccccacccccaaaaccgggccatgcctctctccttcggctttctccaggagccagcgcgaggcagtagatcggctgcttgagacgcgcgcgcagctcctgcggaccactccctccgccctgcgccagcagctgcgccggctggcagccccccgcgcacgcgcgctcgcccatcccgctccctctgctcgtttgcaagtcgcctcgcgctc

SEQ ID NO: 404677 - DNA, 1972 bp, Homo sapiens
cgggcgatgaccgagttttcttcttcaacccaacgatgcacctgtctgtctgggagaagcccatggacctgaaggaccgcggagacctcaacaggatcattgaggacccgccccacaaacgcaagctggaggcaccagcaactgacaacagcgatgggtccagttctgaagacaacagggaagaccaagatgtgaaaaccaagaggaaccggaccgaaggctgcgggagtcccaagccagaggaggcaaagagagaggacaaaggcacaaggacgccgcccccgcagatcctcctgcctctggaggagcgtgtgacccacttccgagacatgctgctggagagaggggtatcagcattttctacctgggagaaagaattacacaaaatcgtgtttgacccacgctatctcctgctcaactctgaggaacgaaagcagatatttgaacagtttgtcaagacaagaataaaagaagaatacaaggaaaagaaaagtaaattgctgctagccaaagaagaattcaagaaacttctagaggaatctaaagtgtctcccaggaccacgtttaaggagtttgcagagaaatacggccgggatcagaggttccgacttgttcaaaaaagaaaggaccaggagcattttttcaaccaattcatacttattcttaagaaacgggacaaggaaaacagactaaggctgcggaaaatgagatgagtttgtgaaaaaatgcaataagcccgggggttgaccctgggcgtgccgggggcgagggggtcacggtggagacggacacgggcgtggggcggccgagacctgcacggcccagcgggcaccggcactgcggggtcttcgttctcagaggattactgtttcatattgaagctctctcttttgtacattcagagtttgatgcatttctaatcaccgtgatacgtcgatcccttaattgttttaattatgcaaattacttgtaatatacacaaattatcaatccactgcaggactgtggggaagcaggaacgggagcctctgtaacaatctcaaggcatttgtgtcatcacctaagacgattggcgaaaacttttctgaaaacctttgtgaattacttcgttcctccaggattcccgcagtgttgaggaattccttactctgtccctaggtctcagtctcgtttctgagtagcagcaatagggttttcatcattcatcatagtgacaactgtgagcattccacacctggaccgtggatcacttacaggtttccaagggtggccgcgcgttcctcccagaggggcgtcccggcctggagcagggagccgtgttggttgccaccggtcctacttcaaaagaattattttgtacaaaatcatcatattaatatttgagttatttttattgtatgcccggagtttgcatgagattttttctcatcacctttgtataaaaaatttttaattttttttaatcaataaatattttaaaccagtgtgtgtatgtgtgactaagacattccccatgatcttaagcagcaacattgtgtttcaactaaagatacccagttttgaaagattcagggagaaaaaaaatcccgatgattgcaataagggccatgaaaatgccactcacacagaatctcacttttcaacatacttagtagtcctgggtggaaccacgtttggcaaaaccttcactaattaattgcattccttaaactattaaacatccattcatttatttcaagatttatggagttctctgttcagatacaatgtctttgtcccctagtaaacagtgacacagcctcctcacctaccttcttcttaattagttcccatgagaacacttttttccacacttattaggatgtaattgggcaaggtgggatccactctccactgagctcagccctggtcccgacactgtcgctgttaacacctcaccttccgtgttgggtggcccctgggggttccaggg

SEQ ID NO: 404678 - DNA, 1483 bp, Homo sapiens
cgggcgatgaccgagttttcttcttcaacccaacgatgcacctgtctgtctgggagaagcccatggacctgaaggaccgcggagacctcaacaggatcattgaggacccgccccacaaacgcaagctggaggcaccagcaactgacaacagcgatgggtccagttctgaagacaacagggaagaccaagatgtgaaaaccaagaggaaccggaccgaaggctgcgggagtcccaagccagaggaggcaaagagagaggacaaaggcacaaggacgccgcccccgcagatcctcctgcctctggaggagcgtgtgacccacttccgagacatgctgctggagagaggggtatcagcattttctacctgggagaaagaattacacaaaatcgtgtttgacccacgctatctcctgctcaactctgaggaacgaaagcagatatttgaacagtttgtcaagacaagaataaaagaagaatacaaggaaaagaaaagtaaattgctgctagccaaagaagaattcaagaaacttctagaggaatctaaagtgtctcccaggaccacgtttaaggagtttgcagagaaatacggccgggatcagaggttccgacttgttcaaaaaagaaaggaccaggagcattttttcaaccaattcatacttattcttaagaaacgggacaaggaaaacagactaaggctgcggaaaatgagatgagtttgtgaaaaaatgcaataagcccgggggttgaccctgggcgtgccgggggcgagggggtcacggtggagacggacacgggcgtggggcggccgagacctgcacggcccagcgggcaccggcactgcggggtcttcgttctcagaggattactgtttcatattgaagctctctcttttgtacattcagagtttgatgcatttctaatcaccgtgatacgtcgatcccttaattgttttaattatgcaaattacttgtaatatacacaaattatcaatccactgcaggactgtggggaagcaggaacgggagcctctgtaacaatctcaaggcatttgtgtcatcacctaagacgattggcgaaaacttttctgaaaacctttgtgaattacttcgttcctccaggattcccgcagtgttgaggaattccttactctgtccctaggtctcagtctcgtttctgagtagcagcaatagggttttcatcattcatcatagtgacaactgtgagcattccacacctggaccgtggatcacttacaggtttccaagggtggccgcgcgttcctcccagaggggcgtcccggcctggagcagggagccgtgttggttgccaccggtcctacttcaaaagaattattttgtacaaaatcatcatattaatatttgagttatttttattgtatgcccggagtttgcatgagattttttctcatcacctttgtataaaaaatttttaattttttttaatcaataaatattttaaacca

SEQ ID NO: 404679 - DNA, 745 bp, Homo sapiens
atcgtattttaaacttgagttcagacttagaccttatgagttgaaggtgatttcctgccttactgagtttttctgttatcagacctataatttgtttacactatactcttctgatattattagtagtagccaagattttcttcactcttttcttggaaaattggatagaactgttaaggtacagccttctgggttcttactgtccttgaatcttttcatttcttccttcctccctttcctgttgcacactaatgaagatggacatgaaatggacgtgaaacattaggcaaggcaaggcctgacagatttggctggtaaacaactagtcaactttttgaatttagacagttattaattacttaggcagagaaaaaagtagtccaaggtgccatttctctgtgccccttgtctcacacttgaaaagagtgacaccgaaataaaaggggctagctaacgattgtcccttgaatggtgggacaccctgttgctgaggaatcattgttatactgcagctaagcctgtttagtctgcaaatgtaccctacaaggttgaggaagaaaggtctcatgtttcattagaacctgagaggagatgggaaactctcctgacagaagcatcctggggcaagagagaggtgagtggaaaacgtccatccatatagcaacttctcacaagcctctcttgtccatgttccaggatgattccatggccttctgccaagacagcttgcactgtgattcagacc

SEQ ID NO: 404680 - DNA, 467 bp, Homo sapiens
tgctttcttagaattttcatctgcttatacttatctgttctttcatgtccttttttcattaaagcctttagcttattcatcattttcaaaaattttcttgtcgaatgattccaatatttctgctgtatctgactatgattctgatgcttgttcaatcttttcacactgtgttttttgccttttagtatgtctggtaagtttttgctgaaagacggatgtcatgatgtactgggtaaaaagaattgtgaatgggtctttagtgatgtggtggtaaatcactggggagtgatactgtttggatgttttgtcccctccgaagcttatgttgaaatatgacccccagtgttggaggtggggcctggtgggaggttttggatcatgggggtggacccctcatgcatggcgtggtgccttccccttggtgatgagcaggttcttgctctgttagttcacacaagagctggttg

SEQ ID NO: 404681 - DNA, 384 bp, Homo sapiens
tgtctgaaacagtctcactctgttacccaggctggagtgcagcggtatgatcttggctcactgcaacctccatctcccaggttcaagtgattctcctgtgattatgaatgttagctcttttattattgttctaaagtttcctgaaatgctgttaaatttttttttatcggttttcttcttcttgttcagacagtaaattctgttggcatgttttcagattcactgattccatcttctgctctgtgctctcttcttttgtgaccatcctctgcatctattatttccattattgtattttaattttatttagttcatgtttactttttataacttataagtcattattgaatttatttttaattttaacttttatttgttccaaga

SEQ ID NO: 404682 - DNA, 468 bp, Homo sapiens
  misc_feature (465)..(465): n is a, c, g, or t
agaaattttgcattgtccgtattagaggaggggtggattggcatctagtgggcagaggccaggggtgctgctaagtaagcatcttacaatgtacaagacacgccccaccacagagaatcatccagccccaaatgtcaactgtgtcaaggctgaacaatcttctccttgcactgcttcccctctccactgctagtggagcctgtgactgcggcagtcctgcaattctcccccctccccccacttttttttaaagatgaagtcttgatttgtcacccaggctggaacaacctccgcctcccgggttcaagtgattcccctgggaggcagaggttgccatgagccgagatcgggccactgcactccagcctgggagacagggcacgactccatctggtgaacatttgctccccttcccttctaactgtctcataaggtttccagtgggaattgcatcttcttggcggncgc

SEQ ID NO: 404683 - DNA, 770 bp, Homo sapiens
cacaacggatcatacaccagccacccagccatcccaagccagccacctggtggccttcctgagggttcatctcctctgtcttggtcccgttcacacctgctccatgtctcttcgtccctactgccacctccctcatttagacatccttcattttctgcctgaactgccagcaaatgctctttgccaggtttctgcatttaggcctcacctcctcctgcctttctgctcccacatcccactcagtccccactgctggcagagaaattatgccagagccgaatatcagctctcaactccctttagctctctttagcttatctggggtggggaagcaaatcagaagtaatctttgtcaagacagtagaaattgtggcacaatttttttttcacttgttcagacaggtggatggaattatggagggaaaatgtacaatatatttctgagtgaaatagggaccgaacacaataccttggtggacagttcagtgatgttggtgaatgggatagaatataattccaaagagaggcagtggctatgagcaaaactgctaaaacagcggcaattgcttgcattattctgtacatttctttttgagggtgcagaagtgggaaggaaggcagggttaggagtgattgaaaataaatgagagaggccgggcgcagtggctcaggcctatattgccagcaccttgggaggctgagtcgggaggatcttttgggcccaggagttcaagaacagcttggggaatatctggagaggcctcctctta

SEQ ID NO: 404684 - DNA, 479 bp, Homo sapiens
aaactgaaaaaggatcaagggaaataagaacccaagagtgggagaagattacatcatacagggcagagagtcccaggactttctcagtaagttcagaatacccccttagagcagaggaggcacacaggcaggtacccaaacaagaagtacttttaatggtggaaataatagaagtaaggacttcatagagcctattgttagagtctttcacacacagccctgaaagtttgctgacgcttgcctccataggttgattgtccctgggtctctctaacctttgcaggaactaaagtgtatgaagttgtatggtactgagaatagtctataatttgatggctcttgtttattaggagacaccaatatattttgatttttttttggtcaagttttttttttttttttttggtcattctggatatttgtcttatattaatcccagtatttcctgttttaccatgataataaattcttcctgtagt

SEQ ID NO: 404685 - DNA, 415 bp, Homo sapiens
gagcgacagagtcagactccatctcaaaaaaaaaaaaaaaaaaaagaaagtatgagaactccctggaaagaattcatgctaaaggtgcttgttcagctcaaatacaatggatcagaaatgaggggtggccaggcaaagcagcttacgcctgtaatcctagtacactgggaggctaaggtgggaggattgcttaaggccaggagtttgagaccagactgggcaaaatagtgagactctgtgtctacaaaaattttaaaaattagccacgcgtggtggctcgcctgtggttccagctactcagaaggctgaggtgggaggattgcttgagactaggaggtcaaggctgcagtgagctacgattgcaccactgcagtacagcctgggcaacagagcgagaccctgtctcaaaaaaaaa

SEQ ID NO: 404686 - DNA, 230 bp, Homo sapiens
cagtaaagctgttacaaaaaaaaaaaaaaaaatacaggtttttatgaattagcccaggacagcgtattgcagggagcttttcacactccctatgagggaaaagagatacaagttaaaacaaaactgtgttcttaaagtgtccctaatcctgcttgtaaaataagaagacagcatatataaagcacaaataatattgtcctcacaaacatcaccccaccccaaataattta

SEQ ID NO: 404687 - DNA, 174 bp, Homo sapiens
caatgttcatctcacatgtgttgattgatgtgtcataactccctaaagtgtataaaaccaaactgtgctctggccaccttgggcacatgtcttcagggtctcctgagctatgggtatgtcacgggcatatgttctcaacctgggcaaataaactttctaaattaactgaaacct

SEQ ID NO: 404688 - DNA, 352 bp, Homo sapiens
taaaacttgcagttattctgtaacacatccccagtctctacatgtatctgaattttacccacacttccacagatttaactaatttctcctaatgtttgcaggacaaaactaaggaaatgtctagaccctcagggtaagggaagcccctagagaccggcatgtgaatcacaaactcaaatgcttatggaccagacaggtaacctcaatgagtaaggtgggccaggtgaggatgttggataattggaggacgcacattccatttaaaggtgatggctactgctcaactccagccatctgtgacaatacagatccaccatgtgctgctagatcatcttatctttcaaagaaagca

SEQ ID NO: 404689 - DNA, 2070 bp, Homo sapiens
attcttatctcataagcaggacattcccgttctaaaccacatgtgatcgccttattggaacaatggaaagagcctgaagtgacagtgaggaaagatggaagaagatggtgcacagatttgcagttggaagatgatacaatcggctgtaaagaaatgcccacctctgaaaactgtccatcttttgctctacatcagaaaataagtagacagaaaccacgtgaatgtcaggaatatggaaagaccctttgtcaagactcaaagcctgttcaacatgaaagaatacatagtagtgaaaaacccaacagatgtaaagaatgtgggaagaactttagtaatggacatcaactcaccatacatcagagattgcatgttggtgagaaaccctataaatatgaaaaatgtgggaaggcctttatcagtggctcagcctttgttaagcatgggagaattcacactggtgagaagccactcaaatgtaagcaatgtggaaagactattagtggtagctatcaacttacagtacataagagtattcatactgggaagaaaccatatgagtgcggggaatgtgggaaagcttttctagtatatggaaagcttacccggcatcagagtactcacactggtgaaaaaccctttgggtgtgaggagtgtgggaaggccttcagtaccttttcatacctggttcaacatcagcgaattcataccagtgaaaaaccttacgaatgcaaagaatgtgggaaggcctttagcactagctcaccccttgctaagcatcagagaattcatactggcgagaaaccctatgaatgtaaggagtgtgggaagtccttcactgtgtatggacagcttactcgacatcagagtattcatactggtgagaaaccttttgaatgtaaggaatgtggaaaggcctttagacttagttccttccttcatgcacatcagcgaattcatgcagagataaagccctacggatgcaaggaatgcgggaaaaccttcagtcgtgcctcatatcttgttcaacatggaagacttcacactggcgagaagccctatgaatgtaaggagtgtggcaaggcctttagtactggctcataccttgttcagcatcagaggatccatactggggagaaaccctatgaatgtaaggaatgtggcaaagcctttattagtcgccatcagcttaccgtacatcaaagggttcatactggagagaaaccctatgagtgtaaggaatgtggcaaggccttcagagtgcacgtacatctcacacagcatcggaaaattcatactgatgtaaagccctatgaatgtaaggaatgtggaaagacttttagtcgagcctcgtaccttgtacaacatagcagaatccatactggtaagaagccctatgagtgtaaggagtgtggcaaggccttcagttctggctcataccttgttcagcatcaaagaattcatactggggagaaaccctatgaatgtaacaaatgtgggaaagcctttactgtttatggacaacttattggacatcagagtgttcacactggtgagaaaccttttgaatgtaaggaatgcgggaaggcctttagacttaattcattccttactgaacatcagcgggtacacactggtgagaaaccctttaaatgcaaaaaatgtgggaagacctttagatacagttcagcccttaaagtgcatctgagaaaacatatgagtgttataccctaagagtctgaggagtgtgggaagtgcttcgtgtgtggctcaaacattgttgaacatcggggaatttatgctggtaggaaactttcaaatgtgaagaatattggcaggtctattctcatcttataattcataatataactcagaaaacataagaatattcctttgtcatttataggtttgtaataccaatatttatactggtggaccattcagaaaaagtgggaaacgttattacttaatggttacagcactgacagcatgaacttttatatgatgcatttattctaatgtgattgtatgaacaagtgaataaaaaaccttggacctcctaaaccactgctg

SEQ ID NO: 404690 - DNA, 2624 bp, Homo sapiens
tattcctgataaagtgacattttattttaaacatggataggataagaaagctccagtctacaaacaaaacatgccagaagatttttaggcgatgatgccacctgcacatggaaccaaaaggtgagaaaatttgtaagaacgtcaaggtgctaaaagggggaaattaggtcagtatgggacagagggagttgtgtcttgatatgaggtctgagaggtgagcagggacaatattatctgtggaaagatacatggattttaatgtaagcgccacaagaaacccctagaaggaacaataaaatatggattataaaaatttcatctgcatcagaaacatttgttagaaaggttgacagtattgatgtccaggaacttcccctatgtctgattcagaggggcgggatgctgcttgaacatccattttttaacaggctcttcaaagattattatccacacctaaatgaaaactgtttcactaatcaccaaccttactattttacataaacacttgttaatctctgcattcctttttttttttttgaatttcataatggtgttttaatattactgagctatttatttctagttggtgttattttcagtttttctcttttcttccctagaattttttttcaaatagaaaaataagatatttttaaaattttctttcagatttgcagttggaagatgatacaatcggctgtaaagaaatgcccacctctgaaaactgtccatcttttgctctacatcagaaaataagtagacagaaaccacgtgaatgtcaggaatatggaaagaccctttgtcaagactcaaagcctgttcaacatgaaagaatacatagtagtgaaaaacccaacagatgtaaagaatgtgggaagaactttagtaatggacatcaactcaccatacatcagagattgcatgttggtgagaaaccctataaatatgaaaaatgtgggaaggcctttatcagtggctcagcctttgttaagcatgggagaattcacactggtgagaagccactcaaatgtaagcaatgtggaaagactattagtggtagctatcaacttacagtacataagagtattcatactgggaagaaaccatatgagtgcggggaatgtgggaaagcttttctagtatatggaaagcttacccggcatcagagtactcacactggtgaaaaaccctttgggtgtgaggagtgtgggaaggccttcagtaccttttcatacctggttcaacatcagcgaattcataccagtgaaaaaccttacgaatgcaaagaatgtgggaaggcctttagcactagctcaccccttgctaagcatcagagaattcatactggcgagaaaccctatgaatgtaaggagtgtgggaagtccttcactgtgtatggacagcttactcgacatcagagtattcatactggtgagaaaccttttgaatgtaaggaatgtggaaaggcctttagacttagttccttccttcatgcacatcagcgaattcatgcagagataaagccctacggatgcaaggaatgcgggaaaaccttcagtcgtgcctcatatcttgttcaacatggaagacttcacactggcgagaagccctatgaatgtaaggagtgtggcaaggcctttagtactggctcataccttgttcagcatcagaggatccatactggggagaaaccctatgaatgtaaggaatgtggcaaagcctttattagtcgccatcagcttaccgtacatcaaagggttcatactggagagaaaccctatgagtgtaaggaatgtggcaaggccttcagagtgcacgtacatctcacacagcatcggaaaattcatactgatgtaaagccctatgaatgtaaggaatgtggaaagacttttagtcgagcctcgtaccttgtacaacatagcagaatccatactggtaagaagccctatgagtgtaaggagtgtggcaaggccttcagttctggctcataccttgttcagcatcaaagaattcatactggggagaaaccctatgaatgtaacaaatgtgggaaagcctttactgtttatggacaacttattggacatcagagtgttcacactggtgagaaaccttttgaatgtaaggaatgcgggaaggcctttagacttaattcattccttactgaacatcagcgggtacacactggtgagaaaccctttaaatgcaaaaaatgtgggaagacctttagatacagttcagcccttaaagtgcatctgagaaaacatatgagtgttataccctaagagtctgaggagtgtgggaagtgcttcgtgtgtggctcaaacattgttgaacatcggggaatttatgctggtaggaaactttcaaatgtgaagaatattggcaggtctattctcatcttataattcataatataactcagaaaacataagaatattcctttgtcatttataggtttgtaataccaatatttatactggtggaccattcagaaaaagtgggaaacgttattacttaatggttacagcactgacagcatgaacttttatatgatgcatttattctaatgtgattgtatgaacaagtgaataaaaaaccttggacctcctaaaccactgctg

SEQ ID NO: 404691 - DNA, 2098 bp, Homo sapiens
  misc_feature (54)..(54): n is a, c, g, or t
  misc_feature (131)..(131): n is a, c, g, or t
  misc_feature (455)..(455): n is a, c, g, or t
  misc_feature (812)..(812): n is a, c, g, or t
  misc_feature (814)..(814): n is a, c, g, or t
  misc_feature (917)..(917): n is a, c, g, or t
  misc_feature (1351)..(1351): n is a, c, g, or t
aatgagtcagggtctccctctgtcacccacactggagtgcagtggtgtgatcanagttcactgcagcctgcagcctcgaactcctgggctcaggcaatactcccacttcagcctcccaagtagctgggacnacaggcacacttcaccatgcccagctttttaaaacatattttttgtgaagatgcggtctcattatgttggccaggctggtctcaaactgccggactcaagtgattctcccaccttgttccccaaagtgctgggattacaggtgtgacccaccttgcctggcccggggtgtcttttttttctgagatggagtctcactctatcgcccaagctggagtgcagtggtgtgatctcagctcactgcaacctccacctcctgggttcaagcgattctcctgcctcagcatccccagtagctggaattacaggcacacaccaccatgccnggctattttctgtatttttagtagacacaaggtttcaccatgttggccaggctggtctcatagggtgtctttaactagcatggaacccacaaggtccactcattcatttttgtattacctcccaggctcagcatggtgcctgaacctctataaggaggcaatgtgtgttaagagagacaggaggggtcaggtgcggtggctcacacctgtaatcccagcactatgggaggccaaggcaggcagatcacttgaggccaggagttcgagaccagcctggccaacatggcaaaatcccgtctttactaaaattgcaaaaattagccatgcgtggtggtgtacgcctgtaatcccagctantnaggaggctgagacatgagaattgcttgaacccgggagtttgaggttgcagtgagctgagatcgccccactgcactccagcctgggtgaaaaaataagactgtntcaaagaaaaaaaatttttttttttgtagagacggggtttccccacgttgcccaggctataactgtactttaaaagacacaatactctagagatgtcattacagttagtagattattatcttaattgaccctaaattcgctattttggagctaagcaaccaattacggcctggtggtatattcacctgctccttagatggaggttctgtgaaggcagcagctctgtccatgttgtttactgtagggctgaacactgaccttgagacatagttggcactcaaaattatatgttgaatgacagaattttgattaggtggatctaacgcatttgaaataattcatagggctgggcacggtggctcaagcctgcaatcccagcactttgggaggtggaggcaggcagatcgcctgaggtcaggtgtgcaagaccagcntggccccagcctccctagtagctgggattacaggcgtgagccaccctgcccggccaagttttacattattaagctatccatgttctcttgggaactgaactttttttcctcttgatgctctggatttgacattgcacttgactttttatgtagtaactgacatgtgccagagttggcatcttcccccaagtccaagcatcatgagtaactcttgcttatctctctctctctcttttttgagacaggttttgctgtcacctaggccgcagtgcagtggcgtaatcatggctcattgcagtctcaacctcctgagctcactcaatcctcccacctcagcctcccatgtagctgagactacaggcacgcaccaccacacccagctaaatttgtttatttttgtagagactagatctcactatgttgcccaggctggtcttgaactctggagctcaagcgatcctcctgtctcagcctcccaaaatgttggcattataggcgtgagccactgcaccctgccttgcttatctttatagattcaaatggtaggcatttcccatcacctaattcctttttttgttattgttgaatagggtcttgctctgttgcccaggctagagggcagtggcccaatcacagctcactgcagcttcaatcttttggactcaagtaatcctcctgcctcagcctcacaaagtgctgggattacaggcatgagccaccaggcttggcaagtgatgacatttttta

SEQ ID NO: 404692 - DNA, 372 bp, Homo sapiens
gtatgaatgctttgggttaaaaaaaaaaaaaaaagaggtcctacctatgataaagcttttaaaaaaaggccccaaattatatgcatactggaaggaattttttttttttttttttttttgattaacagagtttggctctttttgcccaggctggtctcatagggtgtctttaactagcatggaacccacaaggtccactcattcatttttgtattacctcccaggctcagcatggtgcctgaacctctataaggaggcaatgtgtgttaagagagacaggaggggtcaggtgcggtggctcacacctgtaatcccagcactatgggagcatgcatttcagtgaaagtttagaagaattacagtgatatcact

SEQ ID NO: 404693 - DNA, 553 bp, Homo sapiens
cgagaatgtaagtctttcccaggaatttaaaaatgataaagcaagccgaaaaactgtagggaggaattttcattttgttaaatttaggttgttaggggaatcaacgcttatggttagacctctgattcaggaagtctcaaggatttacattcctatttcagaagattgttaaagcaaaaacgattgtcatttgcagttttgatacacctctagttgtcagttcaactttttacctttagttttctctgaactcttccccttgttccaaggggaagctttcaaaaagtgaattatgtcaccatttgcatgttattgaatagaagtgcactcttaacatcccatttatccagtgtcaaagctatgatacattgttgctttatgtggggtctcccacactgaaaagaaaaacccggacttcatttatttatttatttatttatttatttatttattactttatattgctaatgtaaacctctgctagaagtaaataggctctcgcaaatattcaaagtgatacagtaataaacatcaaatatgtttgagaagacta

SEQ ID NO: 404694 - DNA, 471 bp, Homo sapiens
tcatccgggtgcatccctagtgctcaccatgctgcccaggcaccctcactgagatgagaactttccttgttcccctcccctaataaccaaagttcctgccttaatcccactccagtccctcatccaccccgaggccaggcttcagaacccagaactgagggcctgtccagccctgctttccttgtgtttgagggaagccctgatatcttggagctgtacaaggtagcaacataatttgatttccctggttgctcatcggaggataagctgtgggaggcagttgggcagggcatgcaggcagatgggacccaggcctcaatgctgtcacctcttagagaggataaggtgggacgggcatggtggctcacatctgtaatcccagaactttgggaagctgaggcaggcagattacctgaggtcgggagtttgagaccagtttggccaacatggtgaaaccccatctctactaaa

SEQ ID NO: 404695 - DNA, 515 bp, Homo sapiens
aagttggaaaagtaacttgggatgtggttgagaagggaattgagtttatgctctatgaagcacagttagatgtctgaatttaagaagaaatcttgtaactgcagacatttatttgacagggacaagaaaaatgccagaggcacaaaaaccaattaggcttttgattaatttactcataagataataaggatgtaagacagaagcagtggacttggaaaggaagggcaagttcagggggccaattaaatacaatggatacaagtcctgaaaaaaacaggtttccaagcccagacttaaaaatagtttcttatactgtaataggaactgggctaaggtatttttgttttgttcctgagataatttcctgcaaggatttaccatttcctgtttaaatctctagatagtttcttgtattgtattattttgcacacaattaaattacattctttttttgttttttgtgttttgttttgttttgttttgttttttgagacagagtctcactctgttgccca

SEQ ID NO: 404696 - DNA, 391 bp, Homo sapiens
acacaatcggggctcaggtgtctgggggcacagacacaacaggttgcctagatccaggtgtgtgtgcacacaactcacgcaagaaacacctgcacttggcttgtaggagactaaaaatcccaaacatgctatacctactaggtttggggacaaagtaaaagtgaaaataatctcgctgataagactaaggtgtcttcccagatctgatcaggagtccaatgtgaataggagacaacagagagctgtctttgtactttggctctgaggaaggtttgtggaatggaccgcgtgtggcctgagagagctcgcatttcagggaatgcctgggcttgatgcctgttatcttgttcagtgcctctgataaattaataaactggaatctcactcaaca

SEQ ID NO: 404697 - DNA, 365 bp, Homo sapiens
cagatcatccctatgataccaggtggaaaaatggatgctcagagtggtcaatcaactcacccaggaatcccgcaggcagatggaagtggcaaaaccgcgtcaaacccagattactgactttaatgttggtccgtgcacgatacccccccccccccgccctggttatttggccgccttcgccggcagctcagggcagagtctcctggaaggcgcaggcagtgtggcgagaagggcgcctgcttgttctttctttttgtctgctttcccccgtttgcgcctggaagctgcgccgcgagttcctgcaaggcggtctgccgcggccgggcccggccttctcccctcgcagcgaccccgcctcgcggccg

SEQ ID NO: 404698 - DNA, 929 bp, Homo sapiens
gccagaagggggagtttcagaggcttccacttggatttccccactatgatagctcttacctcacaggataaagggcttgtgtcaattactaagtatgtcaattacagttatacatttggagaccactgacggtgggaccatggactgtgggtgagctggacctaagctagaactccatttatcacctggctcccttaggaggggccatgctaatgctctgggtttccccttccccagtacacagttatctgagtaacgctgggaagaaatggaggaatcctcgctgtgtgcagtcatggggttcttcctcctggggacataggctttctgtctatcaagtttccacgtccaagaacttgctcagggatggacattgcggaagggatttttacttttttttaaattaaggtgactgtccttagcttcccagccatccatccgtgctgtttttgattatgcagatacagtagtatccttattggctccatatctatgtggcccctaggggtgccaagttctattcactccacaggtctctgtaggtcaggctcccctggcctcctctctaccctaccactcaccacaatgacatcttcctgccttctgatggtgccatggtctgaatgttggtgtctccccaaaattcatacgttgaaacctgaccaccaatgtgagggtatcaggaggtggggcctttggaaggcgattgggtcatgaagatggagcctcatgaatgggactagtgccctaatgaaaagatgtcccagcatgctgccctgcctgttctacactctgaggacacagtgagaaggcaccatctatgagccagaaagtgggccttcagcagacaccaaatctactttgatcttggacttcccggcctccagaactgttagaaataaatttctttataagccaaaaaaaatatg

SEQ ID NO: 404699 - DNA, 506 bp, Homo sapiens
attttattcagatttctttagttttttgcctaatgtctttttctgttccaggatcccctccagaataccacattacagttaattgttatgtctccttagtctccccttggctgtgtcagtttcacatactttctttgtttttgatgatatagatgtgaagagtactagccaggaatattataggtattgggttttttaaatgtatgtgtcatttcatgattaaaaatcagttgcggccaggtgtggtggctcagcactttgggaggctaaggtgggaggattgcttgaggccaggagttcaagaccagcctggccaatgtggcaaaatcccatctctgctaaaaatacaaaaaatatagctgggcacggtggcacacacctgtaatcccaactactcgggaggctgaagcacaaggattgtttgaacctgggaggtggaggttgtagtgagccaagattgtgccactgcattctagtctaggcaacaggtgagactctgtctcaaa

SEQ ID NO: 404700 - DNA, 706 bp, Homo sapiens
atttgactgcagtattgccagctgtgattaggtggagttgtctcaaccctttcgtgtgctctcttctctccactggcttggttgtggatattatcccttgcttttaactaaatcagtcatattttctgggccataattccaaattagaatgcacaccttcatccaggtattgcaatgcttcaacctgacaggtatgcccattatggcagtaggtctctttctccatttttacttattaactttacattcttagttatgtctgcctctgtgtaactgtcgaatgatcatgccatgagaagttccccaggatggtcagtagttaggaaatttgacaagaataatcagaaacttacaatactgatggagaaaacatttcagaacaatatattattctgaaatcgagacattctgtagtataacaacaggggcctgacagttaaaaagtgtgtccaacatccatatcatttcaatgaggaatacttcaccagatttaaaaaaaaccccagcatgttagaaagcctcatatagttcttaatactccataattgacacttaaaattgtcttgtgaaatgacttactatgtttaaagtgcttagtaaaataaatatttcttatttcttcatctggaaatctgtaggtaaagtgaatatgcacagtaattattagctaatatgatgctgatgctcataatggcctttcatttag

SEQ ID NO: 404701 - DNA, 412 bp, Homo sapiens
cagtgatggaaatgctctaaagttggattgtagagatggctgcacagctcagaaaaagtactaaaaatcttttaactttatgttaaaacagatacattctatagtatgtaaattatatttcaacaaagctttttgattttaaaaaaaaggaaaaatgtgtttattacatcagcttagaaacataccttgtttccatagaggtgagagatgatttactttgagagaagactttgtgtcacctatgacattttattcggcacagagtcatattttaaggtagatagtcctgtagtgctgaaataataattttaatgtctttatgttgccacatgttaagaccatgatgaaggtataaatggaaatgtttacacctgaaatgagtattttcaaattaaaatttaattaagtgatt

SEQ ID NO: 404702 - DNA, 564 bp, Homo sapiens
tatttctgagatcagggtttttcaaactgtatttcggcagcaggtgtttcttcttctgtaagaaacagatctgggaactcgatgaatcagagagaggaagctgcagcgctggccaaactggggcctggcccacatggctgcccagatccccgacaacactgtcaaccgctaacagtgctgggagcaggcttcatcccacggcggctgtgcctaccctctctacaaagccgtgcccacctgcaggtaggttctgtgaatgtgccccggcaccgtgcacatccctggatgccgccggagtttactgattcgactgcaacacctgaaccttgggccccagctctacccattggctccccacagaatgccctacatcttagaggatggtaaaacattgtcctttggcactaaaagactactttgagaaagctaccctcctaaggggaatgtggctctccgctctgatgaaatacccacttttacttaacttcttttctcatgactttctgccaaattttcactactctatatactgaaagtagtaaaattctccaaaatctttataaa

SEQ ID NO: 404703 - DNA, 459 bp, Homo sapiens
ttcagaatctctgcccttgggtgtgggcggcacctatgggagttctttaaaatcagtccacgggtgcctaagcaggccaggtccttcccacacctctgctcctggccactgtgctgaattcctaccccccattctccgctacctccttcccctacaccaaaaaaaaaaaagagtgcatccattttggaggctcacttttcttacctagacattttttcaattttttacttcaaaaatttcaaatctatctaaaagttacaagaataggacaatgaatataactttcacttagattaaccagtggttaacattttaccatatttgcttgctccttccttccttttgtttttttttttttttgtgacggagcctaactctgttgcccaggctagagaacagtgagccaagatcgcgccactgcgttccaccctgggtgacagagtgagactccgtctcaaa

SEQ ID NO: 404704 - DNA, 246 bp, Homo sapiens
aataactaaaagctagacactaagtatgagttcctgctaaaagtcaagtgggaaaataaaatagaacaaaagaaccaaccaaacaaaaaaacaacgaagcaataggttatgacattaagttccggagtcaatatgctctggaacttaaacacacacacacacacacacacacacacacacacacacacacacacacactcctcccctctcatgtccccagtccaaccttcctctctgatacgccat

SEQ ID NO: 404705 - DNA, 840 bp, Homo sapiens
cgcaggtcaggcctcacaaggcaccagcggattcatagtggagagaagccctatgaatgcatcgagtgtgggaaaacattttgctggagcacaaacctcattcgacactctatcatccacactggagagaagccgtatgagtgcagtgaatgtggaaaggccttcagtcgcagctcgtccctcactcagcatcaaaggatgcatactgggagaaatcctatcagtgtaacagatgtgggaagaccttttacaagtgggcagacctcagtcaacatccaagaacttttattggggaaaaactttttgaatgtcaccactgaggaaaatcttttgcaagaggaagcatcttacatggcatctgatcgtacataccaaagagaaaccccacaagtgtcttcactgtgagaaaaccttctgttgccaaatgtcatttgtcacctaaggagtcatattagaaaatcacgcagcttagagccttattctccatccgaattcatcctggaaaaacacccagtggttattacgcacttgggaaaacctttagctccatctttctcattagtttacagtgcaatgttatctcaggaatttttataaacagaaagaggtgacatagaaaagaaaatgaaatgcagacactgcttttatactgttgtcttgtatgtacatttctgtcctgtgtcaggaaagttagtaagggaaggtctggaaacttactcaatgtctttgttctacaacattgtctcttcttaagaagcattgtttttatgagaaataatgaagccttgagttatgaaatacttttatatttaaggattaaaagaaacatgaatgcgcaca

SEQ ID NO: 404706 - DNA, 426 bp, Homo sapiens
ccacccagagatggtaccttttacttaggcaagattcacgctttctgtttaaagactttaatcctgggaatcttccggacctctactagctttaaattcgatgccaaaatacgctgtgcgaaggctcaagttccatggaagttcctaaaaacaagaatatttcagcaaaagtaatttttcaatagagcctgagcctggggcttcagagcttactccagagccactgcacttatttcatcacttcctgaagctgggtttttacaactgcacattcctggaaatccaaaactcccaataattgaaaacaagaaaatcccagtcttcacttgtggtgaagcctcaatttccaggttgaaatcttggttggttcatgatgtgacttttaaaacgttactgaattttctgtatctctatttcttcatctat

SEQ ID NO: 404707 - DNA, 649 bp, Homo sapiens
ttcaattctgatttgtcacaatttagattctttttctaagaataagcagaaatttacaaaatttaatttttatttatacattcatccgttcaatacacatttcaagaaagctgtattgcaccctttcagtggtagttacaggacaaagaaacaaaataatccaagagagagaccaacaaatgtatatttataacacagagtaataaacacaaataaatgtggagttatttaagcatgtaagatggtacatgctctaccaggtatgggggcttctctaagacacaagatcagattaaagtcttgaaagataatctggggttagtcaagcaggtagaagtgtgaagagcactttctgagcggaatctccatgtgccaagtctagttcaagagactggatagagattagcaatttggagaatgcaatattaagaaatggcaaaggtgagcctacagagattccaaagttgcatagtgaggtttgtgtttgagaaagtggactcaggcagccacgcaaaagagggattaatagaaaaggagactgaggtagaggtgggaagatctcttgagcccgagagttgaggctgcagtgagctaaggtggcactactgcacgccaggcaaggtgataaagcagggccctgtctcaggca

SEQ ID NO: 404708 - DNA, 4858 bp, Homo sapiens
gctctcgaggtgtctggaggctcagcgagcgccggacccaggaggcccaaggagctggaggtgaccctcaggcagcaagaaccccacggaagggcgtgagccctgcagacagctgtgcggcacctcgggctgggctcctgttaggaggaagtgcctgcacccaggcagcggctcagaggcagctgctccatgcagaactgaagctggttctgcagcagaaaggggagaggacacaggagcctggggtgcaggtgcctcccagcaacgccatggaggccaggagccggagtgccgaggagctgaggcgggcggagttggtggaaattatcgtggagacggaggcgcagaccggggtcagcggcatcaacgtagcgggcggcggcaaagagggaatcttcgttcgggagctgcgcgaggactcacccgccgccaggagcctcagcctgcaggaaggggaccagctgctgagtgcccgagtgttcttcgagaacttcaagtacgaggacgcactacgcctgctgcaatgcgccgagccttacaaagtctccttctgcctgaagcgcactgtgcccaccggggacctggctctgcggcccgggaccgtgtctggctacgagatcaagggcccgcgggccaaggtggccaagctgaacatccagagtctgtcccctgtgaagaagaagaagatggtgcctggggctctgggggtccccgctgacctggcccctgttgacgtcgagttctcctttcccaagttctcccgcctgcgtcggggcctcaaagccgaggctgtcaagggtcctgtcccggctgcccctgcccgccggcgcctccagctgcctcggctgcgtgtacgagaagtggccgaagaggctcaggcagcccggctggccgccgccgctcctccccccaggaaagccaaggtggaggctgaggtggctgcaggagctcgtttcacagcccctcaggtggagctggttgggccgcggctgccaggggcggaggtgggtgtcccccaggtctcagcccccaaggctgccccctcagcagaggcagctggtggctttgccctccacctgccaacccttgggctcggagccccggctccgcctgctgtggaggccccagccgtgggaatccaggtcccccaggtggagctgcctgccttgccctcactgcccactctgcccacacttccctgcctagagacccgggaaggggctgtgtcggtagtggtgcccaccctggatgtggcagcaccgactgtgggggtggacctggccttgccgggtgcagaggtggaggcccggggagaggcacctgaggtggccctgaagatgccccgccttagttttccccgatttggggctcgagcaaaggaagttgctgaggccaaggtagccaaggtcagccctgaggccagggtgaaaggtcccagacttcgaatgcccacctttgggctttccctcttggagccccggcccgctgctcctgaagttgtagagagcaagctgaagctgcccaccatcaagatgccctcccttggcatcggagtgtcagggcccgaggtcaaggtgcccaagggacctgaagtgaagctccccaaggctcctgaggtcaagcttccaaaagtgcccgaggcagcccttccagaggttcgactcccagaggtggagctccccaaggtgtcagagatgaaactcccaaaggtgccagagatggctgtgccggaggtgcggcttccagaggtagagctgcccaaagtgtcagagatgaaactcccaaaggtgccagagatggctgtgccggaggtgcggcttccagaggtacagctgctgaaagtgtcggagatgaaactcccaaaggtgccagagatggctgtgccggaggtgcggcttccagaggtacagctgccgaaagtgtcagagatgaaactcccagaggtgtcagaggtggctgtgccagaggtgcggcttccagaggtgcagctgccgaaagtgccagagatgaaagtccctgagatgaagcttccaaaggtgcctgagatgaaacttcctgagatgaaactccctgaagtgcaactcccgaaggtgcccgagatggccgtgcccgatgtgcacctcccagaagtgcagcttccaaaagtcccagagatgaagctccctgagatgaaactccctgaggtgaaactcccgaaggtgcccgagatggctgtgcccgatgtgcacctcccggaagtgcagctcccgaaagtcccagagatgaaactccctaaaatgcctgagatggctgtgccagaggttcgactccccgaggtgcagctgccaaaagtctcagagatgaaactccccaaggtgcctgaaatggccgtgcccgatgtgcacctcccagaggtgcagctgcccaaagtctgtgaaatgaaagtccctgacatgaagctcccagagataaaactccccaaggtgcctgagatggctgtgcccgatgtgcacctccccgaggtgcagctgccgaaagtgtcagagattcggctgccggaaatgcaagtgccgaaggttcccgacgtgcatcttccgaaggcaccagaggtgaagctgcccagggctccggaggtgcagctaaaggccaccaaggcagaacaggcagaagggatggaatttggcttcaagatgcccaagatgaccatgcccaagctagggagggcagagtccccatcacgtggcaagccaggcgaggcgggtgctgaggtctcagggaagctggtaacacttccctgtctgcagccagaggtggatggtgaggctcatgtgggtgtcccctctctcactctgccttcagtggagctagacctgccaggagcacttggcctgcaggggcaggtcccagccgctaaaatgggcaagggagagcgggtggagggccctgaggtggcagcaggggtcagggaagtgggcttccgagtgccctctgttgaaattgtcaccccacagctgcccgccgtggaaattgaggaagggcggctggagatgatagagacaaaagtcaagccctcttccaagttctccttacctaagtttggactctcggggccaaaggtggctaaggcagaggctgagggggctgggcgagctaccaagctgaaggtatccaaatttgccatctcactccccaaggctcgggtgggggctgaggctgaggccaaaggggctggggaggcaggcctgctgcctgccctcgatctgtccatcccacagctcagcctggatgcccacctgccctcaggcaaggtagaggtggcaggggccgacctcaagttcaaggggcccaggtttgctctccccaagtttggggtcagaggccgggacactgaggcagcagaactagtgccaggggtggctgagttggagggcaagggctggggctgggatgggagggtgaagatgcccaagctgaagatgccttcctttgggctggctcgagggaaggaagcagaagttcaaggtgatcgtgccagcccgggggaaaaggctgagtccaccgctgtgcagcttaagatccccgaggtggagctggtcacgctgggcgcccaggaggaagggagggcagagggggctgtggccgtcagtggaatgcagctgtcaggcctgaaggtgtccacagccaggcaggtggtcactgagggccatgacgcggggctgaggatgcctccgctgggcatctccctgccacaggtggagctgaccggctttggggaggcaggtaccccagggcagcaggctcagagtacagtcccttcagcagagggcacagcaggctacagggttcaggtgccccaggtgaccctgtctctgcctggagcccaggttgcaggtggtgagctgctggtgggtgagggtgtctttaagatgcccaccgtgacagtgccccagcttgagctggacgtggggctaagccgagaggcacaggcgggcgaggcggccacaggcgagggtgggctgaggctgaagttgcccacactgggggccagagctagggtggggggcgagggtgctgaggagcagcccccaggggccgagcgtaccttctgcctctcactgcccgacgtggagctctcgccatccgggggcaaccatgccgagtaccaggtggcagagggggagggagaggccggacacaagctcaaggtacggctgccccggtttggcctggtgcgggccaaggagggggccgaggagggtgagaaggccaagagccccaaactcaggcttgccccgagtgggcttcagccaaagtgagatggtcactggggaagggtcccccagccccgaggaggaggaggaggaggaggaagagggcagtggggaaggggcctcgggtcgccggggccgggtccgggtccgcttgccacgtgtaggcctggcggccccttctaaagcctctcgggggcaggagggcgatgcagcccccaagtcccccgtcagagagaagtcacccaagttccgcttccccagggtgtccctaagccccaaggcccggagtgggagtggggaccaggaagagggtggattgcgggtgcggctgcccagcgtggggttttcagagacaggggctccaggcccggccaggatggagggggctcaggctgcggctgtctgaagcccctagtcagatggggatcccttcttgccttcctttctctaccccctcgctgttgtgtgtgtgataactagcactaaccctaagagggccgggaggtgggtgactgaccagggctggcagggaggcctgctcctgtctctctggcaggagtgcctgtaccccaccaagccatgtgaataaaataatctggaagtagcca

SEQ ID NO: 404709 - DNA, 5507 bp, Homo sapiens
gctctcgaggtgtctggaggctcagcgagcgccggacccaggaggcccaaggagctggaggtgaccctcaggcagcaagaaccccacggaagggcgtgagccctgcagacagctgtgcggcacctcgggctgggctcctgttaggaggaagtgcctgcacccaggcagcggctcagaggcagctgctccatgcagaactgaagctggttctgcagcagaaaggggagaggacacaggagcctggggtgcaggtgcctcccagcaacgccatggaggccaggagccggagtgccgaggagctgaggcgggcggagttggtggaaattatcgtggagacggaggcgcagaccggggtcagcggcatcaacgtagcgggcggcggcaaagagggaatcttcgttcgggagctgcgcgaggactcacccgccgccaggagcctcagcctgcaggaaggggaccagctgctgagtgcccgagtgttcttcgagaacttcaagtacgaggacgcactacgcctgctgcaatgcgccgagccttacaaagtctccttctgcctgaagcgcactgtgcccaccggggacctggctctgcggcccgggaccgtgtctggctacgagatcaagggcccgcgggccaaggtggccaagctggtacgcgtgcttagcccggccccggccctggactgccccagcgatccggtctctgcgccgtgagccccattccccgccatcgtgggccagccttgccctctgtcttgtcactaacccaagctaattccaccctctgccccttcctctctgccccaaactcttccccgggaagggggacagacccaccccagcccagggccctcacccacctcggagaggcgtccccaccatcggatccaggcttgctaggggtcctgaaccaggctacttcgaaccaggaaagccagattccagcctgagtgctggcccaattactgctgagtggccctggacaaagttgtttctctccctgggcctcagtttccccatctctagaatgaggatgttggggaaaatcccggatcaggatctagaagtcttgggtccccgtccctacactcctgttgactcatttggagatcctagatggctgcctgctttcctgggcactcatggtgaaatgacaggcaagaagtggggatgatgtttggggaacaagatacttgacccagcacatcccccgcctggtccaataccaggtggggctcttcctgtccactcccagcctcccactgtcccaccgcctcctgcctctctcctctctccccagaacatccagagtctgtcccctgtgaagaagaagaagatggtgcctggggctctgggggtccccgctgacctggcccctgttgacgtcgagttctcctttcccaagttctcccgcctgcgtcggggcctcaaagccgaggctgtcaagggtcctgtcccggctgcccctgcccgccggcgcctccagctgcctcggctgcgtgtacgagaagtggccgaagaggctcaggcagcccggctggccgccgccgctcctccccccaggaaagccaaggtggaggctgaggtggctgcaggagctcgtttcacagcccctcaggtggagctggttgggccgcggctgccaggggcggaggtgggtgtcccccaggtctcagcccccaaggctgccccctcagcagaggcagctggtggctttgccctccacctgccaacccttgggctcggagccccggctccgcctgctgtggaggccccagccgtgggaatccaggtcccccaggtggagctgcctgccttgccctcactgcccactctgcccacacttccctgcctagagacccgggaaggggctgtgtcggtagtggtgcccaccctggatgtggcagcaccgactgtgggggtggacctggccttgccgggtgcagaggtggaggcccggggagaggcacctgaggtggccctgaagatgccccgccttagttttccccgatttggggctcgagcaaaggaagttgctgaggccaaggtagccaaggtcagccctgaggccagggtgaaaggtcccagacttcgaatgcccacctttgggctttccctcttggagccccggcccgctgctcctgaagttgtagagagcaagctgaagctgcccaccatcaagatgccctcccttggcatcggagtgtcagggcccgaggtcaaggtgcccaagggacctgaagtgaagctccccaaggctcctgaggtcaagcttccaaaagtgcccgaggcagcccttccagaggttcgactcccagaggtggagctccccaaggtgtcagagatgaaactcccaaaggtgccagagatggctgtgccggaggtgcggcttccagaggtagagctgcccaaagtgtcagagatgaaactcccaaaggtgccagagatggctgtgccggaggtgcggcttccagaggtacagctgctgaaagtgtcggagatgaaactcccaaaggtgccagagatggctgtgccggaggtgcggcttccagaggtacagctgccgaaagtgtcagagatgaaactcccagaggtgtcagaggtggctgtgccagaggtgcggcttccagaggtgcagctgccgaaagtgccagagatgaaagtccctgagatgaagcttccaaaggtgcctgagatgaaacttcctgagatgaaactccctgaagtgcaactcccgaaggtgcccgagatggccgtgcccgatgtgcacctcccagaagtgcagcttccaaaagtcccagagatgaagctccctgagatgaaactccctgaggtgaaactcccgaaggtgcccgagatggctgtgcccgatgtgcacctcccggaagtgcagctcccgaaagtcccagagatgaaactccctaaaatgcctgagatggctgtgccagaggttcgactccccgaggtgcagctgccaaaagtctcagagatgaaactccccaaggtgcctgaaatggccgtgcccgatgtgcacctcccagaggtgcagctgcccaaagtctgtgaaatgaaagtccctgacatgaagctcccagagataaaactccccaaggtgcctgagatggctgtgcccgatgtgcacctccccgaggtgcagctgccgaaagtgtcagagattcggctgccggaaatgcaagtgccgaaggttcccgacgtgcatcttccgaaggcaccagaggtgaagctgcccagggctccggaggtgcagctaaaggccaccaaggcagaacaggcagaagggatggaatttggcttcaagatgcccaagatgaccatgcccaagctagggagggcagagtccccatcacgtggcaagccaggcgaggcgggtgctgaggtctcagggaagctggtaacacttccctgtctgcagccagaggtggatggtgaggctcatgtgggtgtcccctctctcactctgccttcagtggagctagacctgccaggagcacttggcctgcaggggcaggtcccagccgctaaaatgggcaagggagagcgggtggagggccctgaggtggcagcaggggtcagggaagtgggcttccgagtgccctctgttgaaattgtcaccccacagctgcccgccgtggaaattgaggaagggcggctggagatgatagagacaaaagtcaagccctcttccaagttctccttacctaagtttggactctcggggccaaaggtggctaaggcagaggctgagggggctgggcgagctaccaagctgaaggtatccaaatttgccatctcactccccaaggctcgggtgggggctgaggctgaggccaaaggggctggggaggcaggcctgctgcctgccctcgatctgtccatcccacagctcagcctggatgcccacctgccctcaggcaaggtagaggtggcaggggccgacctcaagttcaaggggcccaggtttgctctccccaagtttggggtcagaggccgggacactgaggcagcagaactagtgccaggggtggctgagttggagggcaagggctggggctgggatgggagggtgaagatgcccaagctgaagatgccttcctttgggctggctcgagggaaggaagcagaagttcaaggtgatcgtgccagcccgggggaaaaggctgagtccaccgctgtgcagcttaagatccccgaggtggagctggtcacgctgggcgcccaggaggaagggagggcagagggggctgtggccgtcagtggaatgcagctgtcaggcctgaaggtgtccacagccaggcaggtggtcactgagggccatgacgcggggctgaggatgcctccgctgggcatctccctgccacaggtggagctgaccggctttggggaggcaggtaccccagggcagcaggctcagagtacagtcccttcagcagagggcacagcaggctacagggttcaggtgccccaggtgaccctgtctctgcctggagcccaggttgcaggtggtgagctgctggtgggtgagggtgtctttaagatgcccaccgtgacagtgccccagcttgagctggacgtggggctaagccgagaggcacaggcgggcgaggcggccacaggcgagggtgggctgaggctgaagttgcccacactgggggccagagctagggtggggggcgagggtgctgaggagcagcccccaggggccgagcgtaccttctgcctctcactgcccgacgtggagctctcgccatccgggggcaaccatgccgagtaccaggtggcagagggggagggagaggccggacacaagctcaaggtacggctgccccggtttggcctggtgcgggccaaggagggggccgaggagggtgagaaggccaagagccccaaactcaggcttgccccgagtgggcttcagccaaagtgagatggtcactggggaagggtcccccagccccgaggaggaggaggaggaggaggaagagggcagtggggaaggggcctcgggtcgccggggccgggtccgggtccgcttgccacgtgtaggcctggcggccccttctaaagcctctcgggggcaggagggcgatgcagcccccaagtcccccgtcagagagaagtcacccaagttccgcttccccagggtgtccctaagccccaaggcccggagtgggagtggggaccaggaagagggtggattgcgggtgcggctgcccagcgtggggttttcagagacaggggctccaggcccggccaggatggagggggctcaggctgcggctgtctgaagcccctagtcagatggggatcccttcttgccttcctttctctaccccctcgctgttgtgtgtgtgataactagcactaaccctaagagggccgggaggtgggtgactgaccagggctggcagggaggcctgctcctgtctctctggcaggagtgcctgtaccccaccaagccatgtgaataaaataatctggaagtagcca

SEQ ID NO: 404710 - DNA, 4793 bp, Homo sapiens
gccgctccagggcctcggagaggccagccggcccgcggagctgtttaaccgttccgcgggtcctagaaagccagctgccctcaggcttgcttaaaggggagacgccggagtgggtgtgccccgacgtcctgcgagggcagcgccgaggggcgtgtgccctgaaggcccgctgaacagccgcttttggccgggcgcggtggctcacgcctgtaatcccagcactttgggaggccgaggcgggaggatcccttgggcccaggaggagttcgagaccagcctgggcagtgtggcgagaccgtcccccacccccgtctctaaatatatataaacatatatatgtatatgagccactgttgagcgcaatggcgggctctgggcgaggtccggccctagagccccaacgcgacacctcgccgccctctgcaggagctgaggcgggcggagttggtggaaattatcgtggagacggaggcgcagaccggggtcagcggcatcaacgtagcgggcggcggcaaagagggaatcttcgttcgggagctgcgcgaggactcacccgccgccaggagcctcagcctgcaggaaggggaccagctgctgagtgcccgagtgttcttcgagaacttcaagtacgaggacgcactacgcctgctgcaatgcgccgagccttacaaagtctccttctgcctgaagcgcactgtgcccaccggggacctggctctgcggcccgggaccgtgtctggctacgagatcaagggcccgcgggccaaggtggccaagctgaacatccagagtctgtcccctgtgaagaagaagaagatggtgcctggggctctgggggtccccgctgacctggcccctgttgacgtcgagttctcctttcccaagttctcccgcctgcgtcggggcctcaaagccgaggctgtcaagggtcctgtcccggctgcccctgcccgccggcgcctccagctgcctcggctgcgtgtacgagaagtggccgaagaggctcaggcagcccggctggccgccgccgctcctccccccaggaaagccaaggtggaggctgaggtggctgcaggagctcgtttcacagcccctcaggtggagctggttgggccgcggctgccaggggcggaggtgggtgtcccccaggtctcagcccccaaggctgccccctcagcagaggcagctggtggctttgccctccacctgccaacccttgggctcggagccccggctccgcctgctgtggaggccccagccgtgggaatccaggtcccccaggtggagctgcctgccttgccctcactgcccactctgcccacacttccctgcctagagacccgggaaggggctgtgtcggtagtggtgcccaccctggatgtggcagcaccgactgtgggggtggacctggccttgccgggtgcagaggtggaggcccggggagaggcacctgaggtggccctgaagatgccccgccttagttttccccgatttggggctcgagcaaaggaagttgctgaggccaaggtagccaaggtcagccctgaggccagggtgaaaggtcccagacttcgaatgcccacctttgggctttccctcttggagccccggcccgctgctcctgaagttgtagagagcaagctgaagctgcccaccatcaagatgccctcccttggcatcggagtgtcagggcccgaggtcaaggtgcccaagggacctgaagtgaagctccccaaggctcctgaggtcaagcttccaaaagtgcccgaggcagcccttccagaggttcgactcccagaggtggagctccccaaggtgtcagagatgaaactcccaaaggtgccagagatggctgtgccggaggtgcggcttccagaggtagagctgcccaaagtgtcagagatgaaactcccaaaggtgccagagatggctgtgccggaggtgcggcttccagaggtacagctgctgaaagtgtcggagatgaaactcccaaaggtgccagagatggctgtgccggaggtgcggcttccagaggtacagctgccgaaagtgtcagagatgaaactcccagaggtgtcagaggtggctgtgccagaggtgcggcttccagaggtgcagctgccgaaagtgccagagatgaaagtccctgagatgaagcttccaaaggtgcctgagatgaaacttcctgagatgaaactccctgaagtgcaactcccgaaggtgcccgagatggccgtgcccgatgtgcacctcccagaagtgcagcttccaaaagtcccagagatgaagctccctgagatgaaactccctgaggtgaaactcccgaaggtgcccgagatggctgtgcccgatgtgcacctcccggaagtgcagctcccgaaagtcccagagatgaaactccctaaaatgcctgagatggctgtgccagaggttcgactccccgaggtgcagctgccaaaagtctcagagatgaaactccccaaggtgcctgaaatggccgtgcccgatgtgcacctcccagaggtgcagctgcccaaagtctgtgaaatgaaagtccctgacatgaagctcccagagataaaactccccaaggtgcctgagatggctgtgcccgatgtgcacctccccgaggtgcagctgccgaaagtgtcagagattcggctgccggaaatgcaagtgccgaaggttcccgacgtgcatcttccgaaggcaccagaggtgaagctgcccagggctccggaggtgcagctaaaggccaccaaggcagaacaggcagaagggatggaatttggcttcaagatgcccaagatgaccatgcccaagctagggagggcagagtccccatcacgtggcaagccaggcgaggcgggtgctgaggtctcagggaagctggtaacacttccctgtctgcagccagaggtggatggtgaggctcatgtgggtgtcccctctctcactctgccttcagtggagctagacctgccaggagcacttggcctgcaggggcaggtcccagccgctaaaatgggcaagggagagcgggtggagggccctgaggtggcagcaggggtcagggaagtgggcttccgagtgccctctgttgaaattgtcaccccacagctgcccgccgtggaaattgaggaagggcggctggagatgatagagacaaaagtcaagccctcttccaagttctccttacctaagtttggactctcggggccaaaggtggctaaggcagaggctgagggggctgggcgagctaccaagctgaaggtatccaaatttgccatctcactccccaaggctcgggtgggggctgaggctgaggccaaaggggctggggaggcaggcctgctgcctgccctcgatctgtccatcccacagctcagcctggatgcccacctgccctcaggcaaggtagaggtggcaggggccgacctcaagttcaaggggcccaggtttgctctccccaagtttggggtcagaggccgggacactgaggcagcagaactagtgccaggggtggctgagttggagggcaagggctggggctgggatgggagggtgaagatgcccaagctgaaggtgtccacagccaggcaggtggtcactgagggccatgacgcggggctgaggatgcctccgctgggcatctccctgccacaggtggagctgaccggctttggggaggcaggtaccccagggcagcaggctcagagtacagtcccttcagcagagggcacagcaggctacagggttcaggtgccccaggtgaccctgtctctgcctggagcccaggttgcaggtggtgagctgctggtgggtgagggtgtctttaagatgcccaccgtgacagtgccccagcttgagctggacgtggggctaagccgagaggcacaggcgggcgaggcggccacaggcgagggtgggctgaggctgaagttgcccacactgggggccagagctagggtggggggcgagggtgctgaggagcagcccccaggggccgagcgtaccttctgcctctcactgcccgacgtggagctctcgccatccgggggcaaccatgccgagtaccaggtggcagagggggagggagaggccggacacaagctcaaggtacggctgccccggtttggcctggtgcgggccaaggagggggccgaggagggtgagaaggccaagagccccaaactcaggcttgccccgagtgggcttcagccaaagtgagatggtcactggggaagggtcccccagccccgaggaggaggaggaggaggaggaagagggcagtggggaaggggcctcgggtcgccggggccgggtccgggtccgcttgccacgtgtaggcctggcggccccttctaaagcctctcgggggcaggagggcgatgcagcccccaagtcccccgtcagagagaagtcacccaagttccgcttccccagggtgtccctaagccccaaggcccggagtgggagtggggaccaggaagagggtggattgcgggtgcggctgcccagcgtggggttttcagagacaggggctccaggcccggccaggatggagggggctcaggctgcggctgtctgaagcccctagtcagatggggatcccttcttgccttcctttctctaccccctcgctgttgtgtgtgtgataactagcactaaccctaagagggccgggaggtgggtgactgaccagggctggcagggaggcctgctcctgtctctctggcaggagtgcctgtaccccaccaagccatgtgaataaaataatctggaagtagcca

SEQ ID NO: 404711 - DNA, 3872 bp, Homo sapiens
ggaggtcttgtttccggaagatgttgcaaggctgtggtgaaggcaggtgcagcctagcctcctgctcaagctacaccctggccctccacgcatgaggccctgcagaactctggagatggtgcctacaagggcagaaaaggacaagtcggcagccgctgtcctgagggcaccagctgtggtgcaggagccaagacctgagggtggaagtgtcctcttagaatggggagtgcccagcaaggtgtacccgctactggtgctatccagaattcccatctctccctgctctctgcctgagctctgggccttagctcctccctgggcttggtagaggacaggtgtgaggccctcatgggatgtaggctgtctgagaggggagtggaaagaggaaggggtgaaggagctgtctgccatttgactatgcaaatggcctttgactcatgggaccctgtcctcctcactgggggcagggtggagtggagggggagctactaggctggtataaaaatcttacttcctctattctctgagccgctgctgcccctgtgggaagggacctcgagtgtgaagcatccttccctgtagctgctgtccagtctgcccgccagaccctctggagaagcccctgccccccagcatgggtttctgccgcagcgccctgcacccgctgtctctcctggtgcaggccatcatgctggccatgaccctggccctgggtaccttgcctgccttcctaccctgtgagctccagccccacggcctggtgaactgcaactggctgttcctgaagtctgtgccccacttctccatggcagcaccccgtggcaatgtcaccagcctttccttgtcctccaaccgcatccaccacctccatgattctgactttgcccacctgcccagcctgcggcatctcaacctcaagtggaactgcccgccggttggcctcagccccatgcacttcccctgccacatgaccatcgagcccagcaccttcttggctgtgcccaccctggaagagctaaacctgagctacaacaacatcatgactgtgcctgcgctgcccaaatccctcatatccctgtccctcagccataccaacatcctgatgctagactctgccagcctcgccggcctgcatgccctgcgcttcctattcatggacggcaactgttattacaagaacccctgcaggcaggcactggaggtggccccgggtgccctccttggcctgggcaacctcacccacctgtcactcaagtacaacaacctcactgtggtgccccgcaacctgccttccagcctggagtatctgctgttgtcctacaaccgcatcgtcaaactggcgcctgaggacctggccaatctgaccgccctgcgtgtgctcgatgtgggcggaaattgccgccgctgcgaccacgctcccaacccctgcatggagtgccctcgtcacttcccccagctacatcccgataccttcagccacctgagccgtcttgaaggcctggtgttgaaggacagttctctctcctggctgaatgccagttggttccgtgggctgggaaacctccgagtgctggacctgagtgagaacttcctctacaaatgcatcactaaaaccaaggccttccagggcctaacacagctgcgcaagcttaacctgtccttcaattaccaaaagagggtgtcctttgcccacctgtctctggccccttccttcgggagcctggtcgccctgaaggagctggacatgcacggcatcttcttccgctcactcgatgagaccacgctccggccactggcccgcctgcccatgctccagactctgcgtctgcagatgaacttcatcaaccaggcccagctcggcatcttcagggccttccctggcctgcgctacgtggacctgtcggacaaccgcatcagcggagcttcggagctgacagccaccatgggggaggcagatggaggggagaaggtctggctgcagcctggggaccttgctccggccccagtggacactcccagctctgaagacttcaggcccaactgcagcaccctcaacttcaccttggatctgtcacggaacaacctggtgaccgtgcagccggagatgtttgcccagctctcgcacctgcagtgcctgcgcctgagccacaactgcatctcgcaggcagtcaatggctcccagttcctgccgctgaccggtctgcaggtgctagacctgtcccacaataagctggacctctaccacgagcactcattcacggagctaccacgactggaggccctggacctcagctacaacagccagccctttggcatgcagggcgtgggccacaacttcagcttcgtggctcacctgcgcaccctgcgccacctcagcctggcccacaacaacatccacagccaagtgtcccagcagctctgcagtacgtcgctgcgggccctggacttcagcggcaatgcactgggccatatgtgggccgagggagacctctatctgcacttcttccaaggcctgagcggtttgatctggctggacttgtcccagaaccgcctgcacaccctcctgccccaaaccctgcgcaacctccccaagagcctacaggtgctgcgtctccgtgacaattacctggccttctttaagtggtggagcctccacttcctgcccaaactggaagtcctcgacctggcaggaaaccagctgaaggccctgaccaatggcagcctgcctgctggcacccggctccggaggctggatgtcagctgcaacagcatcagcttcgtggcccccggcttcttttccaaggccaaggagctgcgagagctcaaccttagcgccaacgccctcaagacagtggaccactcctggtttgggcccctggcgagtgccctgcaaatactagatgtaagcgccaaccctctgcactgcgcctgtggggcggcctttatggacttcctgctggaggtgcaggctgccgtgcccggtctgcccagccgggtgaagtgtggcagtccgggccagctccagggcctcagcatctttgcacaggacctgcgcctctgcctggatgaggccctctcctgggactgtttcgccctctcgctgctggctgtggctctgggcctgggtgtgcccatgctgcatcacctctgtggctgggacctctggtactgcttccacctgtgcctggcctggcttccctggcgggggcggcaaagtgggcgagatgaggatgccctgccctacgatgccttcgtggtcttcgacaaaacgcagagcgcagtggcagactgggtgtacaacgagcttcgggggcagctggaggagtgccgtgggcgctgggcactccgcctgtgcctggaggaacgcgactggctgcctggcaaaaccctctttgagaacctgtgggcctcggtctatggcagccgcaagacgctgtttgtgctggcccacacggaccgggtcagtggtctcttgcgcgccagcttcctgctggcccagcagcgcctgctggaggaccgcaaggacgtcgtggtgctggtgatcctgagccctgacggccgccgctcccgctacgtgcggctgcgccagcgcctctgccgccagagtgtcctcctctggccccaccagcccagtggtcagcgcagcttctgggcccagctgggcatggccctgaccagggacaaccaccacttctataaccggaacttctgccagggacccacggccgaatagccgtgagccggaatcctgcacggtgccacctccacactcacctcacctctgcctgcctggtctgaccctcccctgctcgcctccctcaccccacacctgacacagagcaggcactcaataaatgctaccgaaggctaga

SEQ ID NO: 404712 - DNA, 3381 bp, Homo sapiens
agggcgacccccttgagtctgtagtgttcatctactccatgccggggtacaagtgcagcatcaaggagcgaatgctctactccagctgcaagagccgcctcctcgactccgtggagcaggacttccatctggagatcgccaagaaaggtttctgccgcagcgccctgcacccgctgtctctcctggtgcaggccatcatgctggccatgaccctggccctgggtaccttgcctgccttcctaccctgtgagctccagccccacggcctggtgaactgcaactggctgttcctgaagtctgtgccccacttctccatggcagcaccccgtggcaatgtcaccagcctttccttgtcctccaaccgcatccaccacctccatgattctgactttgcccacctgcccagcctgcggcatctcaacctcaagtggaactgcccgccggttggcctcagccccatgcacttcccctgccacatgaccatcgagcccagcaccttcttggctgtgcccaccctggaagagctaaacctgagctacaacaacatcatgactgtgcctgcgctgcccaaatccctcatatccctgtccctcagccataccaacatcctgatgctagactctgccagcctcgccggcctgcatgccctgcgcttcctattcatggacggcaactgttattacaagaacccctgcaggcaggcactggaggtggccccgggtgccctccttggcctgggcaacctcacccacctgtcactcaagtacaacaacctcactgtggtgccccgcaacctgccttccagcctggagtatctgctgttgtcctacaaccgcatcgtcaaactggcgcctgaggacctggccaatctgaccgccctgcgtgtgctcgatgtgggcggaaattgccgccgctgcgaccacgctcccaacccctgcatggagtgccctcgtcacttcccccagctacatcccgataccttcagccacctgagccgtcttgaaggcctggtgttgaaggacagttctctctcctggctgaatgccagttggttccgtgggctgggaaacctccgagtgctggacctgagtgagaacttcctctacaaatgcatcactaaaaccaaggccttccagggcctaacacagctgcgcaagcttaacctgtccttcaattaccaaaagagggtgtcctttgcccacctgtctctggccccttccttcgggagcctggtcgccctgaaggagctggacatgcacggcatcttcttccgctcactcgatgagaccacgctccggccactggcccgcctgcccatgctccagactctgcgtctgcagatgaacttcatcaaccaggcccagctcggcatcttcagggccttccctggcctgcgctacgtggacctgtcggacaaccgcatcagcggagcttcggagctgacagccaccatgggggaggcagatggaggggagaaggtctggctgcagcctggggaccttgctccggccccagtggacactcccagctctgaagacttcaggcccaactgcagcaccctcaacttcaccttggatctgtcacggaacaacctggtgaccgtgcagccggagatgtttgcccagctctcgcacctgcagtgcctgcgcctgagccacaactgcatctcgcaggcagtcaatggctcccagttcctgccgctgaccggtctgcaggtgctagacctgtcccacaataagctggacctctaccacgagcactcattcacggagctaccacgactggaggccctggacctcagctacaacagccagccctttggcatgcagggcgtgggccacaacttcagcttcgtggctcacctgcgcaccctgcgccacctcagcctggcccacaacaacatccacagccaagtgtcccagcagctctgcagtacgtcgctgcgggccctggacttcagcggcaatgcactgggccatatgtgggccgagggagacctctatctgcacttcttccaaggcctgagcggtttgatctggctggacttgtcccagaaccgcctgcacaccctcctgccccaaaccctgcgcaacctccccaagagcctacaggtgctgcgtctccgtgacaattacctggccttctttaagtggtggagcctccacttcctgcccaaactggaagtcctcgacctggcaggaaaccagctgaaggccctgaccaatggcagcctgcctgctggcacccggctccggaggctggatgtcagctgcaacagcatcagcttcgtggcccccggcttcttttccaaggccaaggagctgcgagagctcaaccttagcgccaacgccctcaagacagtggaccactcctggtttgggcccctggcgagtgccctgcaaatactagatgtaagcgccaaccctctgcactgcgcctgtggggcggcctttatggacttcctgctggaggtgcaggctgccgtgcccggtctgcccagccgggtgaagtgtggcagtccgggccagctccagggcctcagcatctttgcacaggacctgcgcctctgcctggatgaggccctctcctgggactgtttcgccctctcgctgctggctgtggctctgggcctgggtgtgcccatgctgcatcacctctgtggctgggacctctggtactgcttccacctgtgcctggcctggcttccctggcgggggcggcaaagtgggcgagatgaggatgccctgccctacgatgccttcgtggtcttcgacaaaacgcagagcgcagtggcagactgggtgtacaacgagcttcgggggcagctggaggagtgccgtgggcgctgggcactccgcctgtgcctggaggaacgcgactggctgcctggcaaaaccctctttgagaacctgtgggcctcggtctatggcagccgcaagacgctgtttgtgctggcccacacggaccgggtcagtggtctcttgcgcgccagcttcctgctggcccagcagcgcctgctggaggaccgcaaggacgtcgtggtgctggtgatcctgagccctgacggccgccgctcccgctacgtgcggctgcgccagcgcctctgccgccagagtgtcctcctctggccccaccagcccagtggtcagcgcagcttctgggcccagctgggcatggccctgaccagggacaaccaccacttctataaccggaacttctgccagggacccacggccgaatagccgtgagccggaatcctgcacggtgccacctccacactcacctcacctctgcctgcctggtctgaccctcccctgctcgcctccctcaccccacacctgacacagagcaggcactcaataaatgctaccgaaggctaga

SEQ ID NO: 404713 - DNA, 3445 bp, Homo sapiens
agggcgacccccttgagtctgtagtgttcatctactccatgccggggtacaagtgcagcatcaaggagcgaatgctctactccagctgcaagagccgcctcctcgactccgtggagcaggacttccatctggagatcgccaagaaaccgctgctgcccctgtgggaagggacctcgagtgtgaagcatccttccctgtagctgctgtccagtctgcccgccagaccctctggagaagcccctgccccccagcatggccatcatgctggccatgaccctggccctgggtaccttgcctgccttcctaccctgtgagctccagccccacggcctggtgaactgcaactggctgttcctgaagtctgtgccccacttctccatggcagcaccccgtggcaatgtcaccagcctttccttgtcctccaaccgcatccaccacctccatgattctgactttgcccacctgcccagcctgcggcatctcaacctcaagtggaactgcccgccggttggcctcagccccatgcacttcccctgccacatgaccatcgagcccagcaccttcttggctgtgcccaccctggaagagctaaacctgagctacaacaacatcatgactgtgcctgcgctgcccaaatccctcatatccctgtccctcagccataccaacatcctgatgctagactctgccagcctcgccggcctgcatgccctgcgcttcctattcatggacggcaactgttattacaagaacccctgcaggcaggcactggaggtggccccgggtgccctccttggcctgggcaacctcacccacctgtcactcaagtacaacaacctcactgtggtgccccgcaacctgccttccagcctggagtatctgctgttgtcctacaaccgcatcgtcaaactggcgcctgaggacctggccaatctgaccgccctgcgtgtgctcgatgtgggcggaaattgccgccgctgcgaccacgctcccaacccctgcatggagtgccctcgtcacttcccccagctacatcccgataccttcagccacctgagccgtcttgaaggcctggtgttgaaggacagttctctctcctggctgaatgccagttggttccgtgggctgggaaacctccgagtgctggacctgagtgagaacttcctctacaaatgcatcactaaaaccaaggccttccagggcctaacacagctgcgcaagcttaacctgtccttcaattaccaaaagagggtgtcctttgcccacctgtctctggccccttccttcgggagcctggtcgccctgaaggagctggacatgcacggcatcttcttccgctcactcgatgagaccacgctccggccactggcccgcctgcccatgctccagactctgcgtctgcagatgaacttcatcaaccaggcccagctcggcatcttcagggccttccctggcctgcgctacgtggacctgtcggacaaccgcatcagcggagcttcggagctgacagccaccatgggggaggcagatggaggggagaaggtctggctgcagcctggggaccttgctccggccccagtggacactcccagctctgaagacttcaggcccaactgcagcaccctcaacttcaccttggatctgtcacggaacaacctggtgaccgtgcagccggagatgtttgcccagctctcgcacctgcagtgcctgcgcctgagccacaactgcatctcgcaggcagtcaatggctcccagttcctgccgctgaccggtctgcaggtgctagacctgtcccacaataagctggacctctaccacgagcactcattcacggagctaccacgactggaggccctggacctcagctacaacagccagccctttggcatgcagggcgtgggccacaacttcagcttcgtggctcacctgcgcaccctgcgccacctcagcctggcccacaacaacatccacagccaagtgtcccagcagctctgcagtacgtcgctgcgggccctggacttcagcggcaatgcactgggccatatgtgggccgagggagacctctatctgcacttcttccaaggcctgagcggtttgatctggctggacttgtcccagaaccgcctgcacaccctcctgccccaaaccctgcgcaacctccccaagagcctacaggtgctgcgtctccgtgacaattacctggccttctttaagtggtggagcctccacttcctgcccaaactggaagtcctcgacctggcaggaaaccagctgaaggccctgaccaatggcagcctgcctgctggcacccggctccggaggctggatgtcagctgcaacagcatcagcttcgtggcccccggcttcttttccaaggccaaggagctgcgagagctcaaccttagcgccaacgccctcaagacagtggaccactcctggtttgggcccctggcgagtgccctgcaaatactagatgtaagcgccaaccctctgcactgcgcctgtggggcggcctttatggacttcctgctggaggtgcaggctgccgtgcccggtctgcccagccgggtgaagtgtggcagtccgggccagctccagggcctcagcatctttgcacaggacctgcgcctctgcctggatgaggccctctcctgggactgtttcgccctctcgctgctggctgtggctctgggcctgggtgtgcccatgctgcatcacctctgtggctgggacctctggtactgcttccacctgtgcctggcctggcttccctggcgggggcggcaaagtgggcgagatgaggatgccctgccctacgatgccttcgtggtcttcgacaaaacgcagagcgcagtggcagactgggtgtacaacgagcttcgggggcagctggaggagtgccgtgggcgctgggcactccgcctgtgcctggaggaacgcgactggctgcctggcaaaaccctctttgagaacctgtgggcctcggtctatggcagccgcaagacgctgtttgtgctggcccacacggaccgggtcagtggtctcttgcgcgccagcttcctgctggcccagcagcgcctgctggaggaccgcaaggacgtcgtggtgctggtgatcctgagccctgacggccgccgctcccgctacgtgcggctgcgccagcgcctctgccgccagagtgtcctcctctggccccaccagcccagtggtcagcgcagcttctgggcccagctgggcatggccctgaccagggacaaccaccacttctataaccggaacttctgccagggacccacggccgaatagccgtgagccggaatcctgcacggtgccacctccacactcacctcacctctgcctgcctggtctgaccctcccctgctcgcctccctcaccccacacctgacacagagcaggcactcaataaatgctaccgaaggctaga

SEQ ID NO: 404714 - DNA, 3307 bp, Homo sapiens
atgcccatgaagtggagtgggtggaggtggagctgggggccggccactcacacagccctcccacccccacagggtttctgccgcagcgccctgcacccgctgtctctcctggtgcaggccatcatgctggccatgaccctggccctgggtaccttgcctgccttcctaccctgtgagctccagccccacggcctggtgaactgcaactggctgttcctgaagtctgtgccccacttctccatggcagcaccccgtggcaatgtcaccagcctttccttgtcctccaaccgcatccaccacctccatgattctgactttgcccacctgcccagcctgcggcatctcaacctcaagtggaactgcccgccggttggcctcagccccatgcacttcccctgccacatgaccatcgagcccagcaccttcttggctgtgcccaccctggaagagctaaacctgagctacaacaacatcatgactgtgcctgcgctgcccaaatccctcatatccctgtccctcagccataccaacatcctgatgctagactctgccagcctcgccggcctgcatgccctgcgcttcctattcatggacggcaactgttattacaagaacccctgcaggcaggcactggaggtggccccgggtgccctccttggcctgggcaacctcacccacctgtcactcaagtacaacaacctcactgtggtgccccgcaacctgccttccagcctggagtatctgctgttgtcctacaaccgcatcgtcaaactggcgcctgaggacctggccaatctgaccgccctgcgtgtgctcgatgtgggcggaaattgccgccgctgcgaccacgctcccaacccctgcatggagtgccctcgtcacttcccccagctacatcccgataccttcagccacctgagccgtcttgaaggcctggtgttgaaggacagttctctctcctggctgaatgccagttggttccgtgggctgggaaacctccgagtgctggacctgagtgagaacttcctctacaaatgcatcactaaaaccaaggccttccagggcctaacacagctgcgcaagcttaacctgtccttcaattaccaaaagagggtgtcctttgcccacctgtctctggccccttccttcgggagcctggtcgccctgaaggagctggacatgcacggcatcttcttccgctcactcgatgagaccacgctccggccactggcccgcctgcccatgctccagactctgcgtctgcagatgaacttcatcaaccaggcccagctcggcatcttcagggccttccctggcctgcgctacgtggacctgtcggacaaccgcatcagcggagcttcggagctgacagccaccatgggggaggcagatggaggggagaaggtctggctgcagcctggggaccttgctccggccccagtggacactcccagctctgaagacttcaggcccaactgcagcaccctcaacttcaccttggatctgtcacggaacaacctggtgaccgtgcagccggagatgtttgcccagctctcgcacctgcagtgcctgcgcctgagccacaactgcatctcgcaggcagtcaatggctcccagttcctgccgctgaccggtctgcaggtgctagacctgtcccacaataagctggacctctaccacgagcactcattcacggagctaccacgactggaggccctggacctcagctacaacagccagccctttggcatgcagggcgtgggccacaacttcagcttcgtggctcacctgcgcaccctgcgccacctcagcctggcccacaacaacatccacagccaagtgtcccagcagctctgcagtacgtcgctgcgggccctggacttcagcggcaatgcactgggccatatgtgggccgagggagacctctatctgcacttcttccaaggcctgagcggtttgatctggctggacttgtcccagaaccgcctgcacaccctcctgccccaaaccctgcgcaacctccccaagagcctacaggtgctgcgtctccgtgacaattacctggccttctttaagtggtggagcctccacttcctgcccaaactggaagtcctcgacctggcaggaaaccagctgaaggccctgaccaatggcagcctgcctgctggcacccggctccggaggctggatgtcagctgcaacagcatcagcttcgtggcccccggcttcttttccaaggccaaggagctgcgagagctcaaccttagcgccaacgccctcaagacagtggaccactcctggtttgggcccctggcgagtgccctgcaaatactagatgtaagcgccaaccctctgcactgcgcctgtggggcggcctttatggacttcctgctggaggtgcaggctgccgtgcccggtctgcccagccgggtgaagtgtggcagtccgggccagctccagggcctcagcatctttgcacaggacctgcgcctctgcctggatgaggccctctcctgggactgtttcgccctctcgctgctggctgtggctctgggcctgggtgtgcccatgctgcatcacctctgtggctgggacctctggtactgcttccacctgtgcctggcctggcttccctggcgggggcggcaaagtgggcgagatgaggatgccctgccctacgatgccttcgtggtcttcgacaaaacgcagagcgcagtggcagactgggtgtacaacgagcttcgggggcagctggaggagtgccgtgggcgctgggcactccgcctgtgcctggaggaacgcgactggctgcctggcaaaaccctctttgagaacctgtgggcctcggtctatggcagccgcaagacgctgtttgtgctggcccacacggaccgggtcagtggtctcttgcgcgccagcttcctgctggcccagcagcgcctgctggaggaccgcaaggacgtcgtggtgctggtgatcctgagccctgacggccgccgctcccgctacgtgcggctgcgccagcgcctctgccgccagagtgtcctcctctggccccaccagcccagtggtcagcgcagcttctgggcccagctgggcatggccctgaccagggacaaccaccacttctataaccggaacttctgccagggacccacggccgaatagccgtgagccggaatcctgcacggtgccacctccacactcacctcacctctgcctgcctggtctgaccctcccctgctcgcctccctcaccccacacctgacacagagcaggcactcaataaatgctaccgaaggctaga

SEQ ID NO: 404715 - DNA, 1073 bp, Homo sapiens
  misc_feature (861)..(861): n is a, c, g, or t
agggcgacccccttgagtctgtagtgttcatctactccatgccggggtacaagtgcagcatcaaggagcgaatgctctactccagctgcaagagccgcctcctcgactccgtggagcaggacttccatctggagatcgccaagaaaggtttctgccgcagcgccctgcacccgctgtctctcctggtgcaggccatcatgctggccatgaccctggccctgggtaccttgcctgccttcctaccctgtgagctccagccccacggcctggtgaactgcaactggctgttcctgaagtctaaagaaaaatctgcagatgcctccaaggagtccgaaaccaagtccgaagtcaacgacaagcaatgatggcgatggcgatcctagttaataaaaaggggggagatgtgggctgcaagccacccaggtgccgaggcaagagaccgaggacatgagctgttccagtataataaaatctaaaacaagaatagttataccagatatagatcttagatatgattatatatgaatataattaatcattagtttgtggcaattactctttattccaatattataataatcctcgctctataatcataacctaggaaaaaccaggccatacagagataggagctgaggggacatagtgaggagtgaccagaagacaagagtgcgagccttctgttatgcccagacagggccaccagaagggctccttggtctagcggtgacgccagtgtctgggaagatgcccgttgccaggcggaccgaggtctagcggtagcgtaagtgtcaagggaaaacacctgctacttagcagaccgggaaagggaggctcccttttcccgggggagtttagaanagactctgctcctccacctcttgtggagggcctgacatcagcagggtccgcacaagtatccggaagctaaacgcttccttggagcgtgggctaaaaggcaccctcctaaccggcttatattccaatctggtacctgctcttggctttaatagcggggcaattagtgaagtctcaaagcttggttgcctaataacgggtagctggtttttttt

SEQ ID NO: 404716 - DNA, 383 bp, Homo sapiens
ttttttttactgtaagccactatctccccaccaaaagaaaagaaaagaaaagaaaagaaaagaaacccttcatactgtcaatgatttaaaaactaactcttggcaaggtgcagtgggttacatctgtaatcctggcactttgggaggttaaagcaggaggatctctgaggccaagagtttgagaccagcctgggcaacatagtcaccaagaagtgacctcttctttctgtccactgtgatcaggacaggttttctttatgtcacctatgatgttttacactgccttgttttatattcatgtctgtctctctttctatactggtctcctccagggcagaatctgaatctagtttaactctaagatgtctcaagtgaaagtgatt

SEQ ID NO: 404717 - DNA, 521 bp, Homo sapiens
caatgatatccaccttttttcaatattttgcctaaggccaccctggccctgccattcaaaatcaccttttctgtcattttggcgtttgtggtacattgcagaaccctgacttaggccaggaggccatttaggaaattattcctgacattttgttttaaattaataaaatacataaaatagggttccttgtaatagatctcacacatcaagcataagtagatcgcattatttatttttaaatgacatatgctgtagctcagttttgtagaattcaagaatatacttcatcttttgtgtaggtaatttcattcaatttcccagtcccctctttcattttggagaaataaaatttgtgttttatgtctatatatactctccaatggggcaattcaaaaataaaagtgcatccttaacactgcatttctttgcttttggcctgcactagaacttttccctcatttcaatgtagcttttgtatgggtgaatgcaataaaaaaggtaataaacttaataaatggttc

SEQ ID NO: 404718 - DNA, 488 bp, Homo sapiens
aggtggcgggaaaatgtaaaactttaaagctcatgagcggaacgcaatgcaagtcctgaaactaagagttaaatgtgagtctcagggaaaaaagctagattagcaaatcaaacatacatatgcctcatccagaacatcattcaggcatcagttcgggggctactagcagtaaagttggttttaaatgaaataaagtggaaaagtttgatatcacttccagaagtggtctgtcatcagtaagtattggtgttgagtctaaaatgaattagaaacctcccgttactcttaggattaaagcaacccggtatggagagaaatgaaagaaaaaatgtagtgttagcttgactttatgtccctttcactgaattccatatgagcctatttggcagagaaattttgtactctacaaggaaaacatcactgatgtggacagcaccaataatgtacgtcccattaagctaataaatacccagacggccgtgtgaata

SEQ ID NO: 404719 - DNA, 391 bp, Homo sapiens
ctggaccaactctccaacagagtttatcaaaatatgaagagctgcctgtgggccttgcggcacttctctaagtcaatattacacattataattctctaccaaatcttaaaatggtttcagagcttgtactgttatctggaaataagagctaggcttcaaagagatactttggtgactgcaggtctccggtagtcctaggaggaaggctaatgactctcaggcaggcatctcaagctcataaatcagtggcttgaagtgaagccatttagaatagaaaccaattaaccacaaatatcaaaaagagataaagcattcataagaaagaggattgccagctgtgcacagccatgttttcatttagctgcagtccagagtcaaactgcccttaagc

SEQ ID NO: 404720 - DNA, 380 bp, Homo sapiens
agtgtcctagagtcacgaatggcaagtgtccaggtcacacatggcacctccctcttcccttactacctccatagcacacagccactctgctcaaagttggcacgagttggaatgtaatcaccatctctgcactcaaggcatgcagaaatgaagtctacctcagccctcaaagacctcacctgagaaaaagacaaggctccaaacagaaggcaaaacagaatgagcatagaaagagaccactttttcacatacctttacaaagcactgctcacccctccttaacctcgcacagacagagcatggggcctcagtgtcactgccactgccaccctcccactgactagctgtactctctgaatttctggggctcagcttgacac

SEQ ID NO: 404721 - DNA, 786 bp, Homo sapiens
aaaagaatgaatgactataattttggcaattgcagacctattcagtgtcatttgattgaatgattgatcaggtggtagaagaggcttgagcaggccgacttgcccttcaggaatactgcctggccttcagattcaaccttattgcttgacactacttggcctgctcagtggcgctatctcggctcaccacaacatctgcctcctgggttcaagcgattctcctgcctcagcctcctgagtatctgggattacaggaaccgggcaaatctaactcagtcttcctttgatccacactggatgagtgaactgcatagatggggttttgctatgctgcccatggctggtcttgaacccgtgagctcaagtgatccatcatgtgcaccactgccccaggtgaactttttacataaagtataagaaaacagattcctcctctcaatgcctacaggaatcccctctgatcttctaactggtaaagtactaagttaaaaaaacctcttagccctctgtctctccaagttgggtagtattaaatatatgaatccatttttagcctgggcagcatggtgagactctgtctccatacacacacacacacactacacacacacgcacacacacacacgaagctggatgtggtggcacatgcctatagtcctagctactcaggaggctgaggctggaggattgcttgagtccaggagtttaaggttacagtgagctatgattgtgccactgcactccagcctgggaaacgcagcaagaccctgtttgttaaacacacac

SEQ ID NO: 404722 - DNA, 822 bp, Homo sapiens
aaaagaatgaatgactataattttggcaattgcagacctattcagtgtcatttgattgaatgattgatcaggtggtagaagaggcttgagcaggccgacttgcccttcaggaatactgcctggccttcagattcaaccttattgcttgacactacttggcctgctcagtggcgctatctcggctcaccacaacatctgcctcctgggttcaagcgattctcctgcctcagcctcctgagtatctgggattacaggaatggggatctcactatgttgctaggactggtcttgaactcctggacttaagcaatcctcctatctcggcctcccaaagtgctgggattacagagatggggttttgctatgctgcccatggctggtcttgaacccgtgagctcaagtgatccatcatgtgcaccactgccccaggtgaactttttacataaagtataagaaaacagattcctcctctcaatgcctacaggaatcccctctgatcttctaactggtaaagtactaagttaaaaaaacctcttagccctctgtctctccaagttgggtagtattaaatatatgaatccatttttagcctgggcagcatggtgagactctgtctccatacacacacacacacactacacacacacgcacacacacacacgaagctggatgtggtggcacatgcctatagtcctagctactcaggaggctgaggctggaggattgcttgagtccaggagtttaaggttacagtgagctatgattgtgccactgcactccagcctgggaaacgcagcaagaccctgtttgttaaacacacac

SEQ ID NO: 404723 - DNA, 149 bp, Homo sapiens
gatccacactggatgagtgaactgcatgtgggtgtcagaactcagtgcttttgtactgaggctgtcaccttgttacctgagggctgccttaaatcctcaacctaatctcagctgttgcctctggcattccctggttattagtttcttgt

SEQ ID NO: 404724 - DNA, 363 bp, Homo sapiens
atggccagagattgatagaaaagaaaaatataaattacatacctggcttaacagttcttacaaagagtatattagtatgctagtgccacaatactttaaacttttttcctagaacaatgttttcctacttcctgatgaaaaagactcccataaaactctttgataaccaccatcctctcctccagcattgctgctcaactgaaatcccactaataaaacaacttgtgtcattctttaagggcaagactcaaaagactatttcttgggaggtatatttattgccttcaattcatgtggaagtataaaggactgatagatcctttttttttttttaacaaagtacatttaacaggaaaagagata

SEQ ID NO: 404725 - DNA, 769 bp, Homo sapiens
tcaactacttagcacaacaattcaatgcaataagtacaaccagactcattttcaaggtaagaaatcctaaggtaaaagaaaggagaacatagacaaatatcagaaagatataaaatggcccaatcagaagtcccaaaacagttgaagaggaccccaaattctagtcttcaatctggaataactgagtgccttggcaaaccaccccacttccccagatcttagattccctacgtgttcaataagtgacttgaaccagagagctctgaaggttgcttccagcctttacgaacaaataaatacatctagattttctattctaggacttagccccatcaaaaaacatcacaagccagatcaggataagacaagaaaagaaaaaaaaaaagcttaaaataagaccattccagaaaaactttatatcaagtttactcttttacacagaaaaggagaatggtaattattcaatcagaaaaaaagaaatgatgattattcgaataagataccactgaaaactccaacaaggagagaaggatttttgcttcaagtattttgtgattactgacaatagttatgttctctggtctctgtaatgagaggcatctgcagcactgtttgtgcccttggagggcagaaaggtggcactgccaaggggctgtcactctactcctcctttgtctttgtatccacctcctaaggaacaaagacacagtcattgccctcaggccctcagttaccttcactttttcccaggattaggtaacacctgcag

SEQ ID NO: 404726 - DNA, 567 bp, Homo sapiens
gcaaggagtgcaattttttgtgcttttcccatcaattctgataggtccttttgtttcccttgagcaacagaggccattgatcctgccccgttgaggtcagtttcctctctttctgagcctgtccgaaagtcaggggtcaagctcagccttgtttgacccactgacctttctgagggggccaccttttgtaagcaaagtcaggctttgactaccttaactgggatcccctcttacgaatggcaaagttattttgcggtgtttgctttgggtataaggaaagaacttttctcttcctctcttttcctcttgtggtttacttttggattacttaaataaatagcttgaaaatgtcccgttaagcatccaaagagtgctaatgcagcacaccatgtttatttatatgctttccaccctgtgtactcccttcacctcacagtttaaggcaaagtaatgcatttctttttcctaatttctttcacttctggaaagaatttttgccaggagcaaaaggagctgccttcaaattttggtcagatggtgaagatgcttaaatgatcatctttgttg

SEQ ID NO: 404727 - DNA, 228 bp, Homo sapiens
aatatttgaccttccagcctcttagcatcagctggtacttccttcttttctcttcctgagccatgagtcatgcttcatcaaaagtttcccaggctcctgaagtgaaaatgacaaatcagtgcataagagtgataggaagagaagtacaagattgtattagacagtatagaacaaaacactttgcagaatgaaaaattgcagagtgctgacacttgttctacagaaagg

SEQ ID NO: 404728 - DNA, 505 bp, Homo sapiens
gcatttcttaaagaagcacggtgcggggtggaacccaggagagtgactttggttcccagctgtgtccctgagtcattatttggccttggcaagtcccttcccttctttgttttcccatctccagtgtcttgtggtcttaagtccttgggttagaattaactcaacagctcatagcatgctttcgcctccattcgtcctcactaaatagactgggggagctgaggacgcaggcactctgctagaggccaggcctctcttccaggcctccagctggtatgcaccttccttcaggtaccccagagcttgggtcatggcccaagtatttcccagagaggaggaagagtatgttttaaccttcccttccaaccttttttggcgctgtgcatggtggcacgtggctgtaatcccagctactcaggaggccgaggcgggaggattgcttgagctcagagttgttcaagtccagcttgggcaacatagcaagaccctgtctgtaaaaaaaaaa

SEQ ID NO: 404729 - DNA, 507 bp, Homo sapiens
ccaaagtaggaccgtttctccaggttcatggctcgcactgggcaaaattgagacccataatgtagtttggaatgagacctctagaaacctgaatttccgcaaatctgaggaatctcttgaactgcagaagtgagctactccttcttatcatgagctagcatttcttcttgcgtgaagaaaatgcacaggtttctctctcaagtcaacatatcatcccctcaggatgtacctcccaaacatccccttgccataggccataactagggttaaatcacagtaagagaagaaagtacagaagtaggcgcacagatagaaatggagatgacaagaccctgaaactatagaaggcaggtgtcagcatttgactgtcagcagccaggtggattgaattactgtaatgagccccaaggaaacctgacaacagagagctatggaaatcgttaacagaatgtgttgccaccttactcctgagtaaaacagagtacttctcaacatgtgccatcagaa

SEQ ID NO: 404730 - DNA, 323 bp, Homo sapiens
ttgagtcacaaggtggcagagtcagaacctactagtctagggatgtcagtttacagctcagtacccaaggtccatgaaagcccagtgaggagcctgaagttgcacagctaaaggaagggctgggactcgaactcatggctctgtggttcagtcctttggctaaagggtccatgaacgccacccacaaagaatgtattgaatgttttgcttctgggctctggaggcatccagggtagctggggggttccctgccagtgaggagggagcaggcactggcacaccattcctcagtagcccgacctcattcaatctggcaggtaggt

SEQ ID NO: 404731 - DNA, 724 bp, Homo sapiens
atgctgtgtatttacttgaactcatacatcagaagatagtgatcttaacacgtatttcaattcttatattgtgtgctggtgataagcaaaagttgtggcttttttcttaagagggaattgtttagaattctgcagcctatataaatattatgtttgggaagtttaaaatatctcttccaaatgcttgatgaaaaaggtgggaggatcacttgagccagggagttgaaggctgcagtgagccctgtttttgccaccacactccagcttgggattgattcctaaagactcatgttacgtgaggaagcagctcagaagaggaaaggaaaggagccaggcatggctcttcctcagggacgcttgactttccgggatgtggctatagaattctcattggcagagtggaaatgcctgaacccttcacagagggctttgtacagggaagtgatgttggagaactacaggaacctggaggctgtgggtagagtctcactttgtcacccaggctggagtgcagtggtgtgatcctggctcactgcaacctctacctcccagatatctcttccaaatgcatgatgaaggaggtcttgtcaacagggcaaggcaatacagaagtgatccacacagggacattgcaaagacatgaaagtcatcacattggagatttttgcttccaggaaattgagaaagaaattcatgacattgagtttcagtgtcaagaagatga

SEQ ID NO: 404732 - DNA, 657 bp, Homo sapiens
agcggggaagcggatcgggtggagtgtaggtcatatcgccgcgttgactagataacgaaggacaatgcatatatacaaaattgctgtattgcctggtgatatgcagctgtacctgtgacatcataattgcaccctccgacatgatatctcttccaaatgcttgatgaaaaaggtgggaggatcacttgagccagggagttgaaggctgcagtgagccctgtttttgccaccacactccagcttggagaggtgaggggctgtcctctggatggcaattgatgaaggatgagtctgtgccctgaaggggagatcagtccagcccagctccccactgctgcctcgtgtgtggtggcttctccaggagagaggattgattcctaaagactcatgttacgtgaggaagcagctcagaagaggaaaggaaaggagccaggcatggctcttcctcagggacgcttgactttccgggatgtggctatagaattctcattggcagagtggaaatgcctgaacccttcacagagggctttgtacagggaagtgatgttggagaactacaggaacctggaggctgtgggctgaagtgcaatggcacaatctgagttcaccgcaacctccacctcccggattcaaatggttctcctgcctcagcctccc

SEQ ID NO: 404733 - DNA, 391 bp, Homo sapiens
agcggggaagcggatcgggtggagtgtaggtcatatcgccgcggattgattcctaaagactcatgttacgtgaggaagcagctcagaagaggaaaggaaaggagccaggcatggctcttcctcagggacgcttgactttccgggatgtggctatagaattctcattggcagagtggaaatgcctgaacccttcacagagggctttgtacagggaagtgatgttggagaactacaggaacctggaggctgtgggcagagtgagtctccatctcaaacaaacaaaaaataacaaaaaaagacctcaaaaatgcttttcttctcgtataatggacttccttctttttctttctggttcctcttcatttctctctttattttttatttatttatt

SEQ ID NO: 404734 - DNA, 427 bp, Homo sapiens
aagtaaattttgtttaaaaaatccacgtgaattaaaggaaaggaaatgaagaagaagatcgtatcaatacgatgatctaaatcagtgttctgcaacttttctacccagtcatcagtgggagtgaatcagtaggaatgtggggaagggagtgaggggagacccccttcttgactcagcagtggtgacggtcggtgtgtcctgcagacctgaagccaagatcaagggcgcttgagcaccaggagcccccgcagttcctgaatgaccagcggagggcaggtgccagcctgtggcaaaataggaaagaaaaggacaggatggggacttcaccatttttttcagccttaaattgttccttaaaccttcatgtccttttctctaatgtatgttcttgtttggtaaaataaaaaagtttgtaaccctgaaatct

SEQ ID NO: 404735 - DNA, 476 bp, Homo sapiens
tgcctgcctccggcccctctggagccctgggttatgtgaaagcagccgtgccaagctggcccatgggcggggctgagtcttcctggctggcttgtgacatgttcttgacgtactgtgtggtcaacgaagctggaactgggggggctgaacaagggccaagccttgcacttcagcttcctgacctggcagccattcagagagaccctgctaagtgctatttcctaaatacactctcttttcataacaatcttaccacattgctttcctttacaagcgctcttaaaacaagagaactggactccttctggttaatctacacagactacatttggaaaccatcagaaactgaactctaaacaaaacgttattaatgtgttgtaatctgccctctatgttgcagatgaaaagaaaatgttttatagttttggagcatacgttttaattgccttttaagagtgcatatacttttagtactt

SEQ ID NO: 404736 - DNA, 684 bp, Homo sapiens
tggttccccagaaataataggtcccccccaggggcaggggctgacaatacggctgccttacccgccatacataaagttttatttttttggcccgaatgagggagcctcccgaaggattaaacgacgccccgatcctcaccggacctcaactaaccctaaaaaatgcacacctcaggagtctacctgagcattcaggcagcactgacaatagttatgcctgtactaaggagcatgattttaagaggctttggcccaactgcctcttgcaggctgagtccctccatgcaaaagtggggctaaatgaagtgtgttaaggggtcggctaagtgggacattagtaactgcacactatttccctctactgagtaaaccctatctgtgattcccccaaacatctggcatggctcccttttgtccttcctgtgccctgcaaatattagcaaagaagcttcatgccaggttaggaaggcagcattccatgaccagaaacagggacaaagaaatccccccttcagaacagaggctttggggtcctagcccagtgcttctccaacactgaagtgcttgcagatcatctggggacctggtttgaatggagattatgattcagtgggttgggggcagagtttctgcagttccatcaggtcccccccaggtgcaggtgctgacaatactgctgcctta

SEQ ID NO: 404737 - DNA, 176 bp, Homo sapiens
cttcatctgtcacattttgacgctctctgcgttgaagacttcccaatggactcattaaatttcccattcaaagctcttcatttatcactatcatggtagcaagccaaccaaagagagacccattcactttgtctctgatcttccgagtgtaccagcaaagattccggctttgaatt

SEQ ID NO: 404738 - DNA, 405 bp, Homo sapiens
gagcacaaaatgaagttggtgattcatgggcagcagccacttgaaaatatgaacactcctgcgtccccagccccgccggcctttcacacccatttggaggcgtgttgagcagagctgctagcctgctgcatcctagtctgcatgtgtttgggcaggatgtgaggacaggccggttctaccctgacaaggagcctgcaaagggcagcagcacacctgggagcactccaagaacgtctgcccaccccccgagaggcctcggctggaacccagggcagggctgagtaagaggtaagccccgagaggacctgcggtcacagagaaaggacacttcctgctcctgccctctgtctccaggggcgacgctggcaacagagcagctttctgatgacgcttgttctgctgaac

SEQ ID NO: 404739 - DNA, 570 bp, Homo sapiens
gagcacaaaatgaagttggtgattcatgggcagcagccacttgaaaatatgaacactcctgcgtccccagccccgccggcctttcacacccatttggaggcgtgttgagcagagctgctagcctgctgcatcctagtctgcatgtgtttgggcaggatgtgaggacaggccggttctaccctgacaaggagcctgcaaagggcagcagcacacctgggagcactccaagaacgtctgcccaccccccgagaggcctcggctggaacccagggcagggctgagtaagaggtgaagtggcacagtaacgcattccaggaggacatcgctgagggccccaattgtgaggacattgcccatcaatcttggagcctccacaccaagctgggattctctctcttctggacttcatagccttctgagaccgcactggggatgtctggctgagtctaaattgaattattaatctactcctgtgtgcccgtgtcattttccagacaaccagtttattcatgactcgcccactatcaatttcaacatgcaatttgcaatgaaatttgactgatcagcaat

SEQ ID NO: 404740 - DNA, 963 bp, Homo sapiens
gagcacaaaatgaagttggtgattcatgggcagcagccacttgaaaatatgaacactcctgcgtccccagccccgccggcctttcacacccatttggaggcgtgttgagcagagctgctagcctgctgcatcctagtctgcatgtgtttgggcaggatgtgaggacaggccggttctaccctgacaaggagcctgcaaagggcagcagcacacctgggagcactccaagaacgtctgcccaccccccgagaggcctcggctggaacccagggcagggctgagtaagaggtgaagtggcacagtaacgcattccaggaggacatcgctgagggccccaattgtgaggacattgcccatcaatcttggagcctccacaccaagctgggattctctctcttctggacttcatagccttctgagaccgcactggggactgggctcactcttctgaagccatagctgacctaagcgacccacctgggcttttaaggtgggctacattcccccaggcccaggaactacaaatgggaggccaggagtgctatatgccgcagccagaggcgtctgtgctccaaaaagtcttctgagtgggcttctcagcagtggatgggaacgtagggcagtcttctcctccccacaccactcaaaactgcaattttacaaaccaagaattaaagcctggaatactcagtgtcctgtggtctcccaaagtgggaggatcctaaagcaggacgggcttcccttagaagccaggcatattggcaggaggtacccaggtaaacaagcaaccttggggcaatgttaatctgctttttctcttcttcggtgtctggctgagtctaaattgaattattaatctactcctgtgtgcccgtgtcattttccagacaaccagtttattcatgactcgcccactatcaatttcaacatgcaatttgcaatgaaatttgactgatcagcaat

SEQ ID NO: 404741 - DNA, 519 bp, Homo sapiens
cccttaaagccttcagctttagaatgaaagactcaaactcttctctgggatcttaatttttatgtggcttcttattacttttttatcccttctaaaactctaaatcccttcaacatagctttggccccttccacagctgaactggcagcaggctgatctttttattggtgggtaatggatttagtttgattgctgacacgggaacaatgagaggataaacaattccatttgtggccatgaaatttcccatctgttgagtgcgttcaggactgcagagcactgggcagagacagatgaatgagcccgccacgcctgatgttaaggacatccgtcatacaagctgaacatgtggcttcataaatcaacagctaatagcaactctggttgctcctgtcattaacaagccatccgtttaaatacataagagtttgccataacattcagcctagagacctgacttgcaattctgatctcaccaaaaaaccagaagtagtaaagaaagccaaaaaagcataagta

SEQ ID NO: 404742 - DNA, 535 bp, Homo sapiens
ctagtcatcgaagttatgactatctagggttttgtttccttttattcctttaactctgtatttctttctatcagtgaagtttgtttttaaaggtacctggggcagggaagcagggtggagatagagcccctccttgcctggagcctacagtaaggagccaggttcaggaggagtggattccttggttgacttggccatgcagaaatagtcttagactcccccaggatttaaaataggattgaaacaagaagtttaaaagagcagaggaggaatagagatacttagtgccaataaaaatatcatggagacttcttcggctttttaaaaaaaatgcttaatccattattaaaataatgattgactttattttatagtaatatgtgataatatgaagttaggatgacttgccatttcagatttaaaatacatattaattaagtgactactatgttgtgattttgaataatgtttaagtttctatattgattgtatgcctggtataataaaggaaaagactgccttattgtccccttta

SEQ ID NO: 404743 - DNA, 731 bp, Homo sapiens
acaagcacccccgaggggttctgatggaagtactggctgctcacaaatccacccttcctccaggtaccctgccaccccaaccccactggagtcaccaggtctaaggcacatgggagagtttgcctctcacccctcctcctttcatactcactctgccccctgctctggtccaggccctgttctcttagctccctggtctcccccagtccatgacttataacactgccaagaattttctctctaaaatatcaatgtgatgatgccctggctcctaagccgccaggattccagactgccttcaggcaaagtctctatctcttgagcggaatgcagaacttttcctgctcttgcccctaaatcaccagtccagcctcccctcccattctctagccccttcccccaggcagctgtccgagggtctccctagcccccaatccactggaccttctcggtgaatgcgtccgacggacgcatacagactggtccacgtgggcttgttagcaggcagaggaaccctgctttccaaaaactgatatagtccagagtcacggcatgtgggaatgtttccatggacactggatcttaacagatgctatagtgtttacaaaactacacacacagagaaagcccaaggaagcctgcaggctaagcccctatgcttttagagggctgaaggaaccaaacctagtttactcctgtgtgtttgccccatgcaaaacttatgggagact

SEQ ID NO: 404744 - DNA, 443 bp, Homo sapiens
aaacattagcacttaacctcagtcaggattttgtctgtgaaacaggaaaaatagaagagaagtcagatttgatctgcattctgaaaatgagaatttttttatatttaaactcctcttattttgtattccttaatgttcttattaatcattcatatcaaatggcttgtctttctttcagagccttgaacattttaaagacaccatgtcattctttttacaagagagagaaaaaattacgcagttgaaagagttcccaagggagctattgtgctacacgctggcaaaagttttattagctaaacttctgactgaaaggaaaaataaattcaggtttaggaacggcttctatttattgtaaggaagtttacaaaaattactgaaaaatatcccaagaacacaatgtaaatttactctggtggtattttttccatccttgcttctcc

SEQ ID NO: 404745 - DNA, 422 bp, Homo sapiens
ctctgtcccccaccaagaaattgatttctgccctgactggcttgggtaggcattctaggtcatccactgtctgaggtcaatttggaactgatgaagaattcttagagtgaggtgacaggataaaacaccaaagagattcagaaagcctgggttctgatcccattttggccaccgtcctctcaattctttcaacaaggatttattgaacatgacaggcatgctccctgccctcacaaaacttggagtctagcaccaatttgctgggtagaattgagagagtcattttgcctacttcattcagacacctacacacatatacacactcaacttccctctatcatgccatgtccccttttaccatctagactttggacacgctgttctgtctagaatacgctttccttattgtatatagctaatgc

SEQ ID NO: 404746 - DNA, 707 bp, Homo sapiens
aaatcatgattttgcatccattaatgaaataatggatctgggcagaaagcattgatggctggggaaaattagatggagaactttataatggagaaatcaggctgatgctactcacacttcagtcaatctgatcactaaaagtgggataatgaatcagtgataaaatgacatttttgagacaattggggattttgaatatggactaagtgttagataaaatgatgaagtgatatcttaaaaacattcagccaaaagaaaaatttggaaaaagatgtgaaaacagcttgactctttggggttaatgttgaagggagatgattacatagcaattcattgtaccagtctttctacttttctatatatttttaaatctcaaaaaaaaaatcttaaatgtaaggtcatagaaaggaagaaataacaagaaaagtttgaagaatcaatagataaagaagatgaaaaccaagaatggtatcaaacaaactaatcaggaaagaatataaggaggagcattcagcagtatgaaatccagcagaaaaattcaggaaaaaaaaacaatttggggggtgaaagactgagaacagtgaaaaaagattgctgacagcaaaaagaggctattaattgagagagtgacctttgagatgttgtagaagggggtcaacaaactatgatccatgaggtcaaagctgctgtcatctgtttttgtaaat

SEQ ID NO: 404747 - DNA, 700 bp, Homo sapiens
actctgccacaaccactctctagaacctggaattctggaaggtactagctcactactaacatattggaatgtagtaagttcctttccccttttctccctcccttacatttcaaagcacttttttttcgaatcctcctgctactggcaaaatgtggtgcaggagttccattaagagacagctgcaggccgggcatgatggctcatgcctataatcccaacacattgggaggcagaagcgggtggatgacttgagctcaggagttggagaccagcttgggcaacatggcgagaccacacctctactaaaaatataaaaattagccaggcctggtagcatacatctatatagtcccagctactcgggaggctgaggtggggaggatcgcttgagcctgggaggcggagagtgcagtgagctgagattgcaccaatgctccagcctgggtgacagagcaagattctgtctcaaaaaaataaataaataggccaggcgcagtggctcatgcctgtaatcccagtactttggggggccgaggcgggcagatcacctgaggtcaggagttcgagaccagcctgaccaacatggataaaccccatcttactcgggaggctgaggcaggagaatcgcttgaacccgggaggtggaggttgcagtgagccgagatcgtgccattgcactccagcctaggcaacaagagtg

SEQ ID NO: 404748 - DNA, 644 bp, Homo sapiens
accaggtggggtctgtgcccacatcgcacactctgaccccaggccctggcattagctgtatgtcaccttgtcactcaggcccttgctcgaagccccaaagtaggagtccaacgctgacctgagaatcagcacgcggctgccccctgctggttaccaacagagttcccaccgtgaggataaggcagtggctcagagccagggtgacccactcacagccacatagccatggggagacacctggtctttctgtacccaccagacagggccaccgggtcgaatcttgccttcctcagacaggtttaatcccaaacacaggcttccacgatgccgtcaaccatttagtcggccaacatgccccccaggacggcagggaccctggcatcagcagggcatgaggagaggcagccgatggacctctcaccctgggaagacacaaacgtgagccatcacagccaccatgaagatgactgggccttgtgctgacctcccagagagcagatgagggcggccaagggccacttacgcacagatggaaaaaccctgtcccccacatggcccaacattcagtttggtttaataaatcctcacagaggccgggcggggtggctcaagtctgtaatctcggcactttgggaggccgaggt

SEQ ID NO: 404749 - DNA, 628 bp, Homo sapiens
tgcattcagcaaggttgacagataaaatatcaagatagaaaaatatattggatttttgagcaatattaatgggcaaattgaaaatgaagttatgaaacaatttcatttaaatatcttaaaaagaaataatgtacttaagtataaatataacaacagaagtgtggaacttatactctaaaaactacataacattgaaagacattaaaggaaactaaatggaaagacattaaatgttgatattttgaaaagatttaatatttttaggatggcagttctcccccaaattgatctaaaataaatttcctactaaaatcacagctaaattctttgcacaatttgacaagctgctcttaaaattaatatggaaattcaagggacccagtatagccaaaacaatcttgaaaaagaccaaaattgtgtttctcacttcccaattaaaaaacgtatgatgaagccataccaatatgtagttctggcataatgatagacatatctattaatggtatagaattgagaacagaaataagtcttcacatttatggtaacctgtctttctataagtgtgccatggcataaagaatagtcttttcaatgaagggtactagaacacctgcccatccatatggga

SEQ ID NO: 404750 - DNA, 436 bp, Homo sapiens
aaagcagagtttattgctatttgccatgctgctagtcgttatactatcgtggtgctttaaaaagaagaatactgacctgtggtctttccttaacatagatagcaaaaatatctaaaaacaaaaaaaaaaaaccaaaacctcgtgccgaattcgacacgaggcctcgtgccggcaaaagcagtgcttatagagaaatttatagaactaagtgcacacattaggtaaaaaatatataaagaaaattacttgtgattctacttttaagaaactacagaaagaagagcaaattaggcctaaaccaagcaaaagaaaagaaataattaaaatgaaagcagaaatcattgaaattaaaaacaggaaaacagtagagaaaagtcaataaaaccaatgttggttctttgaaatcatcaaccaaattgataaacctttaaccaag

SEQ ID NO: 404751 - DNA, 693 bp, Homo sapiens
ttccagaagtttttaggctgacactcatggctttcaatacatgcaataatagtctgttgcccatcgatagtttttagcataaacagtacagaagccgttggaataatggtctttcacataggctcttaaagcactgtcacaggattctctccaagacttcagacctccatctacttgttttggctgggggtcacttgcttttttctataagtgatcaaatgtaaaggaaattttgtttcttggatctaaaactctgctattacccaggtcccccatgctctgtaattatgacctgatcttcacatccttccatcttcacgggtgtgaactgatccatgttataatgggcaaatgcacgtgctgccctttccctgaggagactgtcattattacatagtagccgaatatcactgaatacttcattaaattctcctgcgggtgcatgagtgatgaatttagcagctatgcataccttctccttatccaacacacaatcattgaagttggccatcttgggctgttctcaacatttatattttgacacttaaaaaagacgattccttaacgtgtctattgttaatcgttctgcaatgaacatgggagtgcagacatctcttagacaaactgtttacaagtcctttgggtaaatcccacaaacaggatggctggattatatggtaattctatttttag

SEQ ID NO: 404752 - DNA, 513 bp, Homo sapiens
attaatatactgtgatttatttcaaaaataataagggatgggaacagggatgggatatagatggaataggattgaccactgttgaaactgggtgatgggattctgtatacttttgtatatgttagaaaatttccataattaaaagttgaaaagaataagtaaaaagaaattcaagaatgattccaatttctgtgtcatttagatttgaaacatcaataatcttttgtggagaagaaaagtcctctgatttttcaggagaaaaaaaagttgggagaaagagtttacaagtacaacagcacagtaaaagaactgaggtaaataaagatttggaaatttttcttttaccttcaaatattttccttagccctcaaacattcccttaaattttttagtccaagtgttgaaatgtcacagtcttaaatatcactacctggtcttgcttctcctcttctgttcttaattctcctttttcttctccttaaaaaaaaaatagaacaaggaatcttttcagga

SEQ ID NO: 404753 - DNA, 274 bp, Homo sapiens
ccgctcggtacccactttcagagtagctgggactacagatttgaaacatcaataatcttttgtggagaagaaaagtcctctgatttttcaggagaaaaaaaagttgggagaaagagtttacaagtacaacagcacagtaaaagaactgagattatccctccttttctgaagctgtcaaaggagaaggtgacaaggaaagaaaactctttatgcaagttgccgaatcagtacagcgttcacaagacttcatcacctctttgtacatcttctgcaa

SEQ ID NO: 404754 - DNA, 492 bp, Homo sapiens
aacctgattctgattcagttgaatgcaccaagatgatatgcagtctgaataaaccattaggtatcaatttagtcacgtttgtgatcaaattgaattaatgatttaaaaaaacagccgttctcaaagtgtggtttttttggatccttcaaggacctcaagactctctcacgattgaggtctttagatttcacttaaactaatcatcatgaaactatcagccgggccgtgactgatgcctgtaatcccagcactttgggaggcggaggccggcggatcacttgagcccagcccaggcgttcaagaccagcctgtgaaacacggcaaaacttcatctctacaaaacatacaaaaattagccaggcatggtgtctcatgcctgtaatctcagctactcgtgagactaaggtgggaggatcacttgagcccaggagctacagtgaggcactgcaccactctactccagcctgggtgacacagcgagacactgtcttt

SEQ ID NO: 404755 - DNA, 214 bp, Homo sapiens
ttataaaaatttttactattacatatgttgaaaatattttttctagtttgtgccttgttttttatctttggccataagatctttgaaaataccaaagtataaaaattagccaaatctgtcaaatgttttctttatggatttcagattgcaatttatttaaaaaggctttttaatttcaagactattaaaatatttcaattttttctctaatgtg

SEQ ID NO: 404756 - DNA, 504 bp, Homo sapiens
taaactataaaatagatgagatgagctgctgttgatgtgaaaaatattaagtgttggctgagatttaggaacatctaaatctaaacgactttcgtgacattcttggacattgggattgaggaggtgtctcacctgggagctctctttgcactatgatcaaaatggagtcttgccagctgcccagggtaatagccttgaacgtctcttccttggtgagcgatgaatatactagagcagaaagtgaggaggtgagaagaaagccattcttacaattagttcattccagaagaatgccagctgcggcataatacaaaacgtatttggtctttgtccccagtttctggcactgagcccctaaaacccatggaatttcctgataagggtctttttcatgcataaccagcccttttctaccatagctgagtgtatgggcctcgcaggcctccctcctcccaccacaacctcccgcatctgtaataaaatgttatttatgttcaggaaaaa

SEQ ID NO: 404757 - DNA, 498 bp, Homo sapiens
ctttccactggctgagcttccccttggccaaggtcaaaatcacctcctacttccagcatcttacattccttgagtctaaaagagataatgttaattagaatttaaactgataaaagccattttgacatttttaaagtgtccctttgctaatattacttgttatagaggacttggaaaatatgaaaatgtttaggctgggcgcggtggctcacacctgtaatcccagcactttgggaggccaaggtgggcgaatcacgtcaggtcaggagtttgagaccagcctggtcaacatggtgaaaccttgtctctactaaaaatacaacaacaacaaaaaaattagccgggcgtggtggtgcatacctagaatcccaactacttgggaggctgaggcgggagaaatcgttgaagcccaggaggctgaggctgcagtgagtccagattgtgccactgctgtccagcctgccttcataacagagcaagactctgtcttaaaaaaaa

SEQ ID NO: 404758 - DNA, 468 bp, Homo sapiens
gatatctcctgcaagagatttctgatacaatttagtaaaatgtagtttttaggggagatcttttacagaaggaagcttttatttccaaaggacttcatgaaaggtgtaaaggccacactatgaattagggatgacacaccctgttttgaattggatttcctgctagttctgatccgaggcattcttcccggactagggtgaattcagttccagtgtttgcttgaaaactgaatctggtcattgtatttgcagtttggcttcctgcctgctgttaaagtacagagcaaacttcagctagttactccctatgattctgtgtcctcctaaagagcagggaaagaagagggaaaaacccagggggtgactgagttcatttacatgttgtgccaaagggcagctgcttgctgccttgtcgtcacaagattctgtggagaatcctgatagtccatttaccagaataggagcctg

SEQ ID NO: 404759 - DNA, 895 bp, Homo sapiens
gcgggcagtggcagtcaggcctccccgctctgtgctacctgcggcccggctctcctccgcgcccccactcgcgctgcgatgacgcgctcactgttcaagggaaacttttggagtgcagacatcctcagcaccatcggctatgacaacattatccaacatctgaacaatggccgcaagaactgcaaagagtttgaagactttctaaaagaaagggcagcaattgaagagaggtatggcaaagatctgctcaacctctctaggaagaagccgtgtggacagtctgaaatcaacaccctgaagcgggcccttgaagtcttcaagcagcaagtagacaatgtggcacaatgtcacattcagcttgcacagagtttaagagaagaggccaggaagatggaagaattcagggaaaaaaaacaaaaaacacaacaaaaaaaaaaactttttgggggcgctcgggcccccagaaaaaattttttaaaccccattctggttggggggcgggggccccgggttaggggaccatgggccaaaccggggttccacaagaagaaccgggcgaccgatacactagggcgctgggcttcctcaccaaataaaaagcgcgggggggaacacgagcgcgttcggaagcaaactccggagggaggtcggggaggcacaacgggacctatccaaaagggatcccgaggagccccgaataataaatcccgccgcccggcgatgataacgcagagcacaagaaaaggacaacagagaacgcacgcaccagcagcagaaagaacgaagacagactaagtcacgacggactacgcgcaacgcagacgacaacgacagacaccagaacacgacgaacacacgcaacagacactgcactacgcacgaatatacacacgat

SEQ ID NO: 404760 - DNA, 742 bp, Homo sapiens
gcgggcagtggcagtcaggcctccccgctctgtgctacctgcggcccggctctcctccgcgcccccactcgcgctgcgatgacgcgctcactgttcaagggaaacttttggagtgcagacatcctcagcaccatcggctatgacaacattatccaacatctgaacaatggccgcaagaactgcaaagagtttgaagactttctaaaagaaagggcagcaattgaagagaggtatggcaaagatctgctcaacctctctaggaagaagccgtgtggacagtctgaaatcaagtatgtatcaagtttttttctggtttccaggttggttaataatgcctgggagctccctcgcttcagcagacagagttaccaggaggttgaagtatgctggctgaaaaaaaatttttttggagatgggatctcactattttgtccaggctgggctcaaactcaagatcctcagtcaggcgcagtggctcatgcctctaaccccagcactttgggaggccgaggcaggtggatcgcttgggcccaggagttcaagaccagcctaggcaacttggcaaaaccccatccctactaaaaatagaaaaattagccaggcatggtggcccatgcctgtagtcctagctacttgggagactgaggtgggaggatggtttgagcccagaaggcagaggttgcagtgagcagagattgtgccacagcattctaacctgggtgtcagagcaagactctgtctc

SEQ ID NO: 404761 - DNA, 1425 bp, Homo sapiens
  misc_feature (441)..(441): n is a, c, g, or t
gcgggcagtggcagtcaggcctccccgctctgtgctacctgcggcccggctctcctccgcgcccccactcgcgctgcgatgacgcgctcactgttcaagggaaacttttggagtgcagacatcctcagcaccatcggctatgacaacattatccaacatctgaacaatggccgcaagaactgcaaagagtttgaagactttctaaaagaaagggcagcaattgaagagaggtatggcaaagatctgctcaacctctctaggaagaagccgtgtggacagtctgaaatcaacaccctgaagcgggcccttgaagtcttcaagcagcaagtagacaatgtggcacaatgtcacattcagcttgcacagagtttaagagaagaggccaggaagatggaagaattcagggaaaagcaaaaactacaacgaaaaaagatggagtcncactctgtcacccaggctggagcacagtggcacgatctcggctccctgcaagctctgcctcccgggttcatgccattctcctgcctcagcctcccgagtagctggaactacaggctcccgccaccaccacgcctggccgagccaaggaaccaagatcatggtgtggcatagaaaacacagcctgttgaacaagattctgcagaccgcctgcctccgtggatgggagggcctgacaggtgtttatttctccatttcacattaactgggaagcgacagcagctcatggccactgcacccggctgccgtgtggttcatcggacatttcagctgtcttgaaaattgatattgattacttcagaacgtgccgtccatggagcgattcatcttggcagttagagtgggcagaatgattagatcctcgctccacagctgcattccacacttctgcctggtcctaggcttggttttagaggcctcattaacacacgtcatccagtgatcttggagaacattatgctaagtgaaataagccagacacagaaggacaaatatgcctggtgctgcttgcatgatgaatctagtcaggctcaggagcagagagtggaacagtgattgtcaggggtgggatgagagagggagcgtgggggagggggacgggacgggatgagtcagggggtgcaaagtttcaattatacaagatgagtaagtcctagcaatctattgtgtagcgtggacatatcattagcaacactgtattgtatacttaaaattggctgaaaggatagatcttgtgtttgtatcacaaaataataacaataattaattcagagggtggaaagagacttttggaggtgatggatatgcttacggcataaattatggtgaggtttcacaggtgagtacttatctccaaactcatcaagttgtagacataaaatatgtacagctttttctacgtcaattagacttcaataaagtggcttt

SEQ ID NO: 404762 - DNA, 787 bp, Homo sapiens
gcgggcagtggcagtcaggcctccccgctctgtgctacctgcggcccggctctcctccgcgcccccactcgcgctgcgatgacgcgctcactgttcaagggaaacttttggagtgcagacatcctcagcaccatcggctatgacaacattatccaacatctgaacaatggccgcaagaactgcaaagagtttgaagactttctaaaagaaagggcagcaattgaagagaggtatggcaaagatctgctcaacctctctaggaagaagccgtgtggacagtctgaaatcaacaccctgaagcgggcccttgaagtcttcaagcagcaagtagacaatgtggcacaatgtcacattcagcttgcacagagtttaagagaagaggccaggaagatggaagaattcagggaaaagcaaaaactacaacgaaaaaagacagagctcataatggatgctatccataaacaaaagagcttacaattcaagaaaaccatggatgcaaagaagaactatgagcagaaatgccgggacaaagatgaggcagaacaggccgtcagccggagtgccaacctggtgaacccgaagcaacaagaaaagctttttgtgaaactggcaacttcaaagaccgcagtagaggactcagacaaagcatacatgctgcacatcggcaccctggataaggtccgagaagagtggcagagtgagcacatcaaggcctgcgaggcatttgaggctcaagaatgtgaacgaataaacttcttccggaatgcattgtggttacatgtgaatc

SEQ ID NO: 404763 - DNA, 588 bp, Homo sapiens
accgcgcccggcccaggtttcttatttcaggagcttcataggcatagacctccctccttccctcctaccccctcccccctctcccaactaatgccagaccggccactactttttaactgttttacatatttaaccttcaagaaagatttcctttgatccaagtgtattgcagcccacaaaaaagcttggaaacccagctagatggtctgtttttctagttcctacattggatttaagtcctacccatcgagactactgtcttcaggtaagcatatcgaggctgtattcaccttcatggtgttctcaggggcactttcttacacaaatgatggtaatcatcctagatcatttccctgcctgccacacttgccagttagttagaaactgtaaaccccttaaatgtctgtcaccagggcactggctgaatagctgagtaagttttggtgaatccattccttggactacactgcatccactgaaaacagtgcggtgaatttctgtgtgctaatgtgcaaagatggtttatgtattattcagtggaaaaagcacatttgcactacagtgcagatagcatgatcccatgtttgt

SEQ ID NO: 404764 - DNA, 1093 bp, Homo sapiens
accgcgcccggcccaggtttcttatttcaggagcttcataggcatagacctccctccttccctcctaccccctcccccctctcccaactaatgccagaccggccactactttttaactgttttacatatttaaccttcaagaaagatttcctttgatccaagtgtattgcagcccacaaaaaagcttggaaacccagctagatggtctgtttttctagttcctacattggatttaagtcctacccatcgagactactgtcttcagagggcatcttcatgtgtgggcaccagggctgcggctggaaccacagtggacaccccacgctccaaggacaatcctctgcagaaaccagcagctggaaacaattcttaatgctgcaggaagtagttaggagaaaacgactgtgtaagtcagagctaaaactggagttcaaaaaccacagaaaatatttccaaggctgtctgtgaagtggggatgtcaaaataccaaaaattacagctttggaactgcagtggatgacctttaattgatgcagtttataggtgctaagtattgtgtgtgctttacgttgcctcatgtgagtgcttcatagcagggtgtgacgctggccaagtgatatacctaccctctttgtccctgtttctatcaactgtaaaatgggggttctagagttgttgtgaagattaaatgagctaatacacacaaagcaccaagaacaatgctggagtgcagtggcgtgatctcgggtcactgcaacctctgcctcccgggttcaagtgattctcctgcctcagcctcccgagtagctgggattacaggtgcgccccaccatgcccagctaatttttgtatttttagtagagatgaggtttcgccatgttggccaggctgttctgcccacctcaccctcccaaagtgctgggattacaggcatcagccaccgcaccaggctgcaagatgtttaagaatgggctttgacaagttgatttttaaaattcatagccaaaaaaattgtgaaaaaaatacagtggtgtgagatgtattgtaacagatataacaacaagctgtgaaaatacagtaaattagaacagta

SEQ ID NO: 404765 - DNA, 615 bp, Homo sapiens
catcaggtggtatttctctttctgtcctgtagagggcatcttcatgtgtgggcaccagggctgcggctggaaccacagtggacaccccacgctccaaggacaatcctctgcagaaaccagcagctggaaacaattcttaatgctgcaggaagtagttaggagaaaacgactgtgtaagtcagagctaaaactggagttcaaaaaccacagaaaatatttccaaggctgtctgtgaagtggggatgtcaaaataccaaaaattacagctttggaactgcagtggatgacctttaattgatgcagtttataggtgctaagtattgtgtgtgctttacgttgcctcatgtgagtgcttcatagcagggtgtgacgctggccaagtgatatacctaccctctttgtccctgtttctatcaactgtaaaatgggggttctagagttgttgtgaagattaaatgagctaatacacacaaagcaccaagaacaatgctggatacaaggtaataggtgtttcttcctagacttcactatcctcatgtgaggtgggtatgtttatttatttatttggggacagggtctcgctctatcacccagactggagtgcagtgttgcaat

SEQ ID NO: 404766 - DNA, 1737 bp, Homo sapiens
tactgacctggaattcttttaattgtaataaatatcttctgtcacaaataaatgccacaaataaatgaaattgccattcctaagctgagcacctgtctgtgaaggaccttggtgtcctgactggacagagcattcatagctccaagagaatcatgacaagatatgcaaagcagggataataaggagaaagcccttccctttcgagaagcccttccctttcacagcccttccctgcgattctgcagtgaaaagtgatgcccagagatccacacacagaacccttctaaccagccaggtcaagacttatcatcttatctcctctggcaggtcccctgtaatcaaaagagaggaagtgtctatctaaacaagacccttttgggtccttagattcatggcaaaaatcatcatggcccccatcagaaaagaaaatcagcaataaaccaagccaagcaactaaaatgtataatgtggacctgactcatgttgggaggcagaattcagacactcacagatcaatcttgcaagttttctcttctttaagttgagctgctcaactttatgaactgtgaaatttacttacattctttcaacccacatatatcattgcagtttatgaagttgcagtgaactgcccattcagctaaattgcagtgtttattcttgtctcatgtcgaaatacaacaatcttatgggaaatattatgacagtccgttccaactgttctcagacacatgcataaacagtctctgctcacattccacagccacctgcatgttatccatacagctccctgagaagtccagggatgggaggtggggtgtggaaggatggagggtccttcattttctaaacactttgtataagtcactactcatcgtgcctagcaagtataagattaacattttgaataacaaactggaaaacaaataatccttcaaagaacctagcgaactgttcaaaggaaattttaatttcagtctaccagaaaagttaaatctgttgttggacgtagggggctttcagaaacatgcctcttatatcaatttccactatctttcaagttacctaaaggcaccaggctgcttgagcaagaagaataaaaggcctagagtgcaaattatgtgaagtagagtttttagattgtgggattgtaataatacgggattctcatggttacatcatgttaaatcacactgttcagtctttaaaacttggtgttttaaaatttgtctcattgtgatagccagaaacaaggaataaacgtgatttcagtttaaactatatacaaatatcttctgtaattttgctgctctaatttttaggctataaattttgtaatagagcttatcagatcgcaaatttcctttgtttacaatctcatgtagtagggctcagataatttcttagctataaaccttttctcccactctcatattgtttcatttaaaatatttaagctaagcctaaaaattgaaatcagttaagaatttggagagtttatcttaaatggaaatggtgtattcttttcaaagaattttgtaaccatctttacagtttctttgcttggaaaacttgggttgttaactaccagttaacaatggcattactttccaaaacgttatctaatgggcccaatgtgtacctcaagataaacacagtatgttatgtctaaaaatttccttgtctgttgatttaaatggttctgaaatgtctgtaataaagaaattttcaaagttg

SEQ ID NO: 404767 - DNA, 243 bp, Homo sapiens
tggggtttcaccacgttagccaggatggtcttgatctcctgacctcatgatccacctgcctcggcctcccaaagtgctgaggtgggaggactgcttgagcccaggagtttgagactagcctgggcaacatatggagaaactgtctcttcaaattttttttttctaaaattagccatgtgtggtggtgcacatgtgaagtcccagctacttgtgaggcagagggggtggatcactagagcctga

SEQ ID NO: 404768 - DNA, 1124 bp, Homo sapiens
caggctcacatttccactgtgtccttaactgtagttttcaactccctgtaattctcagtaattagaaaggcctttttactatccttagataaatctctttgtaacttccatgtattggttctgttttttctctctgggtcaacacatcatagccacatgtccctactaaatatttttttacaagtcagtggtagtaccagtttagagtaaagcagatctgttctctttcttgatctgaatactctattaaggctgcttgtcctagtccatgttccttcccaggtctgccagattaatcttttcaaaccagatattcccttaagaagtctctatcttgctagcactagccccttgtcacaagtatcctcttgactcttccagggccactcggatccctgtgtccctaccagggctttactcttctgctttactctgcagggacttgctgacctgatgatctgctctattcttggtttcctattaactctaagctgccccagttactcattttcatccaggcattatactactggctcctcctaatttcagttcagcttggaacctagctctaagtccagaactagaatttattgcagttctggcttctatggctcccgaataaaagagtagggacctcggccacacatggtggctcatacctgcagtcccaggactttgagaggctgaggcgggtggattgcttgagtccaggagttcaagaccagcctgggtaacatggccaaaccctgtctctacagaaaaaaatacaaaaattaggcatggtggcatgtgcttatagttccagctactcagaaggctgaggtggaaggatcacttgagcctggaaagccgaggttgcagtgagccaagatcgcaccactgcactccaacctgggtgacagagccagaccctgctgcctcaaaaaaaaaaaagaaaaagaaaaaaggagtagggaccacaatcagttgctgaatcctagtgatctgctgttcaagtcgcctcaacctgttcccttttcttcattccccagctctgaccctcactaatatgacaggcaagttccttaacttctctaaacttgttttcttatctgtgaaagaaatataacatccaccttacagat

SEQ ID NO: 404769 - DNA, 333 bp, Homo sapiens
cttttaatatccttagtttcaaaggttgaaattgatcaacccatgtaagagcacagctgaacttaaaggagttgacttagttttggttcatcctttgctttctgatcaggggctgaaagatcgtaatgtgacagaggtgaggaggaagacaataacttatatccccagtgacaaagtccagggtgcacaacagatgccctgctagacgctgtcaaatacagcttcacctggagatgcagcgtaagaaaatgtatggttctgggaactttaaacccctcaggaagcactagatgcaggcaggaaggtgatgatttatgtgagatctggacacag

SEQ ID NO: 404770 - DNA, 525 bp, Homo sapiens
atctgtatactttatgcggcagctgcaatgctcagccacaaactcaaacacactgagaaagatcacctttgtcatttccttaaaaagcaatgtaattttaaccctgagtccccatgccaccagatggtaagaaatttcatttcattattagggaccctccactcccaggattaaatgagaatccaggggtcaagtggtctcagaaaccagaccagcctctgacgtccagtgtggctgggtggcccctgccaccttcattgtcaaagcctgcagtcgtcactaaaagtccagccactctctggtgtttccatgctatacaatgggtatggaaatctttgttgagcctgagaaccttgaaatatttgctacaattctttggttgcaagcaacagaaaccagtaccgggcccagcacagtggctcacgcctataaccttaccactttcagaggccgaggtgggcagattgcttaagtccagtaatttgaaaccagcctgggcaacatggcaaaacaccatctctacca

SEQ ID NO: 404771 - DNA, 215 bp, Homo sapiens
ccgctcagagttcaacaaggttaattacggcttgagatcggagacctcgcaacaacactcattatcccttctcagtcaaccaccatcagcactcagaattttccagtgaggctggtgggttctaacagaaatttccagaatgttggactccaaaaataaagcagtttcccactgggttctgtacttcaagcacagaatagaccattttgccagag

SEQ ID NO: 404772 - DNA, 854 bp, Homo sapiens
gctctgtgaagtatagtagccctactggttatgtttatcagtttgcacctaaaaggtgaaaggaaggcttgctttcttgtgatgtaaattttttcaactaagggagtgccagaaaactgctggctgctttctctcccgtgttggtttctctccagtgctatccagaatatgctgtaagctctggacttcctgaaacaaaggtccaagtaagcatctggtctttgatgtactttaaaatgcaccccacccccacatgaaagataactaaatttttcaaaatattaatacttcttgaatgtaaatcgtgtgtctaaggtactggcataattttttttttcaaattttctatatgtttgaaatgtttcataataaaatccttttaaatttttttccatgtgtaattttaggatgatatatatatagcacatggaaaaaagcagggcatagaagtatttccactttaatttcagtttcataaaatcagagagaaaaagtcatagatatatacaccatacataaaaaataaaagcgtaaataaatacagaaagaaatctaaagagaaatcaccatagcagtaaaagtaaattctgtgtgaagtggttataagagacactaagagttgcccctccttgaaattatatttagttatggtccttaagtcactattatttgtaaccaaaaaaaaaaattgaataaaaatagttctccctctttagtccatccaatcctaaagaatttttatcagtgccctttctttttcttcagagtcactctgtcacccaggctggagtgcagtggcaccatcacagctccctgcagccttgacttacagggctccagtgatcctccaccct

SEQ ID NO: 404773 - DNA, 425 bp, Homo sapiens
ttttttttttaaattttgaaacagggtctcactctgtcatccaggctggagtgcagtggcatgatcatggctcaccatagccttgacctcctgggctcaggtgatccacccacctcaccctcccaaggtgctgggattacaggcatgagccaccgtgcccggcctcttaccacaattttaatcgaactatactcttttttcttttctgggtgacagagtgaaactgtgtctcaaaaaaacaaacaaaaaaaagagatgaaggtgtaaagtagtaacagctgggcctcaaagtgaccataaacaattctttcaagtagaaggagaaagggaaagaaagcgtattctcccctagaaagacccagcatttcatgatcctgtgcccaaactgattagaggaaggattggcaaactttttctgtaaaggg

SEQ ID NO: 404774 - DNA, 353 bp, Homo sapiens
ccagggttcatgaaccctctcacctcacagctgctcgggggtccggggttcacccctcttacctcacagcagctcgggggtcaggggttcatgaaccctctcacctcacagctgctcgggggtccggggttcacccctctcacctcgcagcagcattcctttgattttctgcgttcacagcttctatagctgggttagtggctgcaccctggggatgatcactgggctccctagtcgcctccacctcctctgagccgtgtataaggaccaggctgacacggagcctcagtgtggacacaccttcttgtccaggcatttcccatgccgactcttcagctgggcccctccctcgc

SEQ ID NO: 404775 - DNA, 1122 bp, Homo sapiens
tgagtttcacttgttccttcaaggccagtttttggggcgggggaatactgtttaaaggtttttaaatacacctgacctgcgcctcagaccattcacagtatttgaggaaatgtaagagacaacttattcccgttcttttccgagctcggctgtcgctgaaggccctcttacgaagaaaccgttctacggaagcccagttgagacaacttgagacaggattcagaaacgctgattttagtaaccttaaccctcggcccttggtgggaacttcggctctgtgggaattagtctttgggggactgatggtgatgctgaaatcttattgcgtaggaaattaagtacaacaaagaagacccgtcgtgagaggagagtgcggaagaaatgcgaagtctacgggaggtggcagctgcagaagcttggtgttggatttggcgttaggagaccgggaggagcccagcttccggtccagacggttatcttgttgacttgcacgactgcaaacgccctgagctgcttttgcagtctgaaacatcagcgatcccatcaaaatattctgtttcttgggatataagaaacatcccaaggcgggctgtagagcgagagatttggactcgatttaaatacagacaaaatagtatgcatttactaacaccacatctcacccccacgaaacttggtaagggcagcaacagaactttatctgccatatgcactcctgtattcctattaccaaatagtgccagggactaagtgaatatttgcccaatgaatgagttttaagtaggaaacgtttgcatagaatcattttgtttcttttggagttcaaatcttcggatattttacccttcccaatccaaagaaaagtctctgagtgaagagatgggaacaaaatgtaagttaaatatgttgctttaacaactgtttattgaactcgtgctatatactgtagaatgatgagcaaaaccaggcacagtttcggccctggaagaggaaaggcaggcatatatttatcaagtaagtacattaatggcggcacttatcagttgagagaagtgcgctaaggaaaggaatatgattctatgatagcgtataataaaagttccgttgaagccgtggggaaac

SEQ ID NO: 404776 - DNA, 734 bp, Homo sapiens
tgagtttcacttgttccttcaaggccagtttttggggcgggggaatactgtttaaaggtttttaaatacacctgacctgcgcctcagaccattcacagtatttgaggaaatgtaagagacaacttattcccgttcttttccgagctcggctgtcgctgaaggccctcttacgaagaaaccgttctacggaagcccagttgagacaacttgagacaggattcagaaacgctgattttagtaaccttaaccctcggcccttggtgggaacttcggctctgtgggaattagtctttgggggactgatggtgatgctgaaatcttattgcgtaggaaattaagtacaacaaagaagacccgtcgtgagaggagagtgcggaagaaatgcgaagtctacgggaggtggcagctgcagaagcttggtgttggatttggcgttaggagaccgggaggagcccagcttccggtccagacggttatcttgttgacttgcacgactgcaaacgccctgagctgcttttgcagtctgaaacatcagcgatcccatcaaaatattctgtttcttgggatataagaaacatcccaaggcgggctgtagagcgagagatttggactcgatttaaatacagacaaaatagtatgcatttactaacaccacatctcacccccacgaaacttgccaagcccaacaaaataatggcacacagcagttgctgcccaagcctgggtgctccttg

SEQ ID NO: 404777 - DNA, 1029 bp, Homo sapiens
tgagtttcacttgttccttcaaggccagtttttggggcgggggaatactgtttaaaggtttttaaatacacctgacctgcgcctcagaccattcacagtatttgaggaaatgtaagagacaacttattcccgttcttttccgagctcggctgtcgctgaaggccctcttacgaagaaaccgttctacggaagcccagttgagacaacttgagacaggattcagaaacgctgattttagaaattaagtacaacaaagaagacccgtcgtgagaggagagtgcggaagaaatgcgaagtctacgggaggtggcagctgcagaagcttggtgttggatttggcgttaggagaccgggaggagcccagcttccggtccagacggttatcttgttgacttgcacgactgcaaacgccctgagctgcttttgcagtctgaaacatcagcgatcccatcaaaatattctgtttcttgggatataagaaacatcccaaggcgggctgtagagcgagagatttggactcgatttaaatacagacaaaatagtatgcatttactaacaccacatctcacccccacgaaacttggtaagggcagcaacagaactttatctgccatatgcactcctgtattcctattaccaaatagtgccagggactaagtgaatatttgcccaatgaatgagttttaagtaggaaacgtttgcatagaatcattttgtttcttttggagttcaaatcttcggatattttacccttcccaatccaaagaaaagtctctgagtgaagagatgggaacaaaatgtaagttaaatatgttgctttaacaactgtttattgaactcgtgctatatactgtagaatgatgagcaaaaccaggcacagtttcggccctggaagaggaaaggcaggcatatatttatcaagtaagtacattaatggcggcacttatcagttgagagaagtgcgctaaggaaaggaatatgattctatgatagcgtataataaaagttccgttgaagccgtggggaaac

SEQ ID NO: 404778 - DNA, 337 bp, Homo sapiens
caaactccatctcacgtatttgttcattgtctatttctcctcctgcatagaatggaagctccatgaaagcagaggagaaactgcttatcttgttcgctgctgtttctcgagtagccacaagaacttggcactttaggtagtaggtgttcggtattcaaatgatggaattaaagatcaactctgaactctcaaaggcagatagattttcactttagtgcaggaaaataaacactcatatgtcatgcccattcttcaggcctgaaccaaaggggaacctgtcagaggataggaaatgagatctcagcagcgtctgttactatttgcaattttcaaatac

SEQ ID NO: 404779 - DNA, 465 bp, Homo sapiens
tttagtgcagaatcagtcctggtaaggtggttgaattaatgacatacatgaaaaatatgtgaattcatgtctcgagtttatgatttgctctctttctgtgaaaaagatagattatgtttttggttttgttttgccctgccagcttccaagtaaccacttactgttaaattggccccagtacacttcagtgtttgttgcaaatggaaagaattgattcactatatttttttctgctgctgaatcactaagcaaaactctaccgctggggaaacttttgtatcgcagcacacaagcagcccagtatgatggtaaagaccaacctccattgtgtggtcttaccattgtcactcgcgttacccacggactgaatagggtttagaaatacaggccttcaaaggaattgccgttgcttaaatgttccatggctgcttctgaaataacatccctccagccctcattcaaaac

SEQ ID NO: 404780 - DNA, 754 bp, Homo sapiens
gccaacaccaaagggggcacgggagaaggacaggaggggtggtttccctcagcaagctctcagtcccactgacactggcccaagagggctgagtgtactgggcactcacgcagggagattgttcccgaaggccctcgggaaagttggtgaatgcaaacagcaggcagccagagagcctgctgcagaggagaccagagacgatgccccaggagggcacagaagtgtgcaaaagactcagcagtgggaaggagcctggtccgtgagtgtgaggagataacccgggccctaggcccttcctgccccaactttccaccacctggcccagccccttgcagcggtgaggcttagcatctctctgctgggtttgtgagagcccagactgccccagtgagggtacaggagtactctccccaggcaggaagggtgggcggcctccctccaggtacccaagaggaaatgttagcagctgaaagccccagagcagagctgttctcatggggaaggaccctgtcttccccatcatcctaggcgttcattgaggatgaggactgtcttcctccatcagaccgagagttcccaagggcaagggctgtctctccctggtcagacagggagctccccgagggcagaggtcctgtctcctccatcagacatggtagcccccacaaccacaaagctagtgtctactttcatcagaaggagctccctaagtggggaagggttctccctattttccccttccaggtgggaactt

SEQ ID NO: 404781 - DNA, 619 bp, Homo sapiens
gatataagaagaatttttgtagatgacagcttcaatccagggaagagatgatggtggcttggaatagggcgttaatagtagaggtcaaaagaggtggtcagctttagatatattgtgaaggtagggtctaccagatttgctaatggattggatatgggtgctaaaagaagaatcaaggatgacttcagggtttttggcctgagcaaccagaagtatggcattgccatttactgagttggagaagactgaaggagaagcaagtttgggagggaagaccaagaattcagttttggatatgctgagtgtgagctttaattagatttctagatagagatgtcaaataggcagttttatgagatcacagggagtgaggacatctaagaaaggcgaatggtccaaggaaacttcttccccttaaaaaatgagtgtacagctaaaatcataagcaactttaaaggcatagattgaaatagtataaaatgtagaaaacctcccataccttgaaagctcacttcaactgccttctgcccaacttaacattttaaagacattttgatatacatacaaatctaagctccaagaagcctaagaaaaccccttaggggttaccttggctcat

SEQ ID NO: 404782 - DNA, 730 bp, Homo sapiens
ctactactactaaattcgcggccgcgtcgacatcagttgaagacactgagtttccagtttttgaataaagcttgccataaacattcacatgcatgtttttgtgtgaacacaagttttcatttttaggaaggggattgccgggttatatggtaagtgaatgtttaatttataaaaaatctccaaactgttttccaaagtgggtgaaccattttgcattccagccagcaatgcatgagagatccagttgcttagcatccttgcaggacttgatatggttagttatagaaattatagtcattctaaaagatacatagtagcatctcattgtggttttaatttgcattaccctcatgagtaatgatattgagcaccttttcatgtgcttatttgccatttgtacctctttgttaaagtgttcattgaaatattttgcctatttaaaaattgttatttcttgttgagttttgagagttcttcatataattctgaaaataagtcccctggcagatacgtgctaatatatatttgcagtctgtagctgtcttttcattctccaacaatgtcttcggcggaacaaaagcttttgcttttgatgaattcatcgctttaaaaaaaaaatagattgtacttttgtgctgtatctaagaatttgcctaaaccaaggtcatgaaaattttctcctgtgatctctttacttttaggtgtgtgacccattttgactcaggttttt

SEQ ID NO: 404783 - DNA, 290 bp, Homo sapiens
accaggcacagatggtgttagagatgaattctttataaccattagtgaatatataattattttcaatgtaccaattctagtctgtagagaaacgtgaaaacctgaataaagttagaatagccttaattttaaaaactctcaaagataacaaaaacaatctttgtactttttgaaaggaaggtatctatcaagataatccaaagtaccaaacattatagggaaaaaatataattattttaatgattgccatagatgtatttgataaaattcactagccattcaaaaaaaaa

SEQ ID NO: 404784 - DNA, 396 bp, Homo sapiens
tcactacgttgcccaggctggtcttgaactcctggcctcaatccatcctcctacctcagccttccaaagcattgggattacaaacatgagcaatcactcctgggcccttctttactttttaaaactacattattgtagtgactttctccacaccaccaagaaagtcttatttgaacgctttttgttaatttaagctattaaactactttactggggatgggtgtatcccaggcaatgtgttccaggatttgcatgcatcatctcatttaattctcacaacaacccaccagtagataagtatgttattccttctactgtaaagatgaggaaacagactcagaaggtcattcaattaaggggcagaattgagattcaaaccgaggcagtctgactcca

SEQ ID NO: 404785 - DNA, 466 bp, Homo sapiens
tgttaggggagattttccactggactagaatcttttcagcaaaaataacccatagacagttaaagtgaacacacacacagatactaagcgagagttgtttatgtgagctgcttttatgaggtctctattgagaactacctgaatgttctctttggcagggggctgcccttggggcggagggctggtattccctgcagatgcacccccctgcctcacctgctcccctcttgcctcccagctggtaagatctgtatctgttagagaattgagtccttcccgccagaggtctgctgagtttgccaacacaggcatatcttaaaatgttttattcactttgtctgtgactcagaaggttcatttcatccctgggaaaccacttaccatgaggcagagaccctggcatctgctggcttttctgcagcacaccagcaatactacaggactctgatgggaacttactaaagaa

SEQ ID NO: 404786 - DNA, 663 bp, Homo sapiens
ttttttttttgatacagagtctagctctgtcacccaggctggagtgcagtgacgcaatctcggctcactacaagctccgcctcccgggttcatgccattctcctgcctcagcctccagagtagctgggactacaggcgcgcaccaccatgcctggctaatttttgttgtatttttagtagagacagagtttcaccatgttagccaggatggtctcgatctcctgacctcgggatccgcccacctcggcctcccaaagtactgggattacaggcgtgagccaccgcgcccagccgcattaaatcctcataggagcttgaaaacatccccctcagcaccctgtccatggaaaaattttcttccacaaaactggtccctggtgccaaaaaggctggagaccactgccttacaacacccctgcaaagtacaaactattattttacagctgaacagaatgcagctcagagaggttccagtgacttgctcagctgaagagaggcagagctgggaatccccatccaggtctgtcagccccacaccagccagaaccctggaaatggaaggcttgagtttggattccagctattccaatcatggcaaaggtgtctgcaatagtcataacagtgatttttaaaaaaaagtaccaagcacttgctatatggcag

SEQ ID NO: 404787 - DNA, 815 bp, Homo sapiens
aagttcagtcatttttatagagaaagctaaccagtaaagtagatatggaaagtctttgagtttgtgctgacttgaataaacctgggatcatgtatccatgtcaactaagaattatataaaatgttttctctccaggctcataccaatcagaatagttaacttgagaattaattgcttccaactaacatgcatttattataaattatccaaaatgaaggatttttatattataaatattctgttataaatttataaagaatatgaaatcttttaaaatgtctaagttaaactttatagataatgaaatggaattgtgatagaagttatatttatacagatcttacatgttaactctgtgaaacaaagggaaaaattcaagtttggtctttgatgaccaaagtagtatgaaattatttctcaaagtttagcaaaaacatgcatagattaaaaattaaaacccaaggaggagactgcaaaggaaaataatgaaaagacactcactcaaatgccagattctaatctaggtcctatatggcagagaaaaaaaaggaatttcttatatagattgtattttaatagtgagagacaaaaattcaactgataagaacagatactacacttgatcttagccaaaaggctgagaagcaaaaatgtaataattaaatttataatatgttaaaagctgataatactatggtgaaaaatcaaggcaggtgcaggagagtgtgtgtaggtatttaattttcaggtaggattgtcaccaaaagctctctcagtatttctcataaacttgagaagtaccttcttttttataa

SEQ ID NO: 404788 - DNA, 379 bp, Homo sapiens
ctcaaatttcaattattacttctaacacccaaggagatctatggagatttccatatttaaggtcaaaataacctaagaataaaaaataaagggggggagagctaattcccagaagaactaagaggagataacccaagaaaaactagggcttctctatttctgtgaagacaagaattagcttttgggattatttctgattttataacctccttgcattttgtttttatcattggttttcctagagtttgataatagccaaaaacacctcagaatttagtttgttgctttcttgaggacaggataatggagataaccatcagggaggattgagggatttggcaaagaagctttgtagctttgtgccattcttcagtgtgcc

SEQ ID NO: 404789 - DNA, 1027 bp, Homo sapiens
ttggcaacaccattatgacatcacaacctatttccaatgagaccatcataatgctcccatcaaatgtcatcaacttctcccaagcagagaaacccgaacccaccaaccaggggcaggatagcctgaagaaacgtctacaggcaaaagtcaaagttattggggtgcatagcagcctggctggaagcattctgagtgctctgtctgccctggtgggtttcattctcctgtctgtcaacccggctgcattaaatcctgcctcattgcagtgtaagttggacgaaaaggatataccaaccagacttcttctttcttatgattatcattcaccttacaccatggactgccatagagccaaagccagtctggctggaactctgtctctgatgctggtttctactgtgttggagttctgcctagctgtgctcactgctgtgctgcagtggaaacagactgtctgacttccctggttactcatgtcctcaaagacgactcatgatgctggatatgaagaactattgacttcttgggaaaaaacggagaaatattaattggaaagttgatttttatgataatatggaaaacctaaccattataaaaaagcaaacttgagtttcctaaatgtaagcatttaaagtaatgcatatttgttttaaaaaattatttcgctgtcatttatgatatgtgttcattggggatctcttggtttgcctgatactgacttcagcaaaagcacagggctgtaaattaccatttactagactagccaaatagtcttagacatttcccagaaaactaggcagaatgatgattcaatggatcacagtgaggcaaaggatacagctttttcttatactcctcaattgtgaacaggagttaactgatttgctgtggtgcgcagactcttttatcacaggtgctactgatttatcccatgtattttactcattagtgcataaaggcaaaccccataatgaagtctccgagtgtatgaaagtagccggcttcaaaataaaatctttgagtgcat

SEQ ID NO: 404790 - DNA, 329 bp, Homo sapiens
gctggggaggcttcaggacagtctctgaactactgagcattagtttctttatctgtccaatgggcccaatggcacctgctctgctcatctctcaggatcttacatgccacataagctaatggagaagtaaatgctttataagcctaaaggaatggacatgggtgcattcagtgagaggcagtaggactaatggttagtgattagtttgctaagtaggagcagcagttgttagtgtaagaagggcgggttagtacatgggtggtggtcaggaggagcaccactgctgctgctacttagccacttgtgtaacctttttttttaaacaaaac

SEQ ID NO: 404791 - DNA, 386 bp, Homo sapiens
cttgggggtgatctgccttagaaattcaactttaggattagaattctgctaagaggtaccatgtgacaaaaaaggtagtgtaaaaatcacaaagaccaggacaggctcatgcctataatcccagcactttgagaggccgaggcgggcagatcacttgaggtcaggagtttgagaccagcccagccaacatggcaaaaccccatcgctactaaaaatacgaaaaattagctgggcgtggtggtggacacctttaatcccagctactcgggagcctgaggagcctgaggcgtgagaatcacttgaacctgggagacagaggctgcagtgagctgagattgtgccactgcactccagcctaggcaacagagcgagactctgtatcaaaa

SEQ ID NO: 404792 - DNA, 700 bp, Homo sapiens
ggcaggggatggacagactctaggagaagaccaccttctcactccatcgcctttccagctcccattccccctgaaagcctgtgtcataggcaataaaatcctctgtattcatgacccatcaatttgttcgtgtgacctatgacccttcaattcgttcatgtgacctgattcttcctggatgccaagcaagaacttgggagccacaggtgtgggtgcttgagctgtttaacatttaagccatctatggatggcaaagctaaaagaacacacagtaacacaccctctggggccccaggggtctcaggtaccctcctagatgctgctgtagggctgcacggggttctgttcctgctggcgcccagaagcactcgtcccaactcctgcgcctgctcacctgcgtgctccctgtcccagctgagagctgcagactgagtaagtgaggcacccttgtctcaaggcctgtgaaggggtcaaagagaatttcccatctgggagatgggaatttcccatttcccatctctctctctctggtagatggtcaataaacatttgttgcttaactaaatggacatgataaacatgttgttcattaaggagtgagtgttggtttccagagtagtcactggggattcttgtttactggacttgactgatgaatttccaaatgaatttgaaagttttcaaaatcaaattcagcctg

SEQ ID NO: 404793 - DNA, 702 bp, Homo sapiens
gcacctgctgcagacggccgggacctgcggggtcagcgacgacagcctgggcagcctcctgggaccccggacggcagccgtcttcaggcctcggcccggggactctctgccatcccgagagacccgctacgtgagagctgtatgtggtcgtggacaatgcagagttccagatgctggggagcgaagcagccgtgcgtcatcgggtgctggaggtggtgaatcacgtggacaagctatatcagaaactcaacttccgtgtggtcctggtgggcctggagatttggaatagtcaggacaggttccacgtcagccccgaccccagtgtcacactggagaacctcctgacctggcaggcacggcaacggacacggcggcacctgcatgacaacgtacagctcatcacgggtgtcgacttcaccgggactaccgtggggtttgccagggtgtccgccatgtgctcccacagctcaggggctgtgaaccaggaccacagcaagaaccccgtgggcgtggcctgtaccatggcccatgagatgggccacaacctgggcatggaccatgatgagaacgtccagggctgccgctgccaggaacgcttcgaggccggccgctgcatcatggcgggcagcattggctccagtttccccaggatgttcagtgactgcagccaggcctacctggagagctttttggagcggccgc

SEQ ID NO: 404794 - DNA, 913 bp, Homo sapiens
aatcctgtgcgcgtggttcttgtgggaactgcgcctcccagaaggcaccgcgcgtcgtccttctccctccctgaaggccgcctcgcttgcccagtgtgtcggccgcccgcgaactagagtccactgacttttccgccaccatgttgcccgcctcactgcttcgtcacccgggcctgcgccgcctgatgcttcaggcgcgtacatacgcgaggccgccgctgcacctgcccccgccgccgggcccggacagatgtccttcacctttgcctccccgacgcaggtgttctttgacagtgccaacgtcaagcaagtggacgtgcctacgctgactggagcctttggcatcttggcatcccatgtccccacactacaggtcctacggcctgggctggtagtggttcacacagaagacggcaccacgactaagtactttgtgagcagcggctccgtcactgtgaatgccgactcctctgtgcagttactagctgaagaagctgtgacactggacatgctggacctgggggcagcccgggccaacctggagaaggcgcagtcagaactgtcaggtgcggcggacgaggcagcacgggctgagatccagatccgtattgaggccaatgaagccctagtgaaggccctggagtaggtggtacctactgtctgacacccacggggaaactgagccaggtccaggccgatgagaagttcccagtgggctgaagtggccaccaggggtcagcagtgctccagttgctgggcttaaagcttcctggtgcctgtctgccaggtcatggaggattccccaatctggcatccccacgatgcctctggagagatggccttgattgcccctcaaagccacctgaaccgtcgtcaacttacccagcctgtctccattaaacaccaggaacca

SEQ ID NO: 404795 - DNA, 618 bp, Homo sapiens
tgagacggagtctcgctctgtcgcccaggctagagtgcagcggcacgatctcggctcactgcaagcttcgcctcccgggttcacgccattctcctgcgctcagcctcccaagtagctgggactacaggtgcccgccaccacgcccggctaattttttgtatttttagtagagacggggtttcactgtgttggccaggatggtctcgatctcctgacctcgtgatccgcctgtctcagcctcccaaagtgctgggattacaggcgtgagccaccggacccggctcttacgttctttatggcagaaacctccatgaagaactttgaggaatcgttagctgctcccctacaacactgttatcagagtgagagcaaattttgccatgtgtataggcatttattaaataaatactcatttagaaataggttctgcaacctatttttcaaactgagtaatgtgcccagctctttgtcattttaggtgtctgacatctgtgcaggatgtgacattacagaagcagggtttgttactcttagaatcggcatcaggcaacagaagcttcctaagccaatgactggacacaaatggcccgggcagcattcctttgtgatcagatgcag

SEQ ID NO: 404796 - DNA, 551 bp, Homo sapiens
tgagacggagtctcgctctgtcgcccaggctagagtgcagcggcacgatctcggctcactgcaagcttcgcctcccgggttcacgccattctcctgcgctcagcctcccaagtagctgggactacaggtgcccgccaccacgcccggctaattttttgtatttttagtagagacggggtttcactgtgttggccaggatggtctcgatctcctgacctcgtgatccgcctgtctcagcctcccaaagtgctgggattacaggcgtgagccaccggacccggctcttacgttctttatggcagaaacctccatgaagaactttgaggaatcgttagctgctcccctacaacactgttatcagagtgagagcaaattttgccatgtgtataggcatttattaaataaatactcatttagaaataggttctgcaacctatttttcaaactgagtaatgtgcccagctctttgtcattttaggtgtctgacatttgcccggattggaccatttcccaacccggggtttggtaccctttggcccgggcacgatttc

SEQ ID NO: 404797 - DNA, 437 bp, Homo sapiens
tcagtactttatagtaagaatatagcttacttttttttccctaaatacatgaatgacttgatttccaaaactttgccagcccatgcagctttacttctagtttgttgttgttgtttgttttgttttgccatgccaccctgatcatagtccagggaagtacaactttttacatactcaacaattttgttactttgagatttattctgaggacaagcatagtgacaaattacacctcagtatataccaatgccttagagccatctaaacatccaggagccgtaagaatcacttagcactgcaggaagaaatagttattttgagaattcagtttgccatctgactaatactgctgggataagccttttgtgtcagagagatgacaagccatcaaggaaaagagagagaaagttcatggaaaagggcacacaaaatattta

SEQ ID NO: 404798 - DNA, 566 bp, Homo sapiens
  misc_feature (532)..(532): n is a, c, g, or t
tgctcttggtataaaataatgatagagcttttgtcttgaatattcttttgtgttttttaatattgtattacaattgagagcctagatttgtttgcttattgtgcatgtatttacagaccatgcaaaaatccatcatccgtagcctggccttattatccagtgggtctcacataggcatacatttagatcaactcagcaaatacttattgaacatttactgtatgtcgaccactaatgtaggggtgcaaagatgaaaaaagatactgatgtggcccttagatgttcatagtatggataaattgaaggaaaaccagacactttagtttgtttttggcagaagagtaacttggtaggtcttttggacagaacaagagcaatacacattcaagtaatatatgtatatgtgtgtgtatatatatgtgtatatatatgtgtgtgtgtgtatattgtgtgtgtgtgtgtgtgtgtgtgtgtatgtatattccccccaccaagactctgtctcaaaaataagcaaataaataatttttanagctagcactcccagcctatggaccagctagcta

SEQ ID NO: 404799 - DNA, 727 bp, Homo sapiens
  misc_feature (259)..(259): n is a, c, g, or t
agcgggccttctctctgcttttggagaaagggaatacacgataaagaaggagacggaaagaagagaaaaagtgaggcgggagacagagggaaaagggcgtgaacagaaagggccggagcgtgcaggggagcacagggcgcgggggcggcactgccgagccgggagcgctgccgcttgggcaggtgccgcggccgctgcccggaggcggcatgtgacgcgcggccgcagctgcccgcgggcggagcgctctcagaccccngagcgcacaccgcggggcatcggtgccatcgcggatctccaggctcctcatcagtccgccggggccgcagcagcgcttctgggaagacgggcgatgaactgaagggcggctccgggcaggggggcacgatcttaaggacagtcgctccctgaacgcggagccggaggagacgaagggaaggtggagcggacgccacccgcgcaccgggcaggcgcggagaccggcgtgggacagccacctggagcgcagctgccagaaagaaggactttgctgctttgggccaggatctgaacttaggtgtaaaccattgccctggcagagggaacctacccagtccattgctgcctgctacaagatatgaacagtaatggcacatattttggttatgagtcactcagtggactgtggattgaatgaactgtatccatccccatcatgatgtacagaaccaagtctcttcactagtag

SEQ ID NO: 404800 - DNA, 477 bp, Homo sapiens
agttaccttgtcaatttattttcttataatttgcatgtcttacaaaagtagactacagcaggcatggacaaaaacagaacaaaagtctaactgattgaaagcttattccatagagaagacattgggttctagagacttacaggctatgcttgtagtttctcatatttaccttccttttgttggaaaatatagcagaaaatagagtggaggagggtgagaaggtgaggttatttgtgtgaagaatggttaggatcagtttgtttacctcctccccatccgtaccactttttggaacagttatctgtaaatataaggataaagtagtctgaacctgggtacagaagaggagaacactaacaagacaggcatctgatggtaataccaacagctttttccccaaacctaagttacaactttagtgatcattatgttctaattgttatagaaaaataaaatgtgaaaatactagttacaaca

SEQ ID NO: 404801 - DNA, 478 bp, Homo sapiens
ggttccatcatcttcaatctgtcctaagcctcagtttccccatctctaaaatgaggataatagtacctacatcataaggtggttctgagtattaagtaagatgatccatgtaaagcacttagcacaatgcctggcacacaaaaacactcagtaaatattagctattattttgcatagatttatttacctggtttggaattttgaggatccacctcaaaagctgatctttgtaattttcctgaagcagggctcagaacagcccacttgataagagacagagtatgtgagtcttatcaaaggagtgaacccagctggtcactctgcgtggtatccacagctcaacctttgttgttttcttcttcccatcacctataaggcaactcctatgaagatttttgtgaggggttttttaactttaaatctttgtggaaaaaaaaagaccctaaccaaaaaaaaaactgatactgccagaagtaga

SEQ ID NO: 404802 - DNA, 413 bp, Homo sapiens
tatttttgcatagttgactttatatattaataacttcacatcctgaaaatgttaaaaggataaagtaataaatacttgtgatactagagtcttttaaatctgcttctcgaatactgtatgaattgcatggctgatattctcttaagtatatgatattcccttaagtatatgtaatttctctgaaaagtttgacaagcatcctactttttggtaccaaaactaaatttttaatagtagacaaagattcttaagttctctgtatcttttttagaaatttaggccaggcgcagtggttcacgcctgtaatctcccagcactttgggaagccaagacgagaggatcgcttgagtccaggagttcaagaccagcctgggcaacatagtgagacctcgtctctataaaaataacaaata

SEQ ID NO: 404803 - DNA, 337 bp, Homo sapiens
gattaagctggcctcctagggttagtatgaaaaatgctacatttttgttcttggaccttaattcctctttccctcatttttgtcatgtttgcaaatttcatttgcatttaatttcctgtggtttgccaaagtccagactgagacttgagctgttgtttttattcaggtgagaagtgcaactgctactgaccatctgcactggcatctagtcaagcgattgtctgaggaaaggattttggagattcccatctgatattcttctatttggtctcttgtacccattgtcatcctgtaccacacataataaagtttaagaatgtcaagcaatccatctgca

SEQ ID NO: 404804 - DNA, 343 bp, Homo sapiens
tttgaaactttcaaggtttgacctgttgagctttagacccaaaattccaacattatgcttattttggtagagataaaacatttgtgtaataaaatgattatctggaaaaatttgaatgtgaaacaatgagaaaaggtaggcatatgcacatggttatttgctagtttatggaaatcagcttatataaaaatgaactctatttctcttcaactttttctggaccttttaaactgtctcctttttgtttgtttgtttgttttttgttttgttttgtttttttgagacagagtcttgctctggctccatcacccaggctggagtgcagtggtgcgatctcggctca

SEQ ID NO: 404805 - DNA, 657 bp, Homo sapiens
aattcaggcaacctgtttataagtagcagaagcagtattaaacatcaagacttttcttaagccagtgctctttccattaggtttcaagtgcttataaattttgggttagcctcttttgagtgggttggtagggaatctgacgttattttgaaagaacagaggaaggcctgtttggaaccccttctttcagtccttaaagacaagtcttattctgttacatcgtttagggctgaatttataatggggggaaggttcttagaggagaacagctgtgcatccctgggagttgggcagaaacaagccatacttgtacacttgtacactcagtttagggataacttggggtgtttgggctttatccttttaggattattaaattatatgtctgtaaggatggtcaatttacatttggcaagatagtccaaatgggaggaaataatggcaaatccactgatgtcattggtgctgtcacccatgagaaggaaagttcctactctctctgaggttcctcttgtcatctcttagacagctacatagaaagtcaattcagttaataggaacctgtagatgattgttaatatcctctgatcttgcctctagttacataaatacttaacatgccctggttttctgtctgccctcctcattgagattttg

SEQ ID NO: 404806 - DNA, 413 bp, Homo sapiens
ccagaaaaggatttctgtgcacaatgcagttgcattttcagaggcaagaccgtgagagagagccaactgagactcacggtgacggcggcttccagatctgcatgtgtcacacgaaaatgaggtcacagaggtgccgctgtcaagtagtttaatcatagtccctaccgtgtgtacctaaagaagagaactgtccttccctggacaaaccacccaccaggtcgagactccgatccagacgctccctgcacattaccagggtctgtcaccacccgctttgcttctcagttctgtgtgacaccaacgcccagggcccacaggggacgattatcattaaccagtttgtcctttctttgaccacataactctttgttttcaatgttacttatgaatattgagaaaaactgagccgaaaa

SEQ ID NO: 404807 - DNA, 458 bp, Homo sapiens
accacatctggcaaatatatatatatatgtattagagatggggtcttactatgtcgcccaggctggtctcaaactcctggcctcaagtgatcctcccacctttgcctcccaaagtgctgggactacaggcatgagccaccacaccccacttattccttattttaaaaatagctgcagggccgggcacagtggctcacgcctgtaatcttagcactttgggaggctgaggtgggcggatcacgaggtcaggagatcgaaaccatcctggctaacacggtgaaaccgcgtctctactaaaaatacaaaaaattagccgggcgaggtgacgggcacctgtagtcccagctactcaggagactgaggcaggaaaatggtgtgaacctgggaggtggagcttgcagtgagctgagatggcgcctctgcactccagcctgggcgacagagccagacaccgtctc

SEQ ID NO: 404808 - DNA, 513 bp, Homo sapiens
cagatactgagcatttgaaataacacagcttgcagcgtccttgcggagccctgtttatggggcaataaaccatttaaacgactgtgtgttggaacccacaaggtcgccttgaaaggcttttcacagacactgctagtagggctccaggacgtctggagggccaggatggggtgtctttttggcttctgcttgaagctgctggttcccctccatcaggaacgccagcccctggagaggctgccatgagaaagccagtttccacgtaaagaaatctaagcaacttgctagggaggccacatggagacagtgaaaccccagaggatgagaaaccacttgaaaaagagcgaaggcacccagtggacagccagcacccgccgccggatgtgaatgaggctgtcttgcattcctaagatgctgcagctgacatgaggtgaagcaaagatgagtgtcccagctgagcctggccaagctcctgactcacggaatcctgaaaaataaatggttgtcatttta

SEQ ID NO: 404809 - DNA, 743 bp, Homo sapiens
ttttgctgttattcatattatattgattattctgccccagcctgtgagccgtgtcaactcttagaggaacagcaatagagcacaggaatggcacatagaacatgggctctgagcacaaaaacgagctgtgtaactcaagttatttaaactctctctgcctcatttgcctcatctgcatactggggttactaacagaccctacctcatggagtttgggaggattaaatgagttcatccgtataaagctgttagtacggcgtctggcacctggtaagggcccagatgtccactgctgtagtgtattgcagtagattgtttccaaaggtggctgcaacaatttgtcccattgaaatatgaagagacagagtctgtttccttccccttgaatcttggctggccctatgacttgtggaagaagtgacgttctgggacttctgggccataagagtccttgcagcttccatttttaccctctagaaagccagtttccacgtaaagaaatctaagcaacttgctagggaggccacatggagacagtgaaaccccagaggatgagaaaccacttgaaaaagagcgaaggcacccagtggacagccagcacccgccgccggatgtgaatgaggctgtcttgcattcctaagatgctgcagctgacatgaggtgaagcaaagatgagtgtcccagctgagcctggccaagctcctgactcacggaatcctgaaaaataaatggttgtcatttta

SEQ ID NO: 404810 - DNA, 294 bp, Homo sapiens
cattaaagctcatggacttaattcctgtctccagggctatgtctctttcaactgccatactgaggacttttcagccgtggtcccggatgtctggccatacccatcacttgaaaccaactgtgtgataattgattagaaattacagaaactatgaagttgaatctctaacatctttctatatggagtataatgctgggaacatcattattccgtaaatatttttaaaaatgcactggatcaattgtgtatcttttattcctcctgtacaaataaagacctaaactagtaagtata

SEQ ID NO: 404811 - DNA, 457 bp, Homo sapiens
ataggataagactggatggcagaggtcagggaacagcaggtgcccatggggaggtgatctttctcatgtctgaactttttacaataacttcccagtttatctccttgctggtctctcttgttgccacctcttctttatcctgctgtgaatatctatttttctaaaacacatctgggccgggcacggtggctcatgcctgtaatctcatcactttgggaggccaaggcgggaggatcacctgaggtcaggagttcgagaccagccttggcaacatggcgaaaccccatctctactaagaatacaaaattagccaggcttggtggcgggcacctgtaatcccagctacatgggaggctgaggcaggagtattgcttgaacccaggaggcagaggttgcagtgagccgagatggcgccattgcactccagcctgggagacaagagcggaactccgtctca

SEQ ID NO: 404812 - DNA, 384 bp, Homo sapiens
acatcatttttgtgctgtaattgccaaaagtgtgtaacttcagtccaatcatggaaatacatcagacaatcccaaatcgaagaacatttgacaaatagtgatcagtactgtttcaaaatgtcacggttatgaaagataaggaaagactgaggaactgttattgcagtcctacaaaacggcgagagactaagaaataactaaatgcagcgtgatcctgggtggaatttgggaacagaaaaaggacattagtggaaaaagtggtgaaactccaataaggtcttttgtttagcgaatatgttcattttaaattagttaaattatttaaatatatttaaacattatttaaatgtattaaattaataaaattggttattttgtgaaata

SEQ ID NO: 404813 - DNA, 373 bp, Homo sapiens
acagattggccttggtgccagggactgggctggtggtagctctggggttatagcacctgggagaggcagatttcttcctcccagctttactctatcagaatgcaacaaatgggtcatgtgtccttccttgaagcaaacactggctgctgggatggacaatatgattgaccttgccaaggtcatcatgtctcctgtggtcagggaaagtaaggtctgctgatggaaaaacctatctagagcaaatgctttgaaggcacaaacagtccactacagtccaccccttcactccatgatggacacgcaatggacatgcccacatacatctttactcccattaatttgcttataaaaatcttatctaacatgatccact

SEQ ID NO: 404814 - DNA, 185 bp, Homo sapiens
gcagagaggtcaaactccttcaataaccaagaagccacgtgatgatgtgtaactactagggcatcagtaggtaaatgtgtctgattgttttaaagaatagaaagggttcttcggggaaagtttcttgggggagagcaaccttcacatgtcattttgggaaaaggaataaaaaatgattgggacac

SEQ ID NO: 404815 - DNA, 486 bp, Homo sapiens
tgtggaggggtatgaaatccctaaggatacaaagggaccttcaggattccccaggcctgcctgatgggtgagtctttttgaaagttgcccctctgtgatttctaggtacatccccactgtgttccccgagtttactctctcacaggtggggctttctgcaaaaccacacagactcaagagctatctggctgtgtgtttctgggggagtgttgtaagtgttaaatgtctgtatgtgtgtgtgtgtgtggcattatgtgtttgtgtgtgtgtgcatgcctgtaagtggagctggcttaaagaaatgtggctaacgcacttcaacacttctttttcatgtgtctaccaatttttttgtaacctatctgtgtggctctgcttgggctgtggggctctgttttttttatttttctgtggattatgaatacgcagtgaattggaaggcttgcagagactcgttggagtccatatcaactcctactgcaaaaa

SEQ ID NO: 404816 - DNA, 434 bp, Homo sapiens
caaggccaggggtataaattaaaagcaaattcaaaaggtctaagtaaaaaaaaaaaaaaatgctaagtagactgtggtagtctcaaaggtatgaggcctcgaagccacagacttgttattaatatttgtcatgaagcagtaaatactctgaaattgcaagcccaaatgtcacacagttatgaatcactgtcaagagtggattatgcagacgagtagtttctttagccatgacattttaagcaaagtaaacattttcgaagtggttgcataacaaactggtggtactatatttttcttaatttcttcctaatatgaggaggcccacagcagaattacaggacaacttgtttgtgtgtgaactagaataattttggcatcatgttataagaactgttccttctacagagtctataaatggaacaggactgttgaag

SEQ ID NO: 404817 - DNA, 313 bp, Homo sapiens
  misc_feature (2)..(2): n is a, c, g, or t
  misc_feature (96)..(96): n is a, c, g, or t
  misc_feature (223)..(223): n is a, c, g, or t
  misc_feature (313)..(313): n is a, c, g, or t
cntaggagtccacagaaaaccttccttcctggccctcccaggtcacctggtgaaatcagaagagacagtcatcctgcaatgttggtcggatgtcangtttgagcacttccttctgcacagagaggggaagtttaacaacactttgcacctcattggagagcaccatgatggggtttccaaggccaacttctccattggtcccatgatgcctgtccttgcaggnacctacagatgcttcggctctttccgtgacgctccctacgagtggtcaaactcgagtgatccactgcttgtttccgtcacaggaaacccn

SEQ ID NO: 404818 - DNA, 478 bp, Homo sapiens
tgtgagcaaacatctcactatcgtgaacgtttggtgcttcgaaacaaatacagaaacttttcataattgttcatgtccttactgggaacagtcctgtctctattaaggctttaccctcagaaccagaatcaaaaaatagttttgtttctcccagctgtctaaccctgcccaatttcttctctcctgtgctgtcctccttcactatttatgctcaggaacccagctgtgccttaaccaagagtgtgtggtgcgcttagcatgctttacacaccacattttctttccacttatatatttctgtcttagtccttcctgccagcttaacaactcaagatggcactggcagttattcccaattaagcactttttacagaaagtgagaggggaaagaaaattacagtctgaaagctatattgttagccacgcccattactaccccttctggctgaaccgacgtaacacctactattgtattttt

SEQ ID NO: 404819 - DNA, 536 bp, Homo sapiens
cgcggtggtgaggccgcctcagcgaaaaaaatgtccgcctgaagagacccacaagttctattcggggggaccgacagcccgccccgggaggaaggggcggccaggcccgaaagccgcctccccctcccagacccgagagctcgtgcggggcaaagtgaaccgagccgctgggcggtgcaaggggaagcccaagcccgttctcccggccaaagtgaactttaatcggggtggttggatgcggagacggggcggcaggacctgctagaagtggccgaagatgaatccccagcaacaacgcatggccgctatagggaccgacaaggagctgagcgacctactggacttcagtgcgatgttttccccacctgttaatagtgggaaaactagaccaactacactgggaagcagtcaattcagtggatcaggtattgatgaaagaggaggtacaacatcttggggaacaagtggtcaaccaagtccttcctatgattcatctagagtacaatacacgagatgaagcagttaaatagcaaagc

SEQ ID NO: 404820 - DNA, 759 bp, Homo sapiens
gtcttctttctctgggcatttgtagctatgcctcagtgtgtggagtctgctggggaacgctaaaagggctaagatgtcagctattgtaaagcttttttcttgtcttaaaaatggagtttgtgacaactagctagcgctgaatggacttctggttggcttcttggtggaaggaatgtgttatttcaccctggacggagtcatggagtgtccagatcccgcagagaagttttgtgcgagaaaggtcagtcattttggcgtgtggtgtaccatggatgacaatttactgaatggatgggatctatgataaagagtttagcaccctaagcaccagggttttgctctgcccacctctgcctcccaaggagctgtgactacagtttcacagatgaagaaactgaggcttagagagaagacatacaagtaattcaccagggttcatcttacagttagcttgtgaacgctagattcaaatgcagatttttgtattcgtgctagattcaacactgtactcccccaacaacccctcctttttgcctatgctcctctactgtgaaatggctccttggagtaggtaaacttagttactgtatatgatactgtcttttatatctttgctgtaaaagcaaaaatagctgatttgtttaaagaaaccttttcaaggaatcgaatttaatagactgtctctttagattcatttgaaatgtaatgtgcctaaggaactgtgttttccttacactttgacctctctaggataaaatg

SEQ ID NO: 404821 - DNA, 3761 bp, Homo sapiens
gacaaactgcaattcacgtagggaaggaaaggggaaagaaagggacagccaagagatgcaggggcagggggaccccccctctttaatttttcaaagaaaactgctttgtcgttgtgagtttgtgatcaaaagaaacgtgcaatttgcttcagattttacatattctcagtaattatatagttctgtctcatttgaagggttatctaatgattgccttttagaagctttgtatgatctgtcagttctgttcatgttgatgtcggagggatacaatttattcacctcagaaagagatttatttgctttcttctccaggaggtatatgcaccatccccaaattcagatgatttcaaccgtgaatctcctagttatccatctcctaagccaccaaccagtatgttcgctagcactttctttatgcaagatgggacccacaattcttctgacctttggagttcatcaaatgggatgagccagcctggttttggtggaattctggggacctccacttcccacatgtctcaatccagtagttatggcaaccttcattcacatgaccgcttgagttatcctccacactcagtttcaccaacagacataaacacgagtcttccaccaatgtccagctttcatcgcggcagtaccagcagttcaccttacgttgctgcctcacacactcctcccatcaatggatcagacagcattctaggaaccagagggaatgctgctggaagctcacagacaggtgatgcacttggaaaggctttggcatctatttattctcctgaccataccagcagtagttttccgtcaaatccatcaacaccagttggatcaccttcacctctcacaggtaccagtcagtggccaagacctggagggcaagcaccttcatccccaagctatgaaaactcactccactccctgcagtctcgaatggaggatcgtttagacagactggatgatgcaatccatgtgctgcggaaccatgctgtgggaccttccaccagtttgcctgctggtcacagtgatatacatagtttattgggaccatcccataatgcaccaattggaagcctcaattcaaactatggaggatcaagccttgttgcaagcagtcgatcagcttcaatggttggaactcatcgggaagactctgtcagtctcaatggcaatcattcagtcctgtctagtacagtcactacttcaagcacagacctgaaccataaaacacaagaaaattatagaggtggcttgcaaagtcagtctggaactgttgttacaacagaaatcaagactgaaaacaaagaaaaggatgaaaaccttcatgaacctccttcatcagatgacatgaagtcagatgatgaatcctcccaaaaagatatcaaggtttcatctagaggcagaacaagcagtactaatgaagatgaggatttgaaccctgaacagaagatagaaagggagaaggagaggcggatggctaacaatgccagagaacgcttacgcgtgcgggatattaatgaagcattcaaagagcttggccgaatgtgtcagcttcacttgaagagtgaaaaaccccaaacaaaactccttattcttcatcaagccgtggcagtcatccttagtctagaacagcaagtcagagagaggaaccttaaccccaaagcagcctgccttaagagaagggaagaagaaaaagtttctgccgtatcggcagagccgccaaccacactgccaggaacccatcctgggcttagtgaaactaccaaccctatgggtcatatgtaaacatcagccagttccagagttatcagtaggctagatagaaggtgacctctcctcataaggacttggacaactcagattatctgaagacacaaacctgacaggagggagaagaaaaaacaaaacacttgaaccaagaaactcaaatgtaatcctacgatcaaagcaactggtcaacacttccatcagaagtgaagataggaagctcatcagatagaacatcagcccatgagatgtttgcaacaaatcttttgttgcaagcagtgtgtcgcttctgcacaatcagagactgtctcgatctctccactcaccgtggaagttgccttgtgcctaaactgaattgacaaatgcattgtaactacaaattttatttattgttatgaaactgtaaggtctacatataaagggaaaaagttaatgtggaaagctgatctacactcagctgatgccagcatacattaaagcggttcacgtgcagagaacaaagcagtgacaaccattggcccttagcattcccggcatacctattagtgtcttaaaaaggaagggaaaagtcttttgttgccctctcctatcctcttgccatatgaatagcgttttccatgaaataggaaaatattacttggtatagcatttctcttgctctcattttttgatttatttttattttctctttgtgggtgttatatttgatctctaaatctgaacagtttatggtcacagtccagcctcctccgtgcagccctgtgtgctttgcacatttaccttacagtggtaagcagagaccatctgtgaccatagcctagctagcattttaaaaggggaaattttgttctctaggttttcccccaaataaacattgctttatttctaataataaccaagacttttcaagcttctagatctcataggaaagcttgtaatagcaaaattgtaaattacaagggaagaatctactttttagaaatcgctttgttttccaagcagtaagtactacatacagtacttgtaaagtgttagctgtaagtaagcacaaaatacatttaaaatacaaagacgattttttcaggctgtgattatggtgaacataacaaaacccagtagtcaccaaggcaggtagtgtgataaatgaacacaccactctgaggctaattacctaatggaatacaagagcaatggtcacccgtatttccttatcctagcctttatttctctgtcatttggatggctggtcaatggggaagaattgagtgggtgatttaatcaactgcaaaccatctgcccctgtcccaaaatgatgagccagattagcattaaaccagtacttgtcagtccatcttaatactgttcattaaggcactctctgtctctaatccttaggagttgttttaaaagacataatcactttgaacttccatgaaacctgtcttccaccacaacaaccctgggagagaaaaacatgctaaaggaggtatcttggcttaataattccttatagccaatatcaacagtggcaatcagcacacagaggaaaggacccaaatcactatgtagcttaaagatttctgttaatttgaaagaacaaaaacaagacagaacttctggtactctaatcaggatgattcctaacaagtcagtcatttgtgaacttagtggactttttggttactttaatttgcatatattctccagttacatcggactctatctgtggccttgttcttcatttcagtgttaatcagctaaacagaagttgttgcttatgatgtgtgagtgaacatatgccactgcctggcctttttttcttcagagcttgttgtctttttcgctatattagactttgcagtatgcccagaagctttccttcataaaatagaaagaaaaaaacatttggcttatttttcactgtagctagtcttttatacaataatcttgtaagaaaattcttgaattctaaatattactctttctagatt

SEQ ID NO: 404822 - DNA, 3539 bp, Homo sapiens
  misc_feature (15)..(15): n is a, c, g, or t
  misc_feature (70)..(70): n is a, c, g, or t
  misc_feature (79)..(79): n is a, c, g, or t
  misc_feature (81)..(82): n is a, c, g, or t
tccaggctgtacgcngcgtatgcgatatcgcgaccacgccgtcgctgttctggaattggcagcaattctntgatgtatnannacaatgggaaaacggtatatgcaccatccccaaattcagatgatttcaaccgtgaatctcctagttatccatctcctaagccaccaaccagtatgttcgctagcactttctttatgcaagatgggacccacaattcttctgacctttggagttcatcaaatgggatgagccagcctggttttggtggaattctggggacctccacttcccacatgtctcaatccagtagttatggcaaccttcattcacatgaccgcttgagttatcctccacactcagtttcaccaacagacataaacacgagtcttccaccaatgtccagctttcatcgcggcagtaccagcagttcaccttacgttgctgcctcacacactcctcccatcaatggatcagacagcattctaggaaccagagggaatgctgctggaagctcacagacaggtgatgcacttggaaaggctttggcatctatttattctcctgaccataccagcagtagttttccgtcaaatccatcaacaccagttggatcaccttcacctctcacaggtaccagtcagtggccaagacctggagggcaagcaccttcatccccaagctatgaaaactcactccactccctgcagtctcgaatggaggatcgtttagacagactggatgatgcaatccatgtgctgcggaaccatgctgtgggaccttccaccagtttgcctgctggtcacagtgatatacatagtttattgggaccatcccataatgcaccaattggaagcctcaattcaaactatggaggatcaagccttgttgcaagcagtcgatcagcttcaatggttggaactcatcgggaagactctgtcagtctcaatggcaatcattcagtcctgtctagtacagtcactacttcaagcacagacctgaaccataaaacacaagaaaattatagaggtggcttgcaaagtcagtctggaactgttgttacaacagaaatcaagactgaaaacaaagaaaaggatgaaaaccttcatgaacctccttcatcagatgacatgaagtcagatgatgaatcctcccaaaaagatatcaaggtttcatctagaggcagaacaagcagtactaatgaagatgaggatttgaaccctgaacagaagatagaaagggagaaggagaggcggatggctaacaatgccagagaacgcttacgcgtgcgggatattaatgaagcattcaaagagcttggccgaatgtgtcagcttcacttgaagagtgaaaaaccccaaacaaaactccttattcttcatcaagccgtggcagtcatccttagtctagaacagcaagtcagagagaggaaccttaaccccaaagcagcctgccttaagagaagggaagaagaaaaagtttctgccgtatcggcagagccgccaaccacactgccaggaacccatcctgggcttagtgaaactaccaaccctatgggtcatatgtaaacatcagccagttccagagttatcagtaggctagatagaaggtgacctctcctcataaggacttggacaactcagattatctgaagacacaaacctgacaggagggagaagaaaaaacaaaacacttgaaccaagaaactcaaatgtaatcctacgatcaaagcaactggtcaacacttccatcagaagtgaagataggaagctcatcagatagaacatcagcccatgagatgtttgcaacaaatcttttgttgcaagcagtgtgtcgcttctgcacaatcagagactgtctcgatctctccactcaccgtggaagttgccttgtgcctaaactgaattgacaaatgcattgtaactacaaattttatttattgttatgaaactgtaaggtctacatataaagggaaaaagttaatgtggaaagctgatctacactcagctgatgccagcatacattaaagcggttcacgtgcagagaacaaagcagtgacaaccattggcccttagcattcccggcatacctattagtgtcttaaaaaggaagggaaaagtcttttgttgccctctcctatcctcttgccatatgaatagcgttttccatgaaataggaaaatattacttggtatagcatttctcttgctctcattttttgatttatttttattttctctttgtgggtgttatatttgatctctaaatctgaacagtttatggtcacagtccagcctcctccgtgcagccctgtgtgctttgcacatttaccttacagtggtaagcagagaccatctgtgaccatagcctagctagcattttaaaaggggaaattttgttctctaggttttcccccaaataaacattgctttatttctaataataaccaagacttttcaagcttctagatctcataggaaagcttgtaatagcaaaattgtaaattacaagggaagaatctactttttagaaatcgctttgttttccaagcagtaagtactacatacagtacttgtaaagtgttagctgtaagtaagcacaaaatacatttaaaatacaaagacgattttttcaggctgtgattatggtgaacataacaaaacccagtagtcaccaaggcaggtagtgtgataaatgaacacaccactctgaggctaattacctaatggaatacaagagcaatggtcacccgtatttccttatcctagcctttatttctctgtcatttggatggctggtcaatggggaagaattgagtgggtgatttaatcaactgcaaaccatctgcccctgtcccaaaatgatgagccagattagcattaaaccagtacttgtcagtccatcttaatactgttcattaaggcactctctgtctctaatccttaggagttgttttaaaagacataatcactttgaacttccatgaaacctgtcttccaccacaacaaccctgggagagaaaaacatgctaaaggaggtatcttggcttaataattccttatagccaatatcaacagtggcaatcagcacacagaggaaaggacccaaatcactatgtagcttaaagatttctgttaatttgaaagaacaaaaacaagacagaacttctggtactctaatcaggatgattcctaacaagtcagtcatttgtgaacttagtggactttttggttactttaatttgcatatattctccagttacatcggactctatctgtggccttgttcttcatttcagtgttaatcagctaaacagaagttgttgcttatgatgtgtgagtgaacatatgccactgcctggcctttttttcttcagagcttgttgtctttttcgctatattagactttgcagtatgcccagaagctttccttcataaaatagaaagaaaaaaacatttggcttatttttcactgtagctagtcttttatacaataatcttgtaagaaaattcttgaattctaaatattactctttctagatt

SEQ ID NO: 404823 - DNA, 3401 bp, Homo sapiens
  misc_feature (72)..(72): n is a, c, g, or t
  misc_feature (81)..(81): n is a, c, g, or t
  misc_feature (83)..(84): n is a, c, g, or t
cacgcgtcgccacgcgtcgcccacgcgtcgcggacgcgtgggtcgacccacgcgtccggggcagcaattctntgatgtatnannacaatgggaaaacggtatatgcaccatccccaaattcagatgatttcaaccgtgaatctcctagttatccatctcctaagccaccaaccagtatgttcgctagcactttctttatgcaagagttatcctccacactcagtttcaccaacagacataaacacgagtcttccaccaatgtccagctttcatcgcggcagtaccagcagttcaccttacgttgctgcctcacacactcctcccatcaatggatcagacagcattctaggaaccagagggaatgctgctggaagctcacagacaggtgatgcacttggaaaggctttggcatctatttattctcctgaccataccagcagtagttttccgtcaaatccatcaacaccagttggatcaccttcacctctcacaggtaccagtcagtggccaagacctggagggcaagcaccttcatccccaagctatgaaaactcactccactccctgcagtctcgaatggaggatcgtttagacagactggatgatgcaatccatgtgctgcggaaccatgctgtgggaccttccaccagtttgcctgctggtcacagtgatatacatagtttattgggaccatcccataatgcaccaattggaagcctcaattcaaactatggaggatcaagccttgttgcaagcagtcgatcagcttcaatggttggaactcatcgggaagactctgtcagtctcaatggcaatcattcagtcctgtctagtacagtcactacttcaagcacagacctgaaccataaaacacaagaaaattatagaggtggcttgcaaagtcagtctggaactgttgttacaacagaaatcaagactgaaaacaaagaaaaggatgaaaaccttcatgaacctccttcatcagatgacatgaagtcagatgatgaatcctcccaaaaagatatcaaggtttcatctagaggcagaacaagcagtactaatgaagatgaggatttgaaccctgaacagaagatagaaagggagaaggagaggcggatggctaacaatgccagagaacgcttacgcgtgcgggatattaatgaagcattcaaagagcttggccgaatgtgtcagcttcacttgaagagtgaaaaaccccaaacaaaactccttattcttcatcaagccgtggcagtcatccttagtctagaacagcaagtcagagagaggaaccttaaccccaaagcagcctgccttaagagaagggaagaagaaaaagtttctgccgtatcggcagagccgccaaccacactgccaggaacccatcctgggcttagtgaaactaccaaccctatgggtcatatgtaaacatcagccagttccagagttatcagtaggctagatagaaggtgacctctcctcataaggacttggacaactcagattatctgaagacacaaacctgacaggagggagaagaaaaaacaaaacacttgaaccaagaaactcaaatgtaatcctacgatcaaagcaactggtcaacacttccatcagaagtgaagataggaagctcatcagatagaacatcagcccatgagatgtttgcaacaaatcttttgttgcaagcagtgtgtcgcttctgcacaatcagagactgtctcgatctctccactcaccgtggaagttgccttgtgcctaaactgaattgacaaatgcattgtaactacaaattttatttattgttatgaaactgtaaggtctacatataaagggaaaaagttaatgtggaaagctgatctacactcagctgatgccagcatacattaaagcggttcacgtgcagagaacaaagcagtgacaaccattggcccttagcattcccggcatacctattagtgtcttaaaaaggaagggaaaagtcttttgttgccctctcctatcctcttgccatatgaatagcgttttccatgaaataggaaaatattacttggtatagcatttctcttgctctcattttttgatttatttttattttctctttgtgggtgttatatttgatctctaaatctgaacagtttatggtcacagtccagcctcctccgtgcagccctgtgtgctttgcacatttaccttacagtggtaagcagagaccatctgtgaccatagcctagctagcattttaaaaggggaaattttgttctctaggttttcccccaaataaacattgctttatttctaataataaccaagacttttcaagcttctagatctcataggaaagcttgtaatagcaaaattgtaaattacaagggaagaatctactttttagaaatcgctttgttttccaagcagtaagtactacatacagtacttgtaaagtgttagctgtaagtaagcacaaaatacatttaaaatacaaagacgattttttcaggctgtgattatggtgaacataacaaaacccagtagtcaccaaggcaggtagtgtgataaatgaacacaccactctgaggctaattacctaatggaatacaagagcaatggtcacccgtatttccttatcctagcctttatttctctgtcatttggatggctggtcaatggggaagaattgagtgggtgatttaatcaactgcaaaccatctgcccctgtcccaaaatgatgagccagattagcattaaaccagtacttgtcagtccatcttaatactgttcattaaggcactctctgtctctaatccttaggagttgttttaaaagacataatcactttgaacttccatgaaacctgtcttccaccacaacaaccctgggagagaaaaacatgctaaaggaggtatcttggcttaataattccttatagccaatatcaacagtggcaatcagcacacagaggaaaggacccaaatcactatgtagcttaaagatttctgttaatttgaaagaacaaaaacaagacagaacttctggtactctaatcaggatgattcctaacaagtcagtcatttgtgaacttagtggactttttggttactttaatttgcatatattctccagttacatcggactctatctgtggccttgttcttcatttcagtgttaatcagctaaacagaagttgttgcttatgatgtgtgagtgaacatatgccactgcctggcctttttttcttcagagcttgttgtctttttcgctatattagactttgcagtatgcccagaagctttccttcataaaatagaaagaaaaaaacatttggcttatttttcactgtagctagtcttttatacaataatcttgtaagaaaattcttgaattctaaatattactctttctagatt

SEQ ID NO: 404824 - DNA, 4103 bp, Homo sapiens
gattacttgatcatgtgtttatcaaagttgaagcaactttagaccatggcagatggtaacgctggaggtgtagcaagctaggtttctctgccacaagtgctctaatttaattaaaactaaaaacagattagcagaaaatctgtcagtatgccttccttttgtgtgtgtatatatgtatatatgagacaaatctaataatttcttgggttatttttattcagggcatatttatttagcgcttaaaagtgacttgcatttttttaatacctcaaattttgtcttattggtatcctccaccaatgcaaggacttgatggaaattgaaagaggttacttacagcataaaccctccctctgtgctctgtgagttggttcagtcctattttgcataagttccttttgagtagatccatgtgtgaatgcatagtactgaagacttactccctttgcctgtgtggatatatgtcttggagagaggctgtgtgcattagctacaaatagtaacattttcaaaatcaacatgtattgtgcttatcctgtccctggaatgggcagcaattctttgatgtattactacaatgggaaaacggtatatgcaccatccccaaattcagatgatttcaaccgtgaatctcctagttatccatctcctaagccaccaaccagtatgttcgctagcactttctttatgcaagatgggacccacaattcttctgacctttggagttcatcaaatgggatgagccagcctggttttggtggaattctggggacctccacttcccacatgtctcaatccagtagttatggcaaccttcattcacatgaccgcttgagttatcctccacactcagtttcaccaacagacataaacacgagtcttccaccaatgtccagctttcatcgcggcagtaccagcagttcaccttacgttgctgcctcacacactcctcccatcaatggatcagacagcattctaggaaccagagggaatgctgctggaagctcacagacaggtgatgcacttggaaaggctttggcatctatttattctcctgaccataccagcagtagttttccgtcaaatccatcaacaccagttggatcaccttcacctctcacaggtaccagtcagtggccaagacctggagggcaagcaccttcatccccaagctatgaaaactcactccactccctgaaaaatcgagttgagcagcaacttcacgagcatttgcaagatgcaatgtccttcttaaaggatgtctgtgagcagtctcgaatggaggatcgtttagacagactggatgatgcaatccatgtgctgcggaaccatgctgtgggaccttccaccagtttgcctgctggtcacagtgatatacatagtttattgggaccatcccataatgcaccaattggaagcctcaattcaaactatggaggatcaagccttgttgcaagcagtcgatcagcttcaatggttggaactcatcgggaagactctgtcagtctcaatggcaatcattcagtcctgtctagtacagtcactacttcaagcacagacctgaaccataaaacacaagaaaattatagaggtggcttgcaaagtcagtctggaactgttgttacaacagaaatcaagactgaaaacaaagaaaaggatgaaaaccttcatgaacctccttcatcagatgacatgaagtcagatgatgaatcctcccaaaaagatatcaaggtttcatctagaggcagaacaagcagtactaatgaagatgaggatttgaaccctgaacagaagatagaaagggagaaggagaggcggatggctaacaatgccagagaacgcttacgcgtgcgggatattaatgaagcattcaaagagcttggccgaatgtgtcagcttcacttgaagagtgaaaaaccccaaacaaaactccttattcttcatcaagccgtggcagtcatccttagtctagaacagcaagtcagagagaggaaccttaaccccaaagcagcctgccttaagagaagggaagaagaaaaagtttctgccgtatcggcagagccgccaaccacactgccaggaacccatcctgggcttagtgaaactaccaaccctatgggtcatatgtaaacatcagccagttccagagttatcagtaggctagatagaaggtgacctctcctcataaggacttggacaactcagattatctgaagacacaaacctgacaggagggagaagaaaaaacaaaacacttgaaccaagaaactcaaatgtaatcctacgatcaaagcaactggtcaacacttccatcagaagtgaagataggaagctcatcagatagaacatcagcccatgagatgtttgcaacaaatcttttgttgcaagcagtgtgtcgcttctgcacaatcagagactgtctcgatctctccactcaccgtggaagttgccttgtgcctaaactgaattgacaaatgcattgtaactacaaattttatttattgttatgaaactgtaaggtctacatataaagggaaaaagttaatgtggaaagctgatctacactcagctgatgccagcatacattaaagcggttcacgtgcagagaacaaagcagtgacaaccattggcccttagcattcccggcatacctattagtgtcttaaaaaggaagggaaaagtcttttgttgccctctcctatcctcttgccatatgaatagcgttttccatgaaataggaaaatattacttggtatagcatttctcttgctctcattttttgatttatttttattttctctttgtgggtgttatatttgatctctaaatctgaacagtttatggtcacagtccagcctcctccgtgcagccctgtgtgctttgcacatttaccttacagtggtaagcagagaccatctgtgaccatagcctagctagcattttaaaaggggaaattttgttctctaggttttcccccaaataaacattgctttatttctaataataaccaagacttttcaagcttctagatctcataggaaagcttgtaatagcaaaattgtaaattacaagggaagaatctactttttagaaatcgctttgttttccaagcagtaagtactacatacagtacttgtaaagtgttagctgtaagtaagcacaaaatacatttaaaatacaaagacgattttttcaggctgtgattatggtgaacataacaaaacccagtagtcaccaaggcaggtagtgtgataaatgaacacaccactctgaggctaattacctaatggaatacaagagcaatggtcacccgtatttccttatcctagcctttatttctctgtcatttggatggctggtcaatggggaagaattgagtgggtgatttaatcaactgcaaaccatctgcccctgtcccaaaatgatgagccagattagcattaaaccagtacttgtcagtccatcttaatactgttcattaaggcactctctgtctctaatccttaggagttgttttaaaagacataatcactttgaacttccatgaaacctgtcttccaccacaacaaccctgggagagaaaaacatgctaaaggaggtatcttggcttaataattccttatagccaatatcaacagtggcaatcagcacacagaggaaaggacccaaatcactatgtagcttaaagatttctgttaatttgaaagaacaaaaacaagacagaacttctggtactctaatcaggatgattcctaacaagtcagtcatttgtgaacttagtggactttttggttactttaatttgcatatattctccagttacatcggactctatctgtggccttgttcttcatttcagtgttaatcagctaaacagaagttgttgcttatgatgtgtgagtgaacatatgccactgcctggcctttttttcttcagagcttgttgtctttttcgctatattagactttgcagtatgcccagaagctttccttcataaaatagaaagaaaaaaacatttggcttatttttcactgtagctagtcttttatacaataatcttgtaagaaaattcttgaattctaaatattactctttctagatt

SEQ ID NO: 404825 - DNA, 3017 bp, Homo sapiens
tgagaccagacaactggactcatgtcttccaactcaagtaccagtcagtggccaagacctggagggcaagcaccttcatccccaagctatgaaaactcactccactccctgaaaaatcgagttgagcagcaacttcacgagcatttgcaagatgcaatgtccttcttaaaggatgtctgtgagcagtctcgaatggaggatcgtttagacagactggatgatgcaatccatgtgctgcggaaccatgctgtgggaccttccaccagtttgcctgctggtcacagtgatatacatagtttattgggaccatcccataatgcaccaattggaagcctcaattcaaactatggaggatcaagccttgttgcaagcagtcgatcagcttcaatggttggaactcatcgggaagactctgtcagtctcaatggcaatcattcagtcctgtctagtacagtcactacttcaagcacagacctgaaccataaaacacaagaaaattatagaggtggcttgcaaagtcagtctggaactgttgttacaacagaaatcaagactgaaaacaaagaaaaggatgaaaaccttcatgaacctccttcatcagatgacatgaagtcagatgatgaatcctcccaaaaagatatcaaggtttcatctagaggcagaacaagcagtactaatgaagatgaggatttgaaccctgaacagaagatagaaagggagaaggagaggcggatggctaacaatgccagagaacgcttacgcgtgcgggatattaatgaagcattcaaagagcttggccgaatgtgtcagcttcacttgaagagtgaaaaaccccaaacaaaactccttattcttcatcaagccgtggcagtcatccttagtctagaacagcaagtcagagagaggaaccttaaccccaaagcagcctgccttaagagaagggaagaagaaaaagtttctgccgtatcggcagagccgccaaccacactgccaggaacccatcctgggcttagtgaaactaccaaccctatgggtcatatgtaaacatcagccagttccagagttatcagtaggctagatagaaggtgacctctcctcataaggacttggacaactcagattatctgaagacacaaacctgacaggagggagaagaaaaaacaaaacacttgaaccaagaaactcaaatgtaatcctacgatcaaagcaactggtcaacacttccatcagaagtgaagataggaagctcatcagatagaacatcagcccatgagatgtttgcaacaaatcttttgttgcaagcagtgtgtcgcttctgcacaatcagagactgtctcgatctctccactcaccgtggaagttgccttgtgcctaaactgaattgacaaatgcattgtaactacaaattttatttattgttatgaaactgtaaggtctacatataaagggaaaaagttaatgtggaaagctgatctacactcagctgatgccagcatacattaaagcggttcacgtgcagagaacaaagcagtgacaaccattggcccttagcattcccggcatacctattagtgtcttaaaaaggaagggaaaagtcttttgttgccctctcctatcctcttgccatatgaatagcgttttccatgaaataggaaaatattacttggtatagcatttctcttgctctcattttttgatttatttttattttctctttgtgggtgttatatttgatctctaaatctgaacagtttatggtcacagtccagcctcctccgtgcagccctgtgtgctttgcacatttaccttacagtggtaagcagagaccatctgtgaccatagcctagctagcattttaaaaggggaaattttgttctctaggttttcccccaaataaacattgctttatttctaataataaccaagacttttcaagcttctagatctcataggaaagcttgtaatagcaaaattgtaaattacaagggaagaatctactttttagaaatcgctttgttttccaagcagtaagtactacatacagtacttgtaaagtgttagctgtaagtaagcacaaaatacatttaaaatacaaagacgattttttcaggctgtgattatggtgaacataacaaaacccagtagtcaccaaggcaggtagtgtgataaatgaacacaccactctgaggctaattacctaatggaatacaagagcaatggtcacccgtatttccttatcctagcctttatttctctgtcatttggatggctggtcaatggggaagaattgagtgggtgatttaatcaactgcaaaccatctgcccctgtcccaaaatgatgagccagattagcattaaaccagtacttgtcagtccatcttaatactgttcattaaggcactctctgtctctaatccttaggagttgttttaaaagacataatcactttgaacttccatgaaacctgtcttccaccacaacaaccctgggagagaaaaacatgctaaaggaggtatcttggcttaataattccttatagccaatatcaacagtggcaatcagcacacagaggaaaggacccaaatcactatgtagcttaaagatttctgttaatttgaaagaacaaaaacaagacagaacttctggtactctaatcaggatgattcctaacaagtcagtcatttgtgaacttagtggactttttggttactttaatttgcatatattctccagttacatcggactctatctgtggccttgttcttcatttcagtgttaatcagctaaacagaagttgttgcttatgatgtgtgagtgaacatatgccactgcctggcctttttttcttcagagcttgttgtctttttcgctatattagactttgcagtatgcccagaagctttccttcataaaatagaaagaaaaaaacatttggcttatttttcactgtagctagtcttttatacaataatcttgtaagaaaattcttgaattctaaatattactctttctagatt

SEQ ID NO: 404826 - DNA, 3161 bp, Homo sapiens
ttaataatgaaagattttttaaaatgtgttgggcttataagtagccaatactatgctgaaggccaaacaaaaatattcatgtaaatttatttagttattgagtatctttaccctttccttcacaacattatcaagatcactgagttaacccaggtgtgtggctacttttgggttttaacaggtaccagtcagtggccaagacctggagggcaagcaccttcatccccaagctatgaaaactcactccactccctgaaaaatcgagttgagcagcaacttcacgagcatttgcaagatgcaatgtccttcttaaaggatgtctgtgagcagtctcgaatggaggatcgtttagacagactggatgatgcaatccatgtgctgcggaaccatgctgtgggaccttccaccagtttgcctgctggtcacagtgatatacatagtttattgggaccatcccataatgcaccaattggaagcctcaattcaaactatggaggatcaagccttgttgcaagcagtcgatcagcttcaatggttggaactcatcgggaagactctgtcagtctcaatggcaatcattcagtcctgtctagtacagtcactacttcaagcacagacctgaaccataaaacacaagaaaattatagaggtggcttgcaaagtcagtctggaactgttgttacaacagaaatcaagactgaaaacaaagaaaaggatgaaaaccttcatgaacctccttcatcagatgacatgaagtcagatgatgaatcctcccaaaaagatatcaaggtttcatctagaggcagaacaagcagtactaatgaagatgaggatttgaaccctgaacagaagatagaaagggagaaggagaggcggatggctaacaatgccagagaacgcttacgcgtgcgggatattaatgaagcattcaaagagcttggccgaatgtgtcagcttcacttgaagagtgaaaaaccccaaacaaaactccttattcttcatcaagccgtggcagtcatccttagtctagaacagcaagtcagagagaggaaccttaaccccaaagcagcctgccttaagagaagggaagaagaaaaagtttctgccgtatcggcagagccgccaaccacactgccaggaacccatcctgggcttagtgaaactaccaaccctatgggtcatatgtaaacatcagccagttccagagttatcagtaggctagatagaaggtgacctctcctcataaggacttggacaactcagattatctgaagacacaaacctgacaggagggagaagaaaaaacaaaacacttgaaccaagaaactcaaatgtaatcctacgatcaaagcaactggtcaacacttccatcagaagtgaagataggaagctcatcagatagaacatcagcccatgagatgtttgcaacaaatcttttgttgcaagcagtgtgtcgcttctgcacaatcagagactgtctcgatctctccactcaccgtggaagttgccttgtgcctaaactgaattgacaaatgcattgtaactacaaattttatttattgttatgaaactgtaaggtctacatataaagggaaaaagttaatgtggaaagctgatctacactcagctgatgccagcatacattaaagcggttcacgtgcagagaacaaagcagtgacaaccattggcccttagcattcccggcatacctattagtgtcttaaaaaggaagggaaaagtcttttgttgccctctcctatcctcttgccatatgaatagcgttttccatgaaataggaaaatattacttggtatagcatttctcttgctctcattttttgatttatttttattttctctttgtgggtgttatatttgatctctaaatctgaacagtttatggtcacagtccagcctcctccgtgcagccctgtgtgctttgcacatttaccttacagtggtaagcagagaccatctgtgaccatagcctagctagcattttaaaaggggaaattttgttctctaggttttcccccaaataaacattgctttatttctaataataaccaagacttttcaagcttctagatctcataggaaagcttgtaatagcaaaattgtaaattacaagggaagaatctactttttagaaatcgctttgttttccaagcagtaagtactacatacagtacttgtaaagtgttagctgtaagtaagcacaaaatacatttaaaatacaaagacgattttttcaggctgtgattatggtgaacataacaaaacccagtagtcaccaaggcaggtagtgtgataaatgaacacaccactctgaggctaattacctaatggaatacaagagcaatggtcacccgtatttccttatcctagcctttatttctctgtcatttggatggctggtcaatggggaagaattgagtgggtgatttaatcaactgcaaaccatctgcccctgtcccaaaatgatgagccagattagcattaaaccagtacttgtcagtccatcttaatactgttcattaaggcactctctgtctctaatccttaggagttgttttaaaagacataatcactttgaacttccatgaaacctgtcttccaccacaacaaccctgggagagaaaaacatgctaaaggaggtatcttggcttaataattccttatagccaatatcaacagtggcaatcagcacacagaggaaaggacccaaatcactatgtagcttaaagatttctgttaatttgaaagaacaaaaacaagacagaacttctggtactctaatcaggatgattcctaacaagtcagtcatttgtgaacttagtggactttttggttactttaatttgcatatattctccagttacatcggactctatctgtggccttgttcttcatttcagtgttaatcagctaaacagaagttgttgcttatgatgtgtgagtgaacatatgccactgcctggcctttttttcttcagagcttgttgtctttttcgctatattagactttgcagtatgcccagaagctttccttcataaaatagaaagaaaaaaacatttggcttatttttcactgtagctagtcttttatacaataatcttgtaagaaaattcttgaattctaaatattactctttctagatt

SEQ ID NO: 404827 - DNA, 2066 bp, Homo sapiens
aggaataccagcatttttttgttggtgggagggggaaggtgttttatttttaacaattatgtactaactggtattgtcctctcccttggctgtccctgccacagttccagagttatcagtaggctagatagaaggtgacctctcctcataaggacttggacaactcagattatctgaagacacaaacctgacaggagggagaagaaaaaacaaaacacttgaaccaagaaactcaaatgtaatcctacgatcaaagcaactggtcaacacttccatcagaagtgaagataggaagctcatcagatagaacatcagcccatgagatgtttgcaacaaatcttttgttgcaagcagtgtgtcgcttctgcacaatcagagactgtctcgatctctccactcaccgtggaagttgccttgtgcctaaactgaattgacaaatgcattgtaactacaaattttatttattgttatgaaactgtaaggtctacatataaagggaaaaagttaatgtggaaagctgatctacactcagctgatgccagcatacattaaagcggttcacgtgcagagaacaaagcagtgacaaccattggcccttagcattcccggcatacctattagtgtcttaaaaaggaagggaaaagtcttttgttgccctctcctatcctcttgccatatgaatagcgttttccatgaaataggaaaatattacttggtatagcatttctcttgctctcattttttgatttatttttattttctctttgtgggtgttatatttgatctctaaatctgaacagtttatggtcacagtccagcctcctccgtgcagccctgtgtgctttgcacatttaccttacagtggtaagcagagaccatctgtgaccatagcctagctagcattttaaaaggggaaattttgttctctaggttttcccccaaataaacattgctttatttctaataataaccaagacttttcaagcttctagatctcataggaaagcttgtaatagcaaaattgtaaattacaagggaagaatctactttttagaaatcgctttgttttccaagcagtaagtactacatacagtacttgtaaagtgttagctgtaagtaagcacaaaatacatttaaaatacaaagacgattttttcaggctgtgattatggtgaacataacaaaacccagtagtcaccaaggcaggtagtgtgataaatgaacacaccactctgaggctaattacctaatggaatacaagagcaatggtcacccgtatttccttatcctagcctttatttctctgtcatttggatggctggtcaatggggaagaattgagtgggtgatttaatcaactgcaaaccatctgcccctgtcccaaaatgatgagccagattagcattaaaccagtacttgtcagtccatcttaatactgttcattaaggcactctctgtctctaatccttaggagttgttttaaaagacataatcactttgaacttccatgaaacctgtcttccaccacaacaaccctgggagagaaaaacatgctaaaggaggtatcttggcttaataattccttatagccaatatcaacagtggcaatcagcacacagaggaaaggacccaaatcactatgtagcttaaagatttctgttaatttgaaagaacaaaaacaagacagaacttctggtactctaatcaggatgattcctaacaagtcagtcatttgtgaacttagtggactttttggttactttaatttgcatatattctccagttacatcggactctatctgtggccttgttcttcatttcagtgttaatcagctaaacagaagttgttgcttatgatgtgtgagtgaacatatgccactgcctggcctttttttcttcagagcttgttgtctttttcgctatattagactttgcagtatgcccagaagctttccttcataaaatagaaagaaaaaaacatttggcttatttttcactgtagctagtcttttatacaataatcttgtaagaaaattcttgaattctaaatattactctttctagatt

SEQ ID NO: 404828 - DNA, 2197 bp, Homo sapiens
gattacttgatcatgtgtttatcaaagttgaagcaactttagaccatggcagatggtaacgctggaggtgtagcaagctaggtttctctgccacaagtgctctaatttaattaaaactaaaaacagattagcagaaaatctgtcagtatgccttccttttgtgtgtgtatatatgtatatatgagacaaatctaataatttcttgggttatttttattcagggcatatttatttagcgcttaaaagtgacttgcatttttttaatacctcaaattttgtcttattggtatcctccaccaatgcaaggacttgatggaaattgaaagaggttacttacagcataaaccctccctctgtgctctgtgagttggttcagtcctattttgcataagttccttttgagtagatccatgtgtgaatgcatagtactgaagacttactccctttgcctgtgtggatatatgtcttggagagaggctgtgtgcattagctacaaatagtaacattttcaaaatcaacatgtattgtgcttatcctgtccctggaatgggcagcaattctttgatgtattactacaatgggaaaacggtatatgcaccatccccaaattcagatgatttcaaccgtgaatctcctagttatccatctcctaagccaccaaccagtatgttcgctagcactttctttatgcaagatgggacccacaattcttctgacctttggagttcatcaaatgggatgagccagcctggttttggtggaattctggggacctccacttcccacatgtctcaatccagtagttatggcaaccttcattcacatgaccgcttgagttatcctccacactcagtttcaccaacagacataaacacgagtcttccaccaatgtccagctttcatcgcggcagtaccagcagttcaccttacgttgctgcctcacacactcctcccatcaatggatcagacagcattctaggaaccagagggaatgctgctggaagctcacagacaggtgatgcacttggaaaggctttggcatctatttattctcctgaccataccagcagtagttttccgtcaaatccatcaacaccagttggatcaccttcacctctcacaggtaccagtcagtggccaagacctggagggcaagcaccttcatccccaagctatgaaaactcactccactccctgaaaaatcgagttgagcagcaacttcacgagcatttgcaagatgcaatgtccttcttaaaggatgtctgtgagcagtctcgaatggaggatcgtttagacagactggatgatgcaatccatgtgctgcggaaccatgctgtgggaccttccaccagtttgcctgctggtcacagtgatatacatagtttattgggaccatcccataatgcaccaattggaagcctcaattcaaactatggaggatcaagccttgttgcaagcagtcgatcagcttcaatggttggaactcatcgggaagactctgtcagtctcaatggcaatcattcagtcctgtctagtacagtcactacttcaagcacagacctgaaccataaaacacaagaaaattatagaggtggcttgcaaagtcagtctggaactgttgttacaacagaaatcaagactgaaaacaaagaaaaggatgaaaaccttcatgaacctccttcatcagatgacatgaagtcagatgatgaatcctcccaaaaagatatcaaggtttcatctagaggcagaacaagcagtactaatgaagatgaggatttgaaccctgaacagaagatagaaagggagaaggagaggcggatggctaacaatgccagagaacgcttacgcgtgcgggatattaatgaagcattcaaagagcttggccgaatgtgtcagcttcacttgaagagtgaaaaaccccaaacaaaactccttattcttcatcaagccgtggcagtcatccttagtctagaacagcaagtcagagagaggaaccttaaccccaaagcagcctgccttaagagaagggaagaagaaaaagtttctgccgtatcggcagagccgccaaccacactgccaggaacccatcctgggcttagtgaaactaccaaccctatgggtcatatgtaaacatcagccaggaggagaggctatgggagcctcaggtaccgagcatctggtgtctggagagatgcag

SEQ ID NO: 404829 - DNA, 1301 bp, Homo sapiens
cgcggtggtgaggccgcctcagcgaaaaaaatgtccgcctgaagagacccacaagttctattcggggggaccgacagcccgccccgggaggaaggggcggccaggcccgaaagccgcctccccctcccagacccgagagctcgtgcggggcaaagtgaaccgagccgctgggcggtgcaaggggaagcccaagcccgttctcccggccaaagtgaactttaatcggggtggttggatgcggagacggggcggcaggacctgctagaagtggccgaagatgaatccccagcaacaacgcatggccgctatagggaccgacaaggagctgagcgacctactggacttcagtgcgatgttttccccacctgttaatagtgggaaaactagaccaactacactgggaagcagtcaattcagtggatcaggtattgatgaaagaggaggtacaacatcttggggaacaagtggtcaaccaagtccttcctatgattcatctagaggttttacagacagccctcattacagtgatcacttgaatgacagtcgattaggagcccatgaaggcttgtccccaacacctttcatgaactcaaatctgatgggaaaaacatcagagagaggctcattttccctgtacagcagagatactggattaccaggctgtcaatctagtctcctgagacaagatctggggcttgggagcccagcacagctatcttcttcaggaaaacctgggacagcatactattcattctctgctacaagttccaggaggagaccactccatgactctgcagcgcttgatcccttgcaagcaaaaaaagtcagaaaggtgcctcctggtttgccttcttctgtatatgcaccatccccaaattcagatgatttcaaccgtgaatctcctagttatccatctcctaagccaccaaccagtatgttcgctagcactttctttatgcaagatgggacccacaattcttctgacctttggagttcatcaaatgggatgagccagcctggttttggtggaattctggggacctccacttcccacatgtctcaatccagtagttatggcaaccttcattcacatgaccgcttggtaggctataacacgtgactagggtacagcaacactttgtcctcacttgtgtttctttttggattagaagtgtaaaatctaagtctgccaaaacttctgaagtttgaagtacttcaaggcttaccgcgtttaccatgcctttctaaaaaataaatgacaataagtagtgctctttagctgtaacttgtaaatgctcttt

SEQ ID NO: 404830 - DNA, 745 bp, Homo sapiens
cgcggtggtgaggccgcctcagcgaaaaaaatgtccgcctgaagagacccacaagttctattcggggggaccgacagcccgccccgggaggaaggggcggccaggcccgaaagccgcctccccctcccagacccgagagctcgtgcggggcaaagtgaaccgagccgctgggcggtgcaaggggaagcccaagcccgttctcccggccaaagtgaactttaatcggggtggttggatgcggagacggggcggcaggacctgctagaagtggccgaagatgaatccccagcaacaacgcatggccgctatagggaccgacaaggagctgagcgacctactggacttcagtgcgatgttttccccacctgttaatagtgggaaaactagaccaactacactgggaagcagtcaattcagtggatcaggtattgatgaaagaggaggtacaacatcttggggaacaagtggtcaaccaagtccttcctatgattcatctagaggttttacagacagccctcattacagtgatcacttgaatgacagtcgattaggagcccatgaaggcttgtccccaacacctttcatgaactcaaatctgatgggtaagttggtaattctctgcaagtagtcttctcaaagcttctttggtcagagacattttttatccctttgtccaggagggacaggtaagtatctagaagaaagttcttgagtttctaggggcatctagggcttttcttgttca

SEQ ID NO: 404831 - DNA, 686 bp, Homo sapiens
gtattgatgaaagaggaggtacaacatcttggggaacaagtggtcaaccaagtccttcctatgattcatctagagtaagtttgctgatcaacccttgattaaagctgtaatttggcagactacgtaatttctttcatatatgctgtttcttatgagaaatgaaaattaatttcttttcatggaaatgcagtagaatacctagtacctttttgttacatttagttctttttataagctgtcaaactttggaaatttaatttcctacagttaaatattcttggtgttacttgtacacatgaactgcctacagtactctactaaagagcttagaatgcataagtgctctccatatgtatttagccatttttctttatgtgttgtttatttgctttgagagatggcattggctttcaacatactaacttctagcctctctccctcatccttgcttcaacagtcatcagccctttgcatcaggaactcaacagccctgcctcttggaagcatatcaaaacagacataacagatgacatttcttagttaacagttaagagaaaataggaccaagtcaactttctacacactgaggtcacaaggttagagccctttccagcaaaaaacaaaaacaaaaacaaaaaacccccaaagctttataaaatgagaccaggaggtggaaaattagatca

SEQ ID NO: 404832 - DNA, 374 bp, Homo sapiens
tgctgctggaagctcacagacaggtgatgcacttggaaaggctttggcatctgtgagtattgattttacacattctactgaatgaattttacactactgaatacagtgattagattttgtaggtgataagtatctaaagagtatagatgtaacaagatcaatttcattacacatttagagttattctcggtttgtattgatatatgcccttaaatgctatgcctgtggtacagcaaatgctgggaagaggaaaaagaagtcatctaaagcaccaactgccaagattaatcattaaatctatttcttctaaatacatagttagtaagtggtccattaaaataagtcaagtggaaccacgaaagataactcagtat

SEQ ID NO: 404833 - DNA, 272 bp, Homo sapiens
ctgaacagaagatagaaagggagaaggagaggcggatggctaacaatgccagagaacgcttacgcgtgcgggatattaatgaagcattcaaagagcttggccgaatgtgtcagcttcacttgaagagtgaaaaaccccaaacaaaactccttattcttcatcaagccgtggcagtcatccttagtctagaacagcaagtcagaggtaagtaggttcagccgagatgtataactgttctgcttcagatgggcagacatttctgtttacagttg

SEQ ID NO: 404834 - DNA, 4299 bp, Homo sapiens
cgcggtggtgaggccgcctcagcgaaaaaaatgtccgcctgaagagacccacaagttctattcggggggaccgacagcccgccccgggaggaaggggcggccaggcccgaaagccgcctccccctcccagacccgagagctcgtgcggggcaaagtgaaccgagccgctgggcggtgcaaggggaagcccaagcccgttctcccggccaaagtgaactttaatcggggtggttggatgcggagacggggcggcaggacctgctagaagtggccgaagatgaatccccagcaacaacgcatggccgctatagggaccgacaaggagctgagcgacctactggacttcagtgcgatgttttccccacctgttaatagtgggaaaactagaccaactacactgggaagcagtcaattcagtggatcaggtattgatgaaagaggaggtacaacatcttggggaacaagtggtcaaccaagtccttcctatgattcatctagaggttttacagacagccctcattacagtgatcacttgaatgacagtcgattaggagcccatgaaggcttgtccccaacacctttcatgaactcaaatctgatgggaaaaacatcagagagaggctcattttccctgtacagcagagatactggattaccaggctgtcaatctagtctcctgagacaagatctggggcttgggagcccagcacagctatcttcttcaggaaaacctgggacagcatactattcattctctgctacaagttccaggaggagaccactccatgactctgcagcgcttgatcccttgcaagcaaaaaaagtcagaaaggtgcctcctggtttgccttcttctgtatatgcaccatccccaaattcagatgatttcaaccgtgaatctcctagttatccatctcctaagccaccaaccagtatgttcgctagcactttctttatgcaagatgggacccacaattcttctgacctttggagttcatcaaatgggatgagccagcctggttttggtggaattctggggacctccacttcccacatgtctcaatccagtagttatggcaaccttcattcacatgaccgcttgagttatcctccacactcagtttcaccaacagacataaacacgagtcttccaccaatgtccagctttcatcgcggcagtaccagcagttcaccttacgttgctgcctcacacactcctcccatcaatggatcagacagcattctaggaaccagagggaatgctgctggaagctcacagacaggtgatgcacttggaaaggctttggcatctatttattctcctgaccataccagcagtagttttccgtcaaatccatcaacaccagttggatcaccttcacctctcacaggtaccagtcagtggccaagacctggagggcaagcaccttcatccccaagctatgaaaactcactccactccctgcagtctcgaatggaggatcgtttagacagactggatgatgcaatccatgtgctgcggaaccatgctgtgggaccttccaccagtttgcctgctggtcacagtgatatacatagtttattgggaccatcccataatgcaccaattggaagcctcaattcaaactatggaggatcaagccttgttgcaagcagtcgatcagcttcaatggttggaactcatcgggaagactctgtcagtctcaatggcaatcattcagtcctgtctagtacagtcactacttcaagcacagacctgaaccataaaacacaagaaaattatagaggtggcttgcaaagtcagtctggaactgttgttacaacagaaatcaagactgaaaacaaagaaaaggatgaaaaccttcatgaacctccttcatcagatgacatgaagtcagatgatgaatcctcccaaaaagatatcaaggtttcatctagaggcagaacaagcagtactaatgaagatgaggatttgaaccctgaacagaagatagaaagggagaaggagaggcggatggctaacaatgccagagaacgcttacgcgtgcgggatattaatgaagcattcaaagagcttggccgaatgtgtcagcttcacttgaagagtgaaaaaccccaaacaaaactccttattcttcatcaagccgtggcagtcatccttagtctagaacagcaagtcagagagaggaaccttaaccccaaagcagcctgccttaagagaagggaagaagaaaaagtttctgccgtatcggcagagccgccaaccacactgccaggaacccatcctgggcttagtgaaactaccaaccctatgggtcatatgtaaacatcagccagttccagagttatcagtaggctagatagaaggtgacctctcctcataaggacttggacaactcagattatctgaagacacaaacctgacaggagggagaagaaaaaacaaaacacttgaaccaagaaactcaaatgtaatcctacgatcaaagcaactggtcaacacttccatcagaagtgaagataggaagctcatcagatagaacatcagcccatgagatgtttgcaacaaatcttttgttgcaagcagtgtgtcgcttctgcacaatcagagactgtctcgatctctccactcaccgtggaagttgccttgtgcctaaactgaattgacaaatgcattgtaactacaaattttatttattgttatgaaactgtaaggtctacatataaagggaaaaagttaatgtggaaagctgatctacactcagctgatgccagcatacattaaagcggttcacgtgcagagaacaaagcagtgacaaccattggcccttagcattcccggcatacctattagtgtcttaaaaaggaagggaaaagtcttttgttgccctctcctatcctcttgccatatgaatagcgttttccatgaaataggaaaatattacttggtatagcatttctcttgctctcattttttgatttatttttattttctctttgtgggtgttatatttgatctctaaatctgaacagtttatggtcacagtccagcctcctccgtgcagccctgtgtgctttgcacatttaccttacagtggtaagcagagaccatctgtgaccatagcctagctagcattttaaaaggggaaattttgttctctaggttttcccccaaataaacattgctttatttctaataataaccaagacttttcaagcttctagatctcataggaaagcttgtaatagcaaaattgtaaattacaagggaagaatctactttttagaaatcgctttgttttccaagcagtaagtactacatacagtacttgtaaagtgttagctgtaagtaagcacaaaatacatttaaaatacaaagacgattttttcaggctgtgattatggtgaacataacaaaacccagtagtcaccaaggcaggtagtgtgataaatgaacacaccactctgaggctaattacctaatggaatacaagagcaatggtcacccgtatttccttatcctagcctttatttctctgtcatttggatggctggtcaatggggaagaattgagtgggtgatttaatcaactgcaaaccatctgcccctgtcccaaaatgatgagccagattagcattaaaccagtacttgtcagtccatcttaatactgttcattaaggcactctctgtctctaatccttaggagttgttttaaaagacataatcactttgaacttccatgaaacctgtcttccaccacaacaaccctgggagagaaaaacatgctaaaggaggtatcttggcttaataattccttatagccaatatcaacagtggcaatcagcacacagaggaaaggacccaaatcactatgtagcttaaagatttctgttaatttgaaagaacaaaaacaagacagaacttctggtactctaatcaggatgattcctaacaagtcagtcatttgtgaacttagtggactttttggttactttaatttgcatatattctccagttacatcggactctatctgtggccttgttcttcatttcagtgttaatcagctaaacagaagttgttgcttatgatgtgtgagtgaacatatgccactgcctggcctttttttcttcagagcttgttgtctttttcgctatattagactttgcagtatgcccagaagctttccttcataaaatagaaagaaaaaaacatttggcttatttttcactgtagctagtcttttatacaataatcttgtaagaaaattcttgaattctaaatattactctttctagatt

SEQ ID NO: 404835 - DNA, 4031 bp, Homo sapiens
gattacttgatcatgtgtttatcaaagttgaagcaactttagaccatggcagatggtaacgctggaggtgtagcaagctaggtttctctgccacaagtgctctaatttaattaaaactaaaaacagattagcagaaaatctgtcagtatgccttccttttgtgtgtgtatatatgtatatatgagacaaatctaataatttcttgggttatttttattcagggcatatttatttagcgcttaaaagtgacttgcatttttttaatacctcaaattttgtcttattggtatcctccaccaatgcaaggacttgatggaaattgaaagaggttacttacagcataaaccctccctctgtgctctgtgagttggttcagtcctattttgcataagttccttttgagtagatccatgtgtgaatgcatagtactgaagacttactccctttgcctgtgtggatatatgtcttggagagaggctgtgtgcattagctacaaatagtaacattttcaaaatcaacatgtattgtgcttatcctgtccctggaatgggcagcaattctttgatgtattactacaatgggaaaacggtatatgcaccatccccaaattcagatgatttcaaccgtgaatctcctagttatccatctcctaagccaccaaccagtatgttcgctagcactttctttatgcaagatgggacccacaattcttctgacctttggagttcatcaaatgggatgagccagcctggttttggtggaattctggggacctccacttcccacatgtctcaatccagtagttatggcaaccttcattcacatgaccgcttgagttatcctccacactcagtttcaccaacagacataaacacgagtcttccaccaatgtccagctttcatcgcggcagtaccagcagttcaccttacgttgctgcctcacacactcctcccatcaatggatcagacagcattctaggaaccagagggaatgctgctggaagctcacagacaggtgatgcacttggaaaggctttggcatctatttattctcctgaccataccagcagtagttttccgtcaaatccatcaacaccagttggatcaccttcacctctcacaggtaccagtcagtggccaagacctggagggcaagcaccttcatccccaagctatgaaaactcactccactccctgcagtctcgaatggaggatcgtttagacagactggatgatgcaatccatgtgctgcggaaccatgctgtgggaccttccaccagtttgcctgctggtcacagtgatatacatagtttattgggaccatcccataatgcaccaattggaagcctcaattcaaactatggaggatcaagccttgttgcaagcagtcgatcagcttcaatggttggaactcatcgggaagactctgtcagtctcaatggcaatcattcagtcctgtctagtacagtcactacttcaagcacagacctgaaccataaaacacaagaaaattatagaggtggcttgcaaagtcagtctggaactgttgttacaacagaaatcaagactgaaaacaaagaaaaggatgaaaaccttcatgaacctccttcatcagatgacatgaagtcagatgatgaatcctcccaaaaagatatcaaggtttcatctagaggcagaacaagcagtactaatgaagatgaggatttgaaccctgaacagaagatagaaagggagaaggagaggcggatggctaacaatgccagagaacgcttacgcgtgcgggatattaatgaagcattcaaagagcttggccgaatgtgtcagcttcacttgaagagtgaaaaaccccaaacaaaactccttattcttcatcaagccgtggcagtcatccttagtctagaacagcaagtcagagagaggaaccttaaccccaaagcagcctgccttaagagaagggaagaagaaaaagtttctgccgtatcggcagagccgccaaccacactgccaggaacccatcctgggcttagtgaaactaccaaccctatgggtcatatgtaaacatcagccagttccagagttatcagtaggctagatagaaggtgacctctcctcataaggacttggacaactcagattatctgaagacacaaacctgacaggagggagaagaaaaaacaaaacacttgaaccaagaaactcaaatgtaatcctacgatcaaagcaactggtcaacacttccatcagaagtgaagataggaagctcatcagatagaacatcagcccatgagatgtttgcaacaaatcttttgttgcaagcagtgtgtcgcttctgcacaatcagagactgtctcgatctctccactcaccgtggaagttgccttgtgcctaaactgaattgacaaatgcattgtaactacaaattttatttattgttatgaaactgtaaggtctacatataaagggaaaaagttaatgtggaaagctgatctacactcagctgatgccagcatacattaaagcggttcacgtgcagagaacaaagcagtgacaaccattggcccttagcattcccggcatacctattagtgtcttaaaaaggaagggaaaagtcttttgttgccctctcctatcctcttgccatatgaatagcgttttccatgaaataggaaaatattacttggtatagcatttctcttgctctcattttttgatttatttttattttctctttgtgggtgttatatttgatctctaaatctgaacagtttatggtcacagtccagcctcctccgtgcagccctgtgtgctttgcacatttaccttacagtggtaagcagagaccatctgtgaccatagcctagctagcattttaaaaggggaaattttgttctctaggttttcccccaaataaacattgctttatttctaataataaccaagacttttcaagcttctagatctcataggaaagcttgtaatagcaaaattgtaaattacaagggaagaatctactttttagaaatcgctttgttttccaagcagtaagtactacatacagtacttgtaaagtgttagctgtaagtaagcacaaaatacatttaaaatacaaagacgattttttcaggctgtgattatggtgaacataacaaaacccagtagtcaccaaggcaggtagtgtgataaatgaacacaccactctgaggctaattacctaatggaatacaagagcaatggtcacccgtatttccttatcctagcctttatttctctgtcatttggatggctggtcaatggggaagaattgagtgggtgatttaatcaactgcaaaccatctgcccctgtcccaaaatgatgagccagattagcattaaaccagtacttgtcagtccatcttaatactgttcattaaggcactctctgtctctaatccttaggagttgttttaaaagacataatcactttgaacttccatgaaacctgtcttccaccacaacaaccctgggagagaaaaacatgctaaaggaggtatcttggcttaataattccttatagccaatatcaacagtggcaatcagcacacagaggaaaggacccaaatcactatgtagcttaaagatttctgttaatttgaaagaacaaaaacaagacagaacttctggtactctaatcaggatgattcctaacaagtcagtcatttgtgaacttagtggactttttggttactttaatttgcatatattctccagttacatcggactctatctgtggccttgttcttcatttcagtgttaatcagctaaacagaagttgttgcttatgatgtgtgagtgaacatatgccactgcctggcctttttttcttcagagcttgttgtctttttcgctatattagactttgcagtatgcccagaagctttccttcataaaatagaaagaaaaaaacatttggcttatttttcactgtagctagtcttttatacaataatcttgtaagaaaattcttgaattctaaatattactctttctagatt

SEQ ID NO: 404836 - DNA, 3915 bp, Homo sapiens
gtcttctttctctgggcatttgtagctatgcctcagtgtgtggagtctgctggggaacgctaaaagggctaagatgtcagctattgtaaagcttttttcttgtcttaaaaatggagtttgtgacaactagctagcgctgaatggacttctggttggcttcttggtggaaggaatgtgttatttcaccctggacggagtcatggagtgtccagatcccggaaaaacatcagagagaggctcattttccctgtacagcagagatactggattaccaggctgtcaatctagtctcctgagacaagatctggggcttgggagcccagcacagctatcttcttcaggaaaacctgggacagcatactattcattctctgctacaagttccaggaggagaccactccatgactctgcagcgcttgatcccttgcaagcaaaaaaagtcagaaaggtgcctcctggtttgccttcttctgtatatgcaccatccccaaattcagatgatttcaaccgtgaatctcctagttatccatctcctaagccaccaaccagtatgttcgctagcactttctttatgcaagatgggacccacaattcttctgacctttggagttcatcaaatgggatgagccagcctggttttggtggaattctggggacctccacttcccacatgtctcaatccagtagttatggcaaccttcattcacatgaccgcttgagttatcctccacactcagtttcaccaacagacataaacacgagtcttccaccaatgtccagctttcatcgcggcagtaccagcagttcaccttacgttgctgcctcacacactcctcccatcaatggatcagacagcattctaggaaccagagggaatgctgctggaagctcacagacaggtgatgcacttggaaaggctttggcatctatttattctcctgaccataccagcagtagttttccgtcaaatccatcaacaccagttggatcaccttcacctctcacaggtaccagtcagtggccaagacctggagggcaagcaccttcatccccaagctatgaaaactcactccactccctgcagtctcgaatggaggatcgtttagacagactggatgatgcaatccatgtgctgcggaaccatgctgtgggaccttccaccagtttgcctgctggtcacagtgatatacatagtttattgggaccatcccataatgcaccaattggaagcctcaattcaaactatggaggatcaagccttgttgcaagcagtcgatcagcttcaatggttggaactcatcgggaagactctgtcagtctcaatggcaatcattcagtcctgtctagtacagtcactacttcaagcacagacctgaaccataaaacacaagaaaattatagaggtggcttgcaaagtcagtctggaactgttgttacaacagaaatcaagactgaaaacaaagaaaaggatgaaaaccttcatgaacctccttcatcagatgacatgaagtcagatgatgaatcctcccaaaaagatatcaaggtttcatctagaggcagaacaagcagtactaatgaagatgaggatttgaaccctgaacagaagatagaaagggagaaggagaggcggatggctaacaatgccagagaacgcttacgcgtgcgggatattaatgaagcattcaaagagcttggccgaatgtgtcagcttcacttgaagagtgaaaaaccccaaacaaaactccttattcttcatcaagccgtggcagtcatccttagtctagaacagcaagtcagagagaggaaccttaaccccaaagcagcctgccttaagagaagggaagaagaaaaagtttctgccgtatcggcagagccgccaaccacactgccaggaacccatcctgggcttagtgaaactaccaaccctatgggtcatatgtaaacatcagccagttccagagttatcagtaggctagatagaaggtgacctctcctcataaggacttggacaactcagattatctgaagacacaaacctgacaggagggagaagaaaaaacaaaacacttgaaccaagaaactcaaatgtaatcctacgatcaaagcaactggtcaacacttccatcagaagtgaagataggaagctcatcagatagaacatcagcccatgagatgtttgcaacaaatcttttgttgcaagcagtgtgtcgcttctgcacaatcagagactgtctcgatctctccactcaccgtggaagttgccttgtgcctaaactgaattgacaaatgcattgtaactacaaattttatttattgttatgaaactgtaaggtctacatataaagggaaaaagttaatgtggaaagctgatctacactcagctgatgccagcatacattaaagcggttcacgtgcagagaacaaagcagtgacaaccattggcccttagcattcccggcatacctattagtgtcttaaaaaggaagggaaaagtcttttgttgccctctcctatcctcttgccatatgaatagcgttttccatgaaataggaaaatattacttggtatagcatttctcttgctctcattttttgatttatttttattttctctttgtgggtgttatatttgatctctaaatctgaacagtttatggtcacagtccagcctcctccgtgcagccctgtgtgctttgcacatttaccttacagtggtaagcagagaccatctgtgaccatagcctagctagcattttaaaaggggaaattttgttctctaggttttcccccaaataaacattgctttatttctaataataaccaagacttttcaagcttctagatctcataggaaagcttgtaatagcaaaattgtaaattacaagggaagaatctactttttagaaatcgctttgttttccaagcagtaagtactacatacagtacttgtaaagtgttagctgtaagtaagcacaaaatacatttaaaatacaaagacgattttttcaggctgtgattatggtgaacataacaaaacccagtagtcaccaaggcaggtagtgtgataaatgaacacaccactctgaggctaattacctaatggaatacaagagcaatggtcacccgtatttccttatcctagcctttatttctctgtcatttggatggctggtcaatggggaagaattgagtgggtgatttaatcaactgcaaaccatctgcccctgtcccaaaatgatgagccagattagcattaaaccagtacttgtcagtccatcttaatactgttcattaaggcactctctgtctctaatccttaggagttgttttaaaagacataatcactttgaacttccatgaaacctgtcttccaccacaacaaccctgggagagaaaaacatgctaaaggaggtatcttggcttaataattccttatagccaatatcaacagtggcaatcagcacacagaggaaaggacccaaatcactatgtagcttaaagatttctgttaatttgaaagaacaaaaacaagacagaacttctggtactctaatcaggatgattcctaacaagtcagtcatttgtgaacttagtggactttttggttactttaatttgcatatattctccagttacatcggactctatctgtggccttgttcttcatttcagtgttaatcagctaaacagaagttgttgcttatgatgtgtgagtgaacatatgccactgcctggcctttttttcttcagagcttgttgtctttttcgctatattagactttgcagtatgcccagaagctttccttcataaaatagaaagaaaaaaacatttggcttatttttcactgtagctagtcttttatacaataatcttgtaagaaaattcttgaattctaaatattactctttctagatt

SEQ ID NO: 404837 - DNA, 1370 bp, Homo sapiens
cgcggtggtgaggccgcctcagcgaaaaaaatgtccgcctgaagagacccacaagttctattcggggggaccgacagcccgccccgggaggaaggggcggccaggcccgaaagccgcctccccctcccagacccgagagctcgtgcggggcaaagtgaaccgagccgctgggcggtgcaaggggaagcccaagcccgttctcccggccaaagtgaactttaatcggggtggttggatgcggagacggggcggcaggacctgctagaagtggccgaagatgaatccccagcaacaacgcatggccgctatagggaccgacaaggagctgagcgacctactggacttcagtgcgatgttttccccacctgttaatagtgggaaaactagaccaactacactgggaagcagtcaattcagtggatcaggtattgatgaaagaggaggtacaacatcttggggaacaagtggtcaaccaagtccttcctatgattcatctagaggttttacagacagccctcattacagtgatcacttgaatgacagtcgattaggagcccatgaaggcttgtccccaacacctttcatgaactcaaatctgatgggaaaaacatcagagagaggctcattttccctgtacagcagagatactggattaccaggctgtcaatctagtctcctgagacaagatctggggcttgggagcccagcacagctatcttcttcaggaaaacctgggacagcatactattcattctctgctacaagttccaggaggagaccactccatgactctgcagcgcttgatcccttgcaagcaaaaaaagtcagaaaggtgcctcctggtttgccttcttctgtatatgcaccatccccaaattcagatgatttcaaccgtgaatctcctagttatccatctcctaagccaccaaccagtatgttcgctagcactttctttatgcaagatgggacccacaattcttctgacctttggagttcatcaaatgggatgagccagcctggttttggtggaattctggggacctccacttcccacatgtctcaatccagtagttatggcaaccttcattcacatgaccgcttgagttatcctccacactcagtttcaccaacagacataaacacgagtcttccaccaatgtccagctttcatcgcggcagtaccagcagttcaccttacgttgctgcctcacacactcctcccatcaatggatcagacagcattctaggaaccagagggaatgctgctggaagctcacagacaggtgatgcacttggaaaggctttggcatctatttattttcctgaccataccagctgtacatttggaaaaataaaactttattaaatca

SEQ ID NO: 404838 - DNA, 760 bp, Homo sapiens
cgcggtggtgaggccgcctcagcgaaaaaaatgtccgcctgaagagacccacaagttctattcggggggaccgacagcccgccccgggaggaaggggcggccaggcccgaaagccgcctccccctcccagacccgagagctcgtgcggggcaaagtgaaccgagccgctgggcggtgcaaggggaagcccaagcccgttctcccggccaaagtgaactttaatcggggtggttggatgcggagacggggcggcaggacctgctagaagtggccgaagatgaatccccagcaacaacgcatggccgctatagggaccgacaaggagctgagcgacctactggacttcagtgcgatgttttccccacctgttaatagtgggaaaactagaccaactacactgggaagcagtcaattcagtggatcaggtattgatgaaagaggaggtacaacatcttggggaacaagtggtcaaccaagtccttcctatgattcatctagaggttttacagacagccctcattacagtgatcacttgaatgacagtcgattaggagcccatgaaggcttgtccccaacacctttcatgaactcaaatctgatggatatgccctgcgtccaagcccaatatagcccttcccctccaggttccagttatgcggcgcagacatacagctcggaatacaccacggagatcatgaaccccgactacaccaagctgaccatggaccttggcagcactgagatcacggctacagccacc

SEQ ID NO: 404839 - DNA, 560 bp, Homo sapiens
aatactgcaaaaggagaaacaagtcgattaaattttaagaagtgtaaatacaccaaaggtgagaattattcactggtgtaacttaggaatcaagttgaattacacagatagagaggacctttaaaacatcaggttaaattgagaatattctagagcagaaataaaattgacagaattctagaatagaatacaggtaacaatatctgcgtttgttaatttaaaagagagatagaggttttggtttttcctcatctaaaagagaggtctgcatctctgaaggaataataaacttggcatgatacttgcatggacactgagcagccaaaacaagatggctctagggactaaggtggacagtattgtatacttttggctggtgcatttagacatctctcaaattttcaaatgccatcttgagacaatgcagttacattttatttaatgcaattgcattaaataaaaagagacatttaaaaaatgttatatgaggtgatgctcacaaagcaaaagttttgagatctttaaaaacttaaagtataaaggggtctggaaactaagaa

SEQ ID NO: 404840 - DNA, 401 bp, Homo sapiens
accactagacctcccactggactgcggctacagccgcctccctgcagccaaagagctctgacatccagatctcaccccatcaatctcccttcaaacatcaaccacaagaccagatccgagttttctgcagacacaccctcagtgaccacagccttccacactagtccacaaccaggaaaaagtggcagtcttgggaactgctaacccaggatccctagtgcaccttcacaaccctttctgatctggcttctttgacgctgggttcctgggtgtgccttggctctagtccagcaggcctcagccagactggtcctaccaggatacctctgacgtctctgcctggtgaactcctacccagccttcaaaactcagccctcatattacctcctccatgaagcctt

SEQ ID NO: 404841 - DNA, 450 bp, Homo sapiens
tttttctctcttgcctcatggccctttctttcttccatctgcaaagcaagaaacatgacgctgattccttttctgctgtctctctggttctctcgctctgcctcctccttccatttttaaggacccttatgattacactgggcttatcgggataatccaggataatcttcctatcttaaactgattagcaactttaattcatctgcaaccttaattcccctttgccatataaggtcacatattcgcaggttccagggattagaacatggacctctttggggggctactatttgcctagcacactacccaaactttgactcctactcttcagggtaatgctgttccatagagaatcagatacaatccatcttaaaatgtataccggcagcccaaatccatcccttctcccatttctcatccagcatacaggtgaagaaacaatatggcaga

SEQ ID NO: 404842 - DNA, 474 bp, Homo sapiens
accctgaccaagaggaatcctttgagggtctgcagtatggaaagaaattctctgaggcgctaaataaaatcctgctctgaggtgcaaggaggacttttttgaaattaatagctaacaaagtttatgcagaccccaaaaggaaaaacagaaaggaattggaatcattttaaaaacagagtcggtagataataaaacttcacggtggtggtgttgtctttcatcaagaagcacgaagtgctcacaggctttaattacatcttcatccctacggccccttctgaagtcggtagatgcacgttaatagtacctttcgttttaggcatggacacattccggtaccagaagctttagcaattctccccaaggcaagcagagtacagagctggatcggggcgcaatgactctccaggccagcatcccatgctacctccagttgtatttcctgactccgcagctgaaaccaaggacttcatt

SEQ ID NO: 404843 - DNA, 779 bp, Homo sapiens
gcccctctccccctttccctcctcccagcgcttgggggcctgtgcagtgggactgattgccgtgggtgtcggggcacagcttgtcctgagtcagaccataatccagggggctacccctggctctctgttgccagtggtcatcatcgcagtgggtgtcttcctcttcctggtggcttttgtgggctgctgcggggcctgcaaggagaactattgtcttatgatcacgtttgccatctttctgtctcttatcatgttggtggaggtggccgcagccattgctggctatgtgtttagagataaggtgatgtcagagtttaataacaacttccggcagcagatggagaattacccgaaaaacaaccacactgcttcgatcctggacaggatgcaggcagattttaagtgctgtggggctgctaactacacagattgggagaaaatcccttccatgtcgaagaaccgagtccccgactcctgctgcattaatgttactgtgggctgtgggattaatttcaacgagaaggcgatccataaggagggctgtgtggagaagattgggggctggctgaggaaaaatgtgctggtggtagctgcagcagcccttggaattgcttttgtcgaggttttgggaattgtctttgcctgctgcctcgtgaagagtatcagaagtggctacgaggtgatgtaggggtctggtctcctcagcctcctcatctgggggagtggaatagtatcctccaggtttttcaattaaacggattattttttcagaccgaaaa

SEQ ID NO: 404844 - DNA, 648 bp, Homo sapiens
ggaagacctttgtgagtgtccaggaccggctgtgccaaaacgggcccctgtaatgcatagactccaaacttgacttctgtcctttgctcctgcagtttgccatctttctgtctcttatcatgttggtggaggtggccgcagccattgctggctatgtgtttagagataaggtgatgtcagagtttaataacaacttccggcagcagatggagaattacccgaaaaacaaccacactgcttcgatcctggacaggatgcaggcagattttaagtgctgtggggctgctaactacacagattgggagaaaatcccttccatgtcgaagaaccgagtccccgactcctgctgcattaatgttactgtgggctgtgggattaatttcaacgagaaggcgatccataaggagggctgtgtggagaagattgggggctggctgaggaaaaatgtgctggtggtagctgcagcagcccttggaattgcttttgtcgaggttttgggaattgtctttgcctgctgcctcgtgaagagtatcagaagtggctacgaggtgatgtaggggtctggtctcctcagcctcctcatctgggggagtggaatagtatcctccaggtttttcaattaaacggattattttttcagaccgaaaa

SEQ ID NO: 404845 - DNA, 1043 bp, Homo sapiens
  misc_feature (969)..(969): n is a, c, g, or t
gacgcccggagactggcgggccgagggtcggcgtcaggctcaagcccctgccggcgcccttggatctgtcctgggccccagaggcggcggggcggggtccgggcttcgcggccgtcgcccccacccctctcctgcgggcccggcagccatggcggtggaaggaggaatgaaatgtgtgaagttcttgctctacgtcctcctgctggccttttgcgcctgtgcagtgggactgattgccgtgggtgtcggggcacagcttgtcctgagtcagaccataatccagggggctacccctggctctctgttgccagtggtcatcatcgcagtgggtgtcttcctcttcctggtggcttttgtgggctgctgcggggcctgcaaggagaactattgtcttatgatcacgtttgccatctttctgtctcttatcatgttggtggaggtggccgcagccattgctggctatgtgtttagagataaggtgatgtcagagtttaataacaacttccggcagcagatggagaattacccgaaaaacaaccacactgcttcgatcctggacaggatgcaggcagattttaagtgctgtggggctgctaactacacagattgggagaaaatcccttccatgtcgaagaaccgagtccccgactcctgctgcattaatgttactgtgggctgtgggattaatttcaacgagaaggcgatccataaggagggctgtgtggagaagattgggggctggctgaggaaaaatgtgctggtggtagctgcagcagcccttggaattgcttttgtcgaggttttgggaattgtctttgcctgctgcctcgtgaagagtatcagaagtggctacgaggtgatgtaggggtctggtctcctcagcctcctcatctgggggagtggaatagtatcctccaggtttttcaattaaacggattattttttcagaccgaaaaaaaaaaaaacacnaaaacaacagacaaacaaaagagggcgaagcgaaaaagaggaccccagagaggggccaaaggaaacgagcaaca

SEQ ID NO: 404846 - DNA, 896 bp, Homo sapiens
  misc_feature (711)..(711): n is a, c, g, or t
  misc_feature (774)..(774): n is a, c, g, or t
  misc_feature (808)..(808): n is a, c, g, or t
  misc_feature (824)..(824): n is a, c, g, or t
gcgggtttccgggtgggaggggccgggaatcggggccgtgaagggaagccctcgagggccggccgggagcccggaaaccgaggtcccccttcggccagttttaatccccccgccctcccctctgccccagggcccggcagccatggcggtggaaggaggaatgaaatgtgtgaagttcttgctctacgtcctcctgctggccttttgcgcctgtgcagtgggactgattgccgtgggtgtcggggcacagcttgtcctgagtcagaccataatccagggggctacccctggctctctgttgccagtggtcatcatcgcagtgggtgtcttcctcttcctggtggcttttgtgggctgctgcggggcctgcaaggagaactattgtcttatgatcacgtttgccatctttctgtctcttatcatgttggtggaggtggccgcagccattgctggctatgtgtttagagataaggtgatgtcagagtttaataacaacttccggcagcagatggagaattacccgaaaaacaaccacactgcttcgatcctggacaggatgcaggcagattttaagtgctgtggggctgctaactacacagattgggagaaaatcccttccatgtcgaagaaccgagtccccgactcctgctgcattaatgttactgtgggctgtgggattaatttcaacgagaaggcgatccataaggaganggaaggggctggttgttgggaaaaaaaaattggggggggctgggcttgaaaggaaaaaaaatnttgccttggggttgggtaaaccttgccaaccaanccccctttggggaaantttggcttttttggttccaaaaggtttttttggggggaaaatttggttctttttggcccttggccttgccct

SEQ ID NO: 404847 - DNA, 870 bp, Homo sapiens
ggaagacctttgtgagtgtccaggaccggctgtgccaaaacgggcccctgtaatgcatagactccaaacttgacttctgtcctttgctcctgcagtttgccatctttctgtctcttatcatgttggtggaggtggccgcagccattgctggctatgtgtttagagataaggtgatgtcagagtttaataacaacttccggcagcagatggagaattacccgaaaaacaaccacactgcttcgatcctggacaggatgcaggcagattttaagtgctgtggggctgctaactacacagattgggagaaaatcccttccatgtcgaagaaccgagtccccgactcctgctgcattaatgttactgtgggctgtgggattaatttcaacgagaaggcgatccataaggagggctgtgtggagaagattgggggctggctgaggaaaaatgtgctggtggtagctgcagcagcccttggaattgcttttgtcgaggttttgggaattgtctttgcctgctgcctcgtgaagagtatcagaagtggctacgaggtgatgtaggggtctggtctcctcagcctcctcatctgggggagtggaatagtatcctccaggtttttcaattaaacggattattttttcagaccgaaaaaaacaaaacaacagacaaaacaacaaaaaccccagagcacataatcccggggagcgggcaaaaacgcggcacagaactggccccacggggcacacacagggaaccctgaacccacaggacgcgctggcaacaacaaggggaaaaactcaggccggaacacccatgttgcaggaaagcgcagaaaaaatcagaaaatacacccggcgaaacacgcgaataaga

SEQ ID NO: 404848 - DNA, 588 bp, Homo sapiens
gcgggtttccgggtgggaggggccgggaatcggggccgtgaagggaagccctcgagggccggccgggagcccggaaaccgaggtcccccttcggccagttttaatccccccgccctcccctctgccccagggcccggcagccatggcggtggaaggaggaatgaaatgtgtgaagttcttgctctacgtcctcctgctggccttttgcgcctgtgcagtgggactgattgccgtgggtgtcggggcacagcttgtcctgagtcagaccataatccagggggctacccctggctctctgttgccagtggtcatcatcgcagtgggtgtcttcctcttcctggtggcttttgtgggctgctgcggggcctgcaaggagaactattgtcttatgatcacgtttgccatctttctgtctcttatcatgttggtggaggtggccgcagccattgctggctatgtgtttagagataaggtgatgtcacaggttactagcaacttcccggcagcaaaggggaatacccgaataccacccacactgcttaaccctggacagaagcacgccgatcttcgcgcccccggctgctaccc

SEQ ID NO: 404849 - DNA, 266 bp, Homo sapiens
gggacacatcactcttgctcccttttcctcttcccttctcctggcctaactggccagaggaacccggtctcagtcacagctgatgcgcgcgtgggatgtgcactggaggatagtgaggggggcagttctgggagagaattgagctgggagccctggaggcctgtagaaagcattattctaggtcagaaatacgtgtcttgaggtcaaggctttctgggaggtttttgaatttggtcatgtccctgattaaagagccgggaggggat

SEQ ID NO: 404850 - DNA, 958 bp, Homo sapiens
agccagcatgctgcccccttggcggcggctcggcgcccccggaaaaaatttttcccggttggccccaacccgggcaagggcggaggagccccggagccgcggcgggagaggaacgcgcagccagccttgggaagcccaggcccggcagccatggcggtggaaggaggaatgaaatgtgtgaagttcttgctctacgtcctcctgctggccttttgcgcctgtgcagtgggactgattgccgtgggtgtcggggcacagcttgtcctgagtcagaccataatccagggggctacccctggctctctgttgccagtggtcatcatcgcagtgggtgtcttcctcttcctggtggcttttgtgggctgctgcggggcctgcaaggagaactattgtcttatgatcacgtttgccatctttctgtctcttatcatgttggtggaggtggccgcagccattgctggctatgtgtttagagataaggtgatgtcagagtttaataacaacttccggcagcagatggagaattacccgaaaaacaaccacactgcttcgatcctggacaggatgcaggcagattttaagtgctgtggggctgctaactacacagattgggagaaaatcccttccatgtcgaagaaccgagtccccgactcctgctgcattaatgttactgtgggctgtgggattaatttcaacgagaaggcgatccataaggagggctgtgtggagaagattgggggctggctgaggaaaaatgtgctggtggtagctgcagcagcccttggaattgcttttgtcgaggttttgggaattgtctttgcctgctgcctcgtgaagagtatcagaagtggctacgaggtgatgtaggggtctggtctcctcagcctcctcatctgggggagtggaatagtatcctccaggtttttcaattaaacggattattttttcagaccgaaaa

SEQ ID NO: 404851 - DNA, 947 bp, Homo sapiens
tccctggtgtgtctagtggttaggattcggcgctctcaccgccgcggcccgggttcgattcccggtcagggaacgagccccggagccgcggcgggagaggaacgcgcagccagccttgggaagcccaggcccggcagccatggcggtggaaggaggaatgaaatgtgtgaagttcttgctctacgtcctcctgctggccttttgcgcctgtgcagtgggactgattgccgtgggtgtcggggcacagcttgtcctgagtcagaccataatccagggggctacccctggctctctgttgccagtggtcatcatcgcagtgggtgtcttcctcttcctggtggcttttgtgggctgctgcggggcctgcaaggagaactattgtcttatgatcacgtttgccatctttctgtctcttatcatgttggtggaggtggccgcagccattgctggctatgtgtttagagataaggtgatgtcagagtttaataacaacttccggcagcagatggagaattacccgaaaaacaaccacactgcttcgatcctggacaggatgcaggcagattttaagtgctgtggggctgctaactacacagattgggagaaaatcccttccatgtcgaagaaccgagtccccgactcctgctgcattaatgttactgtgggctgtgggattaatttcaacgagaaggcgatccataaggagggctgtgtggagaagattgggggctggctgaggaaaaatgtgctggtggtagctgcagcagcccttggaattgcttttgtcgaggttttgggaattgtctttgcctgctgcctcgtgaagagtatcagaagtggctacgaggtgatgtaggggtctggtctcctcagcctcctcatctgggggagtggaatagtatcctccaggtttttcaattaaacggattattttttcagaccgaaaa

SEQ ID NO: 404852 - DNA, 1160 bp, Homo sapiens
  misc_feature (1086)..(1086): n is a, c, g, or t
ttcttccgggtaggggccacgtggccctggccgggcggggggctcggcccaccccgcgccgggcccagtgactcaggccgcagctgttaccgcgtcacatgagggaggccggcggccactcggcgggggaggggaccgtggctggagcccggggcggggccgcgcggcaggcggggcgggagccggggggcgcagctagagagccccggagccgcggcgggagaggaacgcgcagccagccttgggaagcccaggcccggcagccatggcggtggaaggaggaatgaaatgtgtgaagttcttgctctacgtcctcctgctggccttttgcgcctgtgcagtgggactgattgccgtgggtgtcggggcacagcttgtcctgagtcagaccataatccagggggctacccctggctctctgttgccagtggtcatcatcgcagtgggtgtcttcctcttcctggtggcttttgtgggctgctgcggggcctgcaaggagaactattgtcttatgatcacgtttgccatctttctgtctcttatcatgttggtggaggtggccgcagccattgctggctatgtgtttagagataaggtgatgtcagagtttaataacaacttccggcagcagatggagaattacccgaaaaacaaccacactgcttcgatcctggacaggatgcaggcagattttaagtgctgtggggctgctaactacacagattgggagaaaatcccttccatgtcgaagaaccgagtccccgactcctgctgcattaatgttactgtgggctgtgggattaatttcaacgagaaggcgatccataaggagggctgtgtggagaagattgggggctggctgaggaaaaatgtgctggtggtagctgcagcagcccttggaattgcttttgtcgaggttttgggaattgtctttgcctgctgcctcgtgaagagtatcagaagtggctacgaggtgatgtaggggtctggtctcctcagcctcctcatctgggggagtggaatagtatcctccaggtttttcaattaaacggattattttttcagaccgaaaaaaaaaaaaacacnaaaacaacagacaaacaaaagagggcgaagcgaaaaagaggaccccagagaggggccaaaggaaacgagcaaca

SEQ ID NO: 404853 - DNA, 1208 bp, Homo sapiens
ttcttccgggtaggggccacgtggccctggccgggcggggggctcggcccaccccgcgccgggcccagtgactcaggccgcagctgttaccgcgtcacatgagggaggccggcggccactcggcgggggaggggaccgtggctggagcccggggcggggccgcgcggcaggcggggcgggagccggggggcgcagctagagagccccggagccgcggcgggagaggaacgcgcagccagccttgggaagcccaggcccggcagccatggcggtggaaggaggaatgaaatgtgtgaagttcttgctctacgtcctcctgctggccttttgcgcctgtgcagtgggactgattgccgtgggtgtcggggcacagcttgtcctgagtcagaccataatccagggggctacccctggctctctgttgccagtggtcatcatcgcagtgggtgtcttcctcttcctggtggcttttgtgggctgctgcggggcctgcaaggagaactattgtcttatgatcacgtttgccatctttctgtctcttatcatgttggtggaggtggccgcagccattgctggctatgtgtttagagataaggtgatgtcagagtttaataacaacttccggcagcagatggagaattacccgaaaaacaaccacactgcttcgatcctggacaggatgcaggcagattttaagtgctgtggggctgctaactacacagattgggagaaaatcccttccatgtcgaagaaccgagtccccgactcctgctgcattaatgttactgtgggctgtgggattaatttcaacgagaaggcgatccataaggagggctgtgtggagaagattgggggctggctgaggaaaaatgtgctggtggtagctgcagcagcccttggaattgcttttgtcgaggttttgggaattgtctttgcctgctgcctcgtgaagagtatcagaagtggctacgaggtgatgtaggggtctggtctcctcagcctcctcatctgggggagtggaatagtatcctccaggtttttcaattaaacggattattttttcagaccgaaaaaaaaaaaaaaaaaaaaaaaaaaaaattttttggggccgccctggccccgaagaaaagtttttaaacacaactcgggttggggccgccggcccaaagtcaaggacaacgggccaacaggcgggccaaaggaaaccg

SEQ ID NO: 404854 - DNA, 1245 bp, Homo sapiens
gtggcttcggggaagggcttcctccccttttctcagactaggatccctggaaaatggagaagctgtgctaatagaggggggccagaaatccccactctagaatgctgtagaatgttgggagacacccaggatgtgagccagggactttctggaagtgtttgttctggccccacccgaccccaggcagtccccagctgtctgcacagtcggatggggagggggcttgcacagagttggagccagaggagagagctggctcatcccctacggtaggatggggaaacctcacagaccacattgtcacccggcctcagctctccgccccggcgctcagagggtaactctcacccacctcgtccgcttctctgaaccagagtgacccaggctgcgctccgccccgctctcctaccccgagttggcacggaggcccggcagccatggcggtggaaggaggaatgaaatgtgtgaagttcttgctctacgtcctcctgctggccttttgcgcctgtgcagtgggactgattgccgtgggtgtcggggcacagcttgtcctgagtcagaccataatccagggggctacccctggctctctgttgccagtggtcatcatcgcagtgggtgtcttcctcttcctggtggcttttgtgggctgctgcggggcctgcaaggagaactattgtcttatgatcacgtttgccatctttctgtctcttatcatgttggtggaggtggccgcagccattgctggctatgtgtttagagataaggtgatgtcagagtttaataacaacttccggcagcagatggagaattacccgaaaaacaaccacactgcttcgatcctggacaggatgcaggcagattttaagtgctgtggggctgctaactacacagattgggagaaaatcccttccatgtcgaagaaccgagtccccgactcctgctgcattaatgttactgtgggctgtgggattaatttcaacgagaaggcgatccataaggagggctgtgtggagaagattgggggctggctgaggaaaaatgtgctggtggtagctgcagcagcccttggaattgcttttgtcgaggttttgggaattgtctttgcctgctgcctcgtgaagagtatcagaagtggctacgaggtgatgtaggggtctggtctcctcagcctcctcatctgggggagtggaatagtatcctccaggtttttcaattaaacggattattttttcagaccgaaaa

SEQ ID NO: 404855 - DNA, 950 bp, Homo sapiens
gcgggtttccgggtgggaggggccgggaatcggggccgtgaagggaagccctcgagggccggccgggagcccggaaaccgaggtcccccttcggccagttttaatccccccgccctcccctctgccccagggcccggcagccatggcggtggaaggaggaatgaaatgtgtgaagttcttgctctacgtcctcctgctggccttttgcgcctgtgcagtgggactgattgccgtgggtgtcggggcacagcttgtcctgagtcagaccataatccagggggctacccctggctctctgttgccagtggtcatcatcgcagtgggtgtcttcctcttcctggtggcttttgtgggctgctgcggggcctgcaaggagaactattgtcttatgatcacgtttgccatctttctgtctcttatcatgttggtggaggtggccgcagccattgctggctatgtgtttagagataaggtgatgtcagagtttaataacaacttccggcagcagatggagaattacccgaaaaacaaccacactgcttcgatcctggacaggatgcaggcagattttaagtgctgtggggctgctaactacacagattgggagaaaatcccttccatgtcgaagaaccgagtccccgactcctgctgcattaatgttactgtgggctgtgggattaatttcaacgagaaggcgatccataaggagggctgtgtggagaagattgggggctggctgaggaaaaatgtgctggtggtagctgcagcagcccttggaattgcttttgtcgaggttttgggaattgtctttgcctgctgcctcgtgaagagtatcagaagtggctacgaggtgatgtaggggtctggtctcctcagcctcctcatctgggggagtggaatagtatcctccaggtttttcaattaaacggattattttttcagaccgaaaa

SEQ ID NO: 404856 - DNA, 891 bp, Homo sapiens
ttaggtcagacgagccggtgttaatcggacgaggcggagccgggggtaaggaacgcgcaccagcctgggaaggcccggcagccatggcggtggaaggaggaatgaaatgtgtgaagttcttgctctacgtcctcctgctggccttttgcgcctgtgcagtgggactgattgccgtgggtgtcggggcacagcttgtcctgagtcagaccataatccagggggctacccctggctctctgttgccagtggtcatcatcgcagtgggtgtcttcctcttcctggtggcttttgtgggctgctgcggggcctgcaaggagaactattgtcttatgatcacgtttgccatctttctgtctcttatcatgttggtggaggtggccgcagccattgctggctatgtgtttagagataaggtgatgtcagagtttaataacaacttccggcagcagatggagaattacccgaaaaacaaccacactgcttcgatcctggacaggatgcaggcagattttaagtgctgtggggctgctaactacacagattgggagaaaatcccttccatgtcgaagaaccgagtccccgactcctgctgcattaatgttactgtgggctgtgggattaatttcaacgagaaggcgatccataaggagggctgtgtggagaagattgggggctggctgaggaaaaatgtgctggtggtagctgcagcagcccttggaattgcttttgtcgaggttttgggaattgtctttgcctgctgcctcgtgaagagtatcagaagtggctacgaggtgatgtaggggtctggtctcctcagcctcctcatctgggggagtggaatagtatcctccaggtttttcaattaaacggattattttttcagaccgaaaa

SEQ ID NO: 404857 - DNA, 917 bp, Homo sapiens
cggtatggagggggatagatgttggaaggagtcatgagatgttggaaggaggcatgagatgtaggaagccttccaacatctcatatctccttcaacttgcccggcagccatggcggtggaaggaggaatgaaatgtgtgaagttcttgctctacgtcctcctgctggccttttgcgcctgtgcagtgggactgattgccgtgggtgtcggggcacagcttgtcctgagtcagaccataatccagggggctacccctggctctctgttgccagtggtcatcatcgcagtgggtgtcttcctcttcctggtggcttttgtgggctgctgcggggcctgcaaggagaactattgtcttatgatcacgtttgccatctttctgtctcttatcatgttggtggaggtggccgcagccattgctggctatgtgtttagagataaggtgatgtcagagtttaataacaacttccggcagcagatggagaattacccgaaaaacaaccacactgcttcgatcctggacaggatgcaggcagattttaagtgctgtggggctgctaactacacagattgggagaaaatcccttccatgtcgaagaaccgagtccccgactcctgctgcattaatgttactgtgggctgtgggattaatttcaacgagaaggcgatccataaggagggctgtgtggagaagattgggggctggctgaggaaaaatgtgctggtggtagctgcagcagcccttggaattgcttttgtcgaggttttgggaattgtctttgcctgctgcctcgtgaagagtatcagaagtggctacgaggtgatgtaggggtctggtctcctcagcctcctcatctgggggagtggaatagtatcctccaggtttttcaattaaacggattattttttcagaccgaaaa

SEQ ID NO: 404858 - DNA, 799 bp, Homo sapiens
  misc_feature (28)..(28): n is a, c, g, or t
  misc_feature (54)..(55): n is a, c, g, or t
gctcgcacccatagctgacaccgacctngctctacgtcctcctgctggcccttnngcgcctgtgcagtgggactgattgccgtgggtgtcggggcacagcttgtcctgagtcagaccataatccagggggctacccctggctctctgttgccagtggtcatcatcgcagtgggtgtcttcctcttcctggtggcttttgtgggctgctgcggggcctgcaaggagaactattgtcttatgatcacgtttgccatctttctgtctcttatcatgttggtggaggtggccgcagccattgctggctatgtgtttagagataaggtgatgtcagagtttaataacaacttccggcagcagatggagaattacccgaaaaacaaccacactgcttcgatcctggacaggatgcaggcagattttaagtgctgtggggctgctaactacacagattgggagaaaatcccttccatgtcgaagaaccgagtccccgactcctgctgcattaatgttactgtgggctgtgggattaatttcaacgagaaggcgatccataaggagggctgtgtggagaagattgggggctggctgaggaaaaatgtgctggtggtagctgcagcagcccttggaattgcttttgtcgaggttttgggaattgtctttgcctgctgcctcgtgaagagtatcagaagtggctacgaggtgatgtaggggtctggtctcctcagcctcctcatctgggggagtggaatagtatcctccaggtttttcaattaaacggattattttttcagaccgaaaa

SEQ ID NO: 404859 - DNA, 809 bp, Homo sapiens
cattgcctcatctcatgcctcatccagtggcaagcctgtggggcaaggtgaatgtggaagatgctggaggagaaaccctgggaaggctcctggttgtctacccatggacccagaggcttgccactggatgagggcatgagatgagggcatgccactggatgagggcatgcacatcgcagtgggtgtcttcctcttcctggtggcttttgtgggctgctgcggggcctgcaaggagaactattgtcttatgatcacgtttgccatctttctgtctcttatcatgttggtggaggtggccgcagccattgctggctatgtgtttagagataaggtgatgtcagagtttaataacaacttccggcagcagatggagaattacccgaaaaacaaccacactgcttcgatcctggacaggatgcaggcagattttaagtgctgtggggctgctaactacacagattgggagaaaatcccttccatgtcgaagaaccgagtccccgactcctgctgcattaatgttactgtgggctgtgggattaatttcaacgagaaggcgatccataaggagggctgtgtggagaagattgggggctggctgaggaaaaatgtgctggtggtagctgcagcagcccttggaattgcttttgtcgaggttttgggaattgtctttgcctgctgcctcgtgaagagtatcagaagtggctacgaggtgatgtaggggtctggtctcctcagcctcctcatctgggggagtggaatagtatcctccaggtttttcaattaaacggattattttttcagaccgaaaa

SEQ ID NO: 404860 - DNA, 536 bp, Homo sapiens
gatgacaccatccctacagcagacgcgcagcattgcaggctatgtgtttagagataaggtgatgtcagagtttaataacaacttccggcagcagatggagaattacccgaaaaacaaccacactgcttcgatcctggacaggatgcaggcagattttaagtgctgtggggctgctaactacacagattgggagaaaatcccttccatgtcgaagaaccgagtccccgactcctgctgcattaatgttactgtgggctgtgggattaatttcaacgagaaggcgatccataaggagggctgtgtggagaagattgggggctggctgaggaaaaatgtgctggtggtagctgcagcagcccttggaattgcttttgtcgaggttttgggaattgtctttgcctgctgcctcgtgaagagtatcagaagtggctacgaggtgatgtaggggtctggtctcctcagcctcctcatctgggggagtggaatagtatcctccaggtttttcaattaaacggattattttttcagaccgaaaa

SEQ ID NO: 404861 - DNA, 1026 bp, Homo sapiens
ttcttccgggtaggggccacgtggccctggccgggcggggggctcggcccaccccgcgccgggcccagtgactcaggccgcagctgttaccgcgtcacatgagggaggccggcggccactcggcgggggaggggaccgtggctggagcccggggcggggccgcgcggcaggcggggcgggagccggggggcgcagctagagagccccggagccgcggcgggagaggaacgcgcagccagccttgggaagcccaggcccggcagccatggcggtggaaggaggaatgaaatgtgtgaagttcttgctctacgtcctcctgctggccttttgcgcctgtgcagtgggactgattgccgtgggtgtcggggcacagcttgtcctgagtcagaccataatccagggggctacccctggctctctgttgccagtggtcatcatcgcagtgggtgtcttcctcttcctggtggcttttgtgggctgctgcggggcctgcaaggagaactattgtcttatgatcacgtttgccatctttctgtctcttatcatgttggtggaggtggccgcagccattgctggctatgtgtttagagataaggtgatgtcagagtttaataacaacttccggcagcagatggagaattacctttaagtgctgtggggctgctaactacacagattgggagaaaatcccttccatgtcgaagaaccgagtccccgactcctgctgcattaatgttactgtgggctgtgggattaatttcaacgagaaggcgatccataaggagggctgtgtggagaagattgggggctggctgaggaaaaatgtgctggtggtagctgcagcagcccttggaattgcttttgtcgaggttttgggaattgtctttgcctgctgcctcgtgaagagtatcagaagtggctacgaggtgatgtaggggtctggtctcctcagcctcctcatctgggggagtggaatagtatcctccaggtttttcaattaaacggattattttttcagaccgaaaa

SEQ ID NO: 404862 - DNA, 880 bp, Homo sapiens
ttcttccgggtaggggccacgtggccctggccgggcggggggctcggcccaccccgcgccgggcccagtgactcaggccgcagctgttaccgcgtcacatgagggaggccggcggccactcggcgggggaggggaccgtggctggagcccggggcggggccgcgcggcaggcggggcgggagccggggggcgcagctagagagccccggagccgcggcgggagaggaacgcgcagccagccttgggaagcccaggcccggcagccatggcggtggaaggaggaatgaaatgtgtgaagttcttgctctacgtcctcctgctggccttttgcgcctgtgcagtgggactgattgccgtgggtgtcggggcacagcttgtcctgagtcagaccataatccagggggctacccctggctctctgttgccagtggtcatcatcgcagtgggtgtcttcctcttcctggtggcttttgtgggctgctgcggggcctgcaaggagaactattgtcttatgatcacgtttgccatctttctgtctcttatcatgttggtggaggtggccgcagccattgctggctatgtgtttagagataaggtgatgtcagagtttaataacaacttccggcagcagatggagaattacccgaaaaacaaccacactgcttcgatcctggacaggatgcaggcagattttaagtgctgtggggctgctaactacacagattgggagaaaatcccttccatgtcgaagaaccgagtccccgactcctgctgcattaatgttactgtgggctgtgggattaatttcaacgagaaggcgatccataaggaggctgtgtggagaagattggtcgacgcggccgcgaatttagtagtagta

SEQ ID NO: 404863 - DNA, 966 bp, Homo sapiens
ttcttccgggtaggggccacgtggccctggccgggcggggggctcggcccaccccgcgccgggcccagtgactcaggccgcagctgttaccgcgtcacatgagggaggccggcggccactcggcgggggaggggaccgtggctggagcccggggcggggccgcgcggcaggcggggcgggagccggggggcgcagctagagagccccggagccgcggcgggagaggaacgcgcagccagccttgggaagcccaggcccggcagccatggcggtggaaggaggaatgaaatgtgtgaagttcttgctctacgtcctcctgctggccttttgcgcctgtgcagtgggactgattgccgtgggtgtcggggcacagcttgtcctgagtcagaccataatccagggggctacccctggctctctgttgccagtggtcatcatcgcagtgggtgtcttcctcttcctggtggcttttgtgggctgctgcggggcctgcaaggagaactattgtcttatgatcacgtttgccatctttctgtctcttatcatgttggtggaggtggccgcagccattgctggctatgtgtttagagataaggtgatgtcagagtttaataacaacttccggcagcagatggagaattaccaaccgagtccccgactcctgctgcattaatgttactgtgggctgtgggattaatttcaacgagaaggcgatccataaggagggctgtgtggagaagattgggggctggctgaggaaaaatgtgctggtggtagctgcagcagcccttggaattgcttttgtcgaggttttgggaattgtctttgcctgctgcctcgtgaagagtatcagaagtggctacgaggtgatgtaggggtctggtctcctcagcctcctcatctgggggagtggaatagtatcctccaggtttttcaattaaacggattattttttcagaccgaaaa

SEQ ID NO: 404864 - DNA, 1510 bp, Homo sapiens
atgggcggtctgggactgccagagcagcttggttcgggctcaggaagtttgccatctttctgtctcttatcatgttggtggaggtggccgcagccattgctggctatgtgtttagagataaggtgatgtcagagtttaataacaacttccggcagcagatggagaattacccgaaaaacaaccacactgcttcgatcctggacaggatgcaggcagattttaagtgctgtggggctgctaactacacagattgggagaaaatcccttccatgtcgaagaaccgagtccccgactcctgctgcattaatgttactgtgggctgtgggattaatttcaacgagaaggcgatccataaggagggctgtgtggagaagattgggggctggctgaggaaaaatgtgctggtggtagctgcagcagcccttggaattgcttttgtcgaggttttgggaattgtctttgcctgctgcctcgtgaagagtatcagaagtggctacgaggtgatgtaggggtctggtctcctcagcctcctcatctgggggagtggaatagtatcctccaggtttttcaattaaacggattattttttcagaccgaaaagagatggtctgagtttgtcttagagtgatgcttgattccttcctttccttactgatgttccctgtcctctgggaccttaatgcatgtgtacttcgaggtctattttggggggtgtttgggaaaggaggactttgcgaaggtgttggttgggcaggcagtgggagaagtgaggatccagagactgtggtgctttctgccccctagtcttatgctgccaggctcactatgaacattcatgaagccatctgctgcataagtcaaagcagctccccagaaaggtcccacctgcgagagcccagcccccatctgccttggacatcttcctggccttctgtgcaccgctaagggcccagcacctcccttcctggccaatcctcaagggatccagctcctttcgaagtatgataagttgccttgacacctgtgtggtcagtgtccttagcaggagaatttatgtgaatattgccttttcttccatggaagccacccagcctggcccagaaccctcatcacctgctcttctcccccaagaaatatgaagaccattcccagtacagacactgaattgcaaccttactccccttcagaaaataagggaaatgtattaaagtgccctttgatggccactccccgacgtgcagctgtagatgtgaggcagttccctggcgccccactgtgggtgctagctgttttgcagggactgaacaggccagagaccgtgagcatgtcggtttggagtagttggcacttaaatggggtcagccttccactgggcacatttctgcccaccttctttttattttttaaacaatacacttttgttagtgcttattttgtggcaggcaccaggcagtaccagggtgggggcagaaataaatcaaagtccttgtccttgaaaaacaatctcttg

SEQ ID NO: 404865 - DNA, 417 bp, Homo sapiens
acaaccttcttctccatatttcttccctcccccagtttaagtgctgtggggctgctaactacacagattgggagaaaatcccttccatgtcgaagaaccgagtccccgactcctgctgcattaatgttactgtgggctgtgggattaatttcaacgagaaggcgatccataaggagggctgtgtggagaagattgggggctggctgaggaaaaatgtgctggtggtagctgcagcagcccttggaattgcttttgtcgaggttttgggaattgtctttgcctgctgcctcgtgaagagtatcagaagtggctacgaggtgatgtaggggtctggtctcctcagcctcctcatctgggggagtggaatagtatcctccaggtttttcaattaaacggattattttttcagaccgaaaa

SEQ ID NO: 404866 - DNA, 880 bp, Homo sapiens
  misc_feature (727)..(727): n is a, c, g, or t
  misc_feature (762)..(762): n is a, c, g, or t
ttcttccgggtaggggccacgtggccctggccgggcggggggctcggcccaccccgcgccgggcccagtgactcaggccgcagctgttaccgcgtcacatgagggaggccggcggccactcggcgggggaggggaccgtggctggagcccggggcggggccgcgcggcaggcggggcgggagccggggggcgcagctagagagccccggagccgcggcgggagaggaacgcgcagccagccttgggaagcccaggcccggcagccatggcggtggaaggaggaatgaaatgtgtgaagttcttgctctacgtcctcctgctggccttttgcgcctgtgcagtgggactgattgccgtgggtgtcggggcacagcttgtcctgagtcagaccataatccagggggctacccctggctctctgttgccagtggtcatcatcgcagtgggtgtcttcctcttcctggtggcttttgtgggctgctgcggggcctgcaaggagaactattgtcttatgatcacgtttgccatctttctgtctcttatcatgttggtggaggtggccgcagccattgctggctatgtgtttagagataaggtgatgtcagagtttaataacaacttccggcagcagatggagaattacccgaaaaacaaccacactgcttcgatcctggacaggatgcaggcagattttaagtgctgtggggctgctaactacacagatggngaggctgtggattaattcacgagaagcgatcatangaggcctgttgagagatggggctgctgagaaatgtctgtgtactgacaccctggaatgctttgcagttttgaatgcttgctgtgctctgaaattatagtgctcaaggattagggctgt

SEQ ID NO: 404867 - DNA, 1012 bp, Homo sapiens
ttcttccgggtaggggccacgtggccctggccgggcggggggctcggcccaccccgcgccgggcccagtgactcaggccgcagctgttaccgcgtcacatgagggaggccggcggccactcggcgggggaggggaccgtggctggagcccggggcggggccgcgcggcaggcggggcgggagccggggggcgcagctagagagccccggagccgcggcgggagaggaacgcgcagccagccttgggaagcccaggcccggcagccatggcggtggaaggaggaatgaaatgtgtgaagttcttgctctacgtcctcctgctggccttttgcgcctgtgcagtgggactgattgccgtgggtgtcggggcacagcttgtcctgagtcagaccataatccagggggctacccctggctctctgttgccagtggtcatcatcgcagtgggtgtcttcctcttcctggtggcttttgtgggctgctgcggggcctgcaaggagaactattgtcttatgatcacgtttgccatctttctgtctcttatcatgttggtggaggtggccgcagccattgctggctatgtgtttagagataaggtgatgtcagagtttaataacaacttccggcagcagatggagaattacccgaaaaacaaccacactgcttcgatcctggacaggatgcaggcagatgagaaaatcccttccatgtcgaagaaccgagtccccgactcctgctgcattaatgttactgtggaggtacagcgccttccttttccacctgagctcttcctcctacacatcacagtagcgaccacagctccgatgaccacaactgctaggacagccaggccagcaacaatgcccacggctctgatgtgtctctcacagcttgaaaagcctgagacagctgtcttgtgagggactgagatgtaggatttcttcactcctcccctttgtgacttcaagagcctctggcatctctttctgcaaaggcgctgtagtagggtaccg

SEQ ID NO: 404868 - DNA, 916 bp, Homo sapiens
ttcttccgggtaggggccacgtggccctggccgggcggggggctcggcccaccccgcgccgggcccagtgactcaggccgcagctgttaccgcgtcacatgagggaggccggcggccactcggcgggggaggggaccgtggctggagcccggggcggggccgcgcggcaggcggggcgggagccggggggcgcagctagagagccccggagccgcggcgggagaggaacgcgcagccagccttgggaagcccaggcccggcagccatggcggtggaaggaggaatgaaatgtgtgaagttcttgctctacgtcctcctgctggccttttgcgcctgtgcagtgggactgattgccgtgggtgtcggggcacagcttgtcctgagtcagaccataatccagggggctacccctggctctctgttgccagtggtcatcatcgcagtgggtgtcttcctcttcctggtggcttttgtgggctgctgcggggcctgcaaggagaactattgtcttatgatcacgtttgccatctttctgtctcttatcatgttggtggaggtggccgcagccattgctggctatgtgtttagagataaggtgatgtcagagtttaataacaacttccggcagcagatggagaattacccgaaaaacaaccacactgcttcgatcctggacaggatgcaggcagatgtgagtggggttgctgggagcaggggtggtgggaatagagaattctcatctccaaggctgggtgtggtgactcacgcctgtaatctcagcacttttgaaggccgaggtgggcagatcacctgaggtcagaagttcaagactagcctggccaacgtggtgaaaccctgtctctactaaaaatacaaaaattagccaggtgtggtggtgagtgcctgtaatcccacc

SEQ ID NO: 404869 - DNA, 839 bp, Homo sapiens
ttcttccgggtaggggccacgtggccctggccgggcggggggctcggcccaccccgcgccgggcccagtgactcaggccgcagctgttaccgcgtcacatgagggaggccggcggccactcggcgggggaggggaccgtggctggagcccggggcggggccgcgcggcaggcggggcgggagccggggggcgcagctagagagccccggagccgcggcgggagaggaacgcgcagccagccttgggaagcccaggcccggcagccatggcggtggaaggaggaatgaaatgtgtgaagttcttgctctacgtcctcctgctggccttttgcgcctgtgcagtgggactgattgccgtgggtgtcggggcacagcttgtcctgagtcagaccataatccagggggctacccctggctctctgttgccagtggtcatcatcgcagtgggtgtcttcctcttcctggtggcttttgtgggctgctgcggggcctgcaaggagaactattgtcttatgatcacgtttgccatctttctgtctcttatcatgttggtggaggtggccgcagccattgctggctatgtgtttagagataaggtgatgtcagagtttaataacaacttccggcagcagatggagaattaccgagccacccaaagagccacccagctcctggggtggctcgtcgggtggcccttcgtgtggctcttggcgtggctctttgtgggcacatcgcgtggctcctggggtttatcgtgtgagcacaccatatatttacagtaggaatagacgtagacacacgagcatatttcacctccgctaccataatcatcgctatccc

SEQ ID NO: 404870 - DNA, 1486 bp, Homo sapiens
  misc_feature (13)..(13): n is a, c, g, or t
  misc_feature (28)..(28): n is a, c, g, or t
  misc_feature (47)..(47): n is a, c, g, or t
  misc_feature (60)..(60): n is a, c, g, or t
cgaccatatcagngggctaccctggctntctgtgccgggcctcaagnagactatttgtcntatgatcacgtttgccatctttctgtctcttatcatgttggtggaggtggccgcagccattgctggctatgtgtttagagataaggtgatgtcagagtttaataacaacttccggcagcagatggagaattacctttaagtgctgtggggctgctaactacacagattgggagaaaatcccttccatgtcgaagaaccgagtccccgactcctgctgcattaatgttactgtgggctgtgggattaatttcaacgagaaggcgatccataaggagggctgtgtggagaagattgggggctggctgaggaaaaatgtgctggtggtagctgcagcagcccttggaattgcttttgtcgaggttttgggaattgtctttgcctgctgcctcgtgaagagtatcagaagtggctacgaggtgatgtaggggtctggtctcctcagcctcctcatctgggggagtggaatagtatcctccaggtttttcaattaaacggattattttttcagaccgaaaagagatggtctgagtttgtcttagagtgatgcttgattccttcctttccttactgatgttccctgtcctctgggaccttaatgcatgtgtacttcgaggtctattttggggggtgtttgggaaaggaggactttgcgaaggtgttggttgggcaggcagtgggagaagtgaggatccagagactgtggtgctttctgccccctagtcttatgctgccaggctcactatgaacattcatgaagccatctgctgcataagtcaaagcagctccccagaaaggtcccacctgcgagagcccagcccccatctgccttggacatcttcctggccttctgtgcaccgctaagggcccagcacctcccttcctggccaatcctcaagggatccagctcctttcgaagtatgataagttgccttgacacctgtgtggtcagtgtccttagcaggagaatttatgtgaatattgccttttcttccatggaagccacccagcctggcccagaaccctcatcacctgctcttctcccccaagaaatatgaagaccattcccagtacagacactgaattgcaaccttactccccttcagaaaataagggaaatgtattaaagtgccctttgatggccactccccgacgtgcagctgtagatgtgaggcagttccctggcgccccactgtgggtgctagctgttttgcagggactgaacaggccagagaccgtgagcatgtcggtttggagtagttggcacttaaatggggtcagccttccactgggcacatttctgcccaccttctttttattttttaaacaatacacttttgttagtgcttattttgtggcaggcaccaggcagtaccagggtgggggcagaaataaatcaaagtccttgtccttgaaaaacaatctcttg

SEQ ID NO: 404871 - DNA, 615 bp, Homo sapiens
ttcttccgggtaggggccacgtggccctggccgggcggggggctcggcccaccccgcgccgggcccagtgactcaggccgcagctgttaccgcgtcacatgagggaggccggcggccactcggcgggggaggggaccgtggctggagcccggggcggggccgcgcggcaggcggggcgggagccggggggcgcagctagagagccccggagccgcggcgggagaggaacgcgcagccagccttgggaagcccaggcccggcagccatggcggtggaaggaggaatgaaatgtgtgaagttcttgctctacgtcctcctgctggccttttgcgcctgtgcagtgggactgattgccgtgggtgtcggggcacagcttgtcctgagtcagaccataatccagggggctacccctggctctctgttgccagtggtcatcatcgcagtgggtgtcttcctcttcctggtggcttttgtgggctgctgcggggcctgcaaggagaactattgtcttatgatcacgtttgccatctttctgtctcttatcatgttggtggaggtggccgcagccattgctggctatgtgtttagagataaggtaagcagggaataatggga

SEQ ID NO: 404872 - DNA, 294 bp, Homo sapiens
gcgactctagcggatccttcagacagcggaccccagaaggcgatccataaggaggctgtgtggagaagattgggggctggctgaggaaaaatgtgctggtggtagctgcagcagcccttggaattgcttttgtcgaggttttgggaattgtctttgcctgctgcctcgtgaagagtatcagaagtggctacgaggtgatgtaggggtctggtctcctcagcctcctcatctgggggagtggaatagtatcctccaggtttttcaattaaacggattattttttcagaccgaaaa

SEQ ID NO: 404873 - DNA, 1251 bp, Homo sapiens
ctcccctgcgcggagctgtgagccctggaacaccgtggtctgcttctcaggacgcgcaaacagtgaagccagtcccgcccggagttcttcatatattaaggattcattcattcatagactcatttattgaaggctgtctgtgtaacaggcacaatcctaggtgcttggaattgcttttgtcgaggttttgggaattgtctttgcctgctgcctcgtgaagagtatcagaagtggctacgaggtgatgtaggggtctggtctcctcagcctcctcatctgggggagtggaatagtatcctccaggtttttcaattaaacggattattttttcagaccgaaaagagatggtctgagtttgtcttagagtgatgcttgattccttcctttccttactgatgttccctgtcctctgggaccttaatgcatgtgtacttcgaggtctattttggggggtgtttgggaaaggaggactttgcgaaggtgttggttgggcaggcagtgggagaagtgaggatccagagactgtggtgctttctgccccctagtcttatgctgccaggctcactatgaacattcatgaagccatctgctgcataagtcaaagcagctccccagaaaggtcccacctgcgagagcccagcccccatctgccttggacatcttcctggccttctgtgcaccgctaagggcccagcacctcccttcctggccaatcctcaagggatccagctcctttcgaagtatgataagttgccttgacacctgtgtggtcagtgtccttagcaggagaatttatgtgaatattgccttttcttccatggaagccacccagcctggcccagaaccctcatcacctgctcttctcccccaagaaatatgaagaccattcccagtacagacactgaattgcaaccttactccccttcagaaaataagggaaatgtattaaagtgccctttgatggccactccccgacgtgcagctgtagatgtgaggcagttccctggcgccccactgtgggtgctagctgttttgcagggactgaacaggccagagaccgtgagcatgtcggtttggagtagttggcacttaaatggggtcagccttccactgggcacatttctgcccaccttctttttattttttaaacaatacacttttgttagtgcttattttgtggcaggcaccaggcagtaccagggtgggggcagaaataaatcaaagtccttgtccttgaaaaacaatctcttg

SEQ ID NO: 404874 - DNA, 1073 bp, Homo sapiens
ttcttccgggtaggggccacgtggccctggccgggcggggggctcggcccaccccgcgccgggcccagtgactcaggccgcagctgttaccgcgtcacatgagggaggccggcggccactcggcgggggaggggaccgtggctggagcccggggcggggccgcgcggcaggcggggcgggagccggggggcgcagctagagagccccggagccgcggcgggagaggaacgcgcagccagccttgggaagcccaggcccggcagccatggcggtggaaggaggaatgaaatgtgtgaagttcttgctctacgtcctcctgctggccttttgcgcctgtgcagtgggactgattgccgtgggtgtcggggcacagcttgtcctgagtcagaccataatccagggggctacccctggctctctgttgccagtggtcatcatcgcagtgggtgtcttcctcttcctggtggcttttgtgggctgctgcggggcctgcaaggagaactattgtcttatgatcacgtttgccatctttctgtctcttatcatgttggtggaggtggccgcagccattgctggctatgtgtttagagataaggtgatgtcagagtttaataacaacttccggcagcagatggagaattacccgaaaaacaaccacactgcttcgatcctggacaggatgcaggcagattttaagtgctgtggggctgctaactacacagattgggagaaaatcccttccatgtcgaagaaccgagtccccgactcctgctgcattaatgttactgtgggctgtgggattaatttcaacgagaaggcgatccataaggagggctgtgtggagaagattgggggctggctgaggaaaaatgtgctggtggtagctgcagcagcccttggaattgcttttgtcgaggttttgggaattgtctttgcctgctgcctcgtgaagagtatcagaagtggctacgaggtgatgtaggggtctggtctcctcagcctcctcatctgggggagtggaatagtatcctccaggtttttcaattaaacggattattttttcagaccgaaaa

SEQ ID NO: 404875 - DNA, 600 bp, Homo sapiens
atgggcggtctgggactgccagagcagcttggttcgggctcaggaagtttgccatctttctgtctcttatcatgttggtggaggtggccgcagccattgctggctatgtgtttagagataaggtgatgtcagagtttaataacaacttccggcagcagatggagaattacccgaaaaacaaccacactgcttcgatcctggacaggatgcaggcagattttaagtgctgtggggctgctaactacacagattgggagaaaatcccttccatgtcgaagaaccgagtccccgactcctgctgcattaatgttactgtgggctgtgggattaatttcaacgagaaggcgatccataaggagggctgtgtggagaagattgggggctggctgaggaaaaatgtgctggtggtagctgcagcagcccttggaattgcttttgtcgaggttttgggaattgtctttgcctgctgcctcgtgaagagtatcagaagtggctacgaggtgatgtaggggtctggtctcctcagcctcctcatctgggggagtggaatagtatcctccaggtttttcaattaaacggattattttttcagaccgaaaa

SEQ ID NO: 404876 - DNA, 531 bp, Homo sapiens
ttgatccccctccatgatgtgtgcccattgctggctatgtgtttagagataaggtgatgtcagagtttaataacaacttccggcagcagatggagaattacccgaaaaacaaccacactgcttcgatcctggacaggatgcaggcagattttaagtgctgtggggctgctaactacacagattgggagaaaatcccttccatgtcgaagaaccgagtccccgactcctgctgcattaatgttactgtgggctgtgggattaatttcaacgagaaggcgatccataaggagggctgtgtggagaagattgggggctggctgaggaaaaatgtgctggtggtagctgcagcagcccttggaattgcttttgtcgaggttttgggaattgtctttgcctgctgcctcgtgaagagtatcagaagtggctacgaggtgatgtaggggtctggtctcctcagcctcctcatctgggggagtggaatagtatcctccaggtttttcaattaaacggattattttttcagaccgaaaa

SEQ ID NO: 404877 - DNA, 730 bp, Homo sapiens
gggacacatcactcttgctcccttttcctcttcccttctcctggcctaactggccagaggaacccggtctcagtcacagctgatgcgcgcgtgggatgtgcactggaggatagtgaggggggcagttctgggagagaattgagctgggagccctggaggcctgtagaaagcattattctaggcctgtgcagtgggactgattgccgtgggtgtcggggcacagcttgtcctgagtcagaccataatccagggggctacccctggctctctgttgccagtggtcatcatcgcagtgggtgtcttcctcttcctggtggcttttgtgggctgctgcggggcctgcaaggagaactattgtcttatgatcacgtttgccatctttctgtctcttatcatgttggtggaggtggccgcagccattgctggctatgtgtttagagataaggtgatgtcagagtttaataacaacttccggcagcagatggagaattacccgaaaaacaaccacactgcttcgatcctggacaggatgcaggcagattttaagtgctgtggggctgctaactacacagattgggagaaaatcccttccatgtcgaagaaccgagtccccgactcctgctgcattaatgttactgtgggctgtgggattaatttcaacgagaaggcgatccataaggaggctgtgtggagaagattggtcgacgcggccgcgaatttagtagtagta

SEQ ID NO: 404878 - DNA, 1025 bp, Homo sapiens
  misc_feature (953)..(953): n is a, c, g, or t
gtggcttcggggaagggcttcctccccttttctcagactaggatccctggaaaatggagaagctgtgctaatagaggggggccagaaatccccactctagaatgctgtagaatgttgggagacacccaggatgtgagccagggactttctggaagtgtttgttctggccccacccgaccccaggcagtccccagctgtctgcacagtcggatggggagggggcttgcacagagttggagccagaggagagagctggctcatcccctacggtaggatggggaaacctcacagaccacattgtcacccggcctcagctctccgccccggcgctcagagggtaactctcacccacctcgtccgcttctctgaaccagagtgacccaggctgcgctccgccccgctctcctaccccgagttggcacggaggcccggcagccatggcggtggaaggaggaatgaaatgtgtgaagttcttgctctacgtcctcctgctggccttttgcgcctgtgcagtgggactgattgccgtgggtgtcggggcacagcttgtcctgagtcagaccataatccagggggctacccctggctctctgttgccagtggtcatcatcgcagtgggtgtcttcctcttcctggtggcttttgtgggctgctgcggggcctgcaaggagaactattgtcttatgatcacgtttgccatctttctgtctcttatcatgttggtggaggtggccgcagccattgctggctatgtgtttagagataagtgatgtcagagtttatacacttcgggagggaaggggataccgaaaaaacagatgttcgatctggaagctgcgggatttaggtgggggtgtactaacgatggaaaatcttcggtgaaacggtccgactggctagtagggggggtataccggagggcaaggggggtgaatggggtggaagttgggtcnctttattgagtgatttgcaaaaagaagtggggcgccccggggcctaaaagttgtttgcttttttttttccct

SEQ ID NO: 404879 - DNA, 642 bp, Homo sapiens
  misc_feature (28)..(28): n is a, c, g, or t
  misc_feature (54)..(55): n is a, c, g, or t
gctcgcacccatagctgacaccgacctngctctacgtcctcctgctggcccttnngcgcctgtgcagtgggactgattgccgtgggtgtcggggcacagcttgtcctgagtcagaccataatccagggggctacccctggctctctgttgccagtggtcatcatcgcagtgggtgtcttcctcttcctggtggcttttgtgggctgctgcggggcctgcaaggagaactattgtcttatgatcacgtttgccatctttctgtctcttatcatgttggtggaggtggccgcagccattgctggctatgtgtttagagataaggtgatgtcagagtttaataacaacttccggcagcagatggagaattacccgaaaaacaaccacactgcttcgatcctggacaggatgcaggcagatgtgagtggggttgctgggagcaggggtggtgggaatagagaattctcatctccaaggctgggtgtggtgactcacgcctgtaatctcagcacttttgaaggccgaggtgggcagatcacctgaggtcagaagttcaagactagcctggccaacgtggtgaaaccctgtctctactaaaaatacaaaaattagccaggtgtggtggtgagtgcctgtaatcccacc

SEQ ID NO: 404880 - DNA, 1983 bp, Homo sapiens
ttcttccgggtaggggccacgtggccctggccgggcggggggctcggcccaccccgcgccgggcccagtgactcaggccgcagctgttaccgcgtcacatgagggaggccggcggccactcggcgggggaggggaccgtggctggagcccggggcggggccgcgcggcaggcggggcgggagccggggggcgcagctagagagccccggagccgcggcgggagaggaacgcgcagccagccttgggaagcccaggcccggcagccatggcggtggaaggaggaatgaaatgtgtgaagttcttgctctacgtcctcctgctggccttttgcgcctgtgcagtgggactgattgccgtgggtgtcggggcacagcttgtcctgagtcagaccataatccagggggctacccctggctctctgttgccagtggtcatcatcgcagtgggtgtcttcctcttcctggtggcttttgtgggctgctgcggggcctgcaaggagaactattgtcttatgatcacgtttgccatctttctgtctcttatcatgttggtggaggtggccgcagccattgctggctatgtgtttagagataaggtgatgtcagagtttaataacaacttccggcagcagatggagaattacccgaaaaacaaccacactgcttcgatcctggacaggatgcaggcagattttaagtgctgtggggctgctaactacacagattgggagaaaatcccttccatgtcgaagaaccgagtccccgactcctgctgcattaatgttactgtgggctgtgggattaatttcaacgagaaggcgatccataaggagggctgtgtggagaagattgggggctggctgaggaaaaatgtgctggtggtagctgcagcagcccttggaattgcttttgtcgaggttttgggaattgtctttgcctgctgcctcgtgaagagtatcagaagtggctacgaggtgatgtaggggtctggtctcctcagcctcctcatctgggggagtggaatagtatcctccaggtttttcaattaaacggattattttttcagaccgaaaagagatggtctgagtttgtcttagagtgatgcttgattccttcctttccttactgatgttccctgtcctctgggaccttaatgcatgtgtacttcgaggtctattttggggggtgtttgggaaaggaggactttgcgaaggtgttggttgggcaggcagtgggagaagtgaggatccagagactgtggtgctttctgccccctagtcttatgctgccaggctcactatgaacattcatgaagccatctgctgcataagtcaaagcagctccccagaaaggtcccacctgcgagagcccagcccccatctgccttggacatcttcctggccttctgtgcaccgctaagggcccagcacctcccttcctggccaatcctcaagggatccagctcctttcgaagtatgataagttgccttgacacctgtgtggtcagtgtccttagcaggagaatttatgtgaatattgccttttcttccatggaagccacccagcctggcccagaaccctcatcacctgctcttctcccccaagaaatatgaagaccattcccagtacagacactgaattgcaaccttactccccttcagaaaataagggaaatgtattaaagtgccctttgatggccactccccgacgtgcagctgtagatgtgaggcagttccctggcgccccactgtgggtgctagctgttttgcagggactgaacaggccagagaccgtgagcatgtcggtttggagtagttggcacttaaatggggtcagccttccactgggcacatttctgcccaccttctttttattttttaaacaatacacttttgttagtgcttattttgtggcaggcaccaggcagtaccagggtgggggcagaaataaatcaaagtccttgtccttgaaaaacaatctcttg

SEQ ID NO: 404881 - DNA, 1254 bp, Homo sapiens
  misc_feature (1079)..(1079): n is a, c, g, or t
  misc_feature (1081)..(1081): n is a, c, g, or t
  misc_feature (1083)..(1084): n is a, c, g, or t
  misc_feature (1091)..(1091): n is a, c, g, or t
ttcttccgggtaggggccacgtggccctggccgggcggggggctcggcccaccccgcgccgggcccagtgactcaggccgcagctgttaccgcgtcacatgagggaggccggcggccactcggcgggggaggggaccgtggctggagcccggggcggggccgcgcggcaggcggggcgggagccggggggcgcagctagagagccccggagccgcggcgggagaggaacgcgcagccagccttgggaagcccaggcccggcagccatggcggtggaaggaggaatgaaatgtgtgaagttcttgctctacgtcctcctgctggccttttgcgcctgtgcagtgggactgattgccgtgggtgtcggggcacagcttgtcctgagtcagaccataatccagggggctacccctggctctctgttgccagtggtcatcatcgcagtgggtgtcttcctcttcctggtggcttttgtgggctgctgcggggcctgcaaggagaactattgtcttatgatcacgtttgccatctttctgtctcttatcatgttggtggaggtggccgcagccattgctggctatgtgtttagagataaggtgatgtcagagtttaataacaacttccggcagcagatggagaattacccgaaaaacaaccacactgcttcgatcctggacaggatgcaggcagattttaagtgctgtggggctgctaactacacagattgggagaaaatcccttccatgtcgaagaaccgagtccccgactcctgctgcattaatgttactgtgggctgtgggattaatttcaacgagaaggcgatccataaggagggctgtgtggagaagattgggggctggctgaggaaaaatgtgctggtggtagctgcagcagcccttggaattgcttttgtcgaggttttgggaattgtctttgcctgctgcctcgtgaagagtatcagaagtggctacgaggtgatgtaggggtctggtctcctcagcctcctcatctgggggagtggaatagtatcctccaggtttttcaattaaacggattattttttcagaccgaaaaaacaancnannacaacanacacaaacaaacagacaaaaaaggcgcgcgccaagagtaacccgacgcgcaacacgaccacccgcgtgcagaccagcagcacacagaagcaaaaaaaaaagggtcgcaaaagacggaacagaaccagtagcatagcagcccagtgcgacgcgaccagcaaagg

SEQ ID NO: 404882 - DNA, 1511 bp, Homo sapiens
ttcttccgggtaggggccacgtggccctggccgggcggggggctcggcccaccccgcgccgggcccagtgactcaggccgcagctgttaccgcgtcacatgagggaggccggcggccactcggcgggggaggggaccgtggctggagcccggggcggggccgcgcggcaggcggggcgggagccggggggcgcagctagagagccccggagccgcggcgggagaggaacgcgcagccagccttgggaagcccaggcccggcagccatggcggtggaaggaggaatgaaatgtgtgaagttcttgctctacgtcctcctgctggccttttgcgcctgtgcagtgggactgattgccgtgggtgtcggggcacagcttgtcctgagtcagaccataatccagggggctacccctggctctctgttgccagtggtcatcatcgcagtgggtgtcttcctcttcctggtggcttttgtgggctgctgcggggcctgcaaggagaactattgtcttatgatcacgtttgccatctttctgtctcttatcatgttggtggaggtggccgcagccattgctggctatgtgtttagagataaggtgatgtcagagtttaataacaacttccggcagcagatggagaattacccgaaaaacaaccacactgcttcgatcctggacaggatgcaggcagattttaagtgctgtggggctgctaactacacagattgggagaaaatcccttccatgtcgaagaaccgagtccccgactcctgctgcattaatgttactgtgggctgtgggattaatttcaacgagaaggcgatccataaggagggctgtgtggagaagattgggggctggctgaggaaaaatgtgctggtggtagctgcagcagcccttggaattgcttttgtcgaggttttgggaattgtctttgcctgctgcctcgtgaagagtatcagaagtggctacgaggtgatgtaggggtctggtctcctcagcctcctcatctgggggagtggaatagtatcctcagtgtccttagcaggagaatttatgtgaatattgccttttcttccatggaagccacccagcctggcccagaaccctcatcacctgctcttctcccccaagaaatatgaagaccattcccagtacagacactgaattgcaaccttactccccttcagaaaataagggaaatgtattaaagtgccctttgatggccactccccgacgtgcagctgtagatgtgaggcagttccctggcgccccactgtgggtgctagctgttttgcagggactgaacaggccagagaccgtgagcatgtcggtttggagtagttggcacttaaatggggtcagccttccactgggcacatttctgcccaccttctttttattttttaaacaatacacttttgttagtgcttattttgtggcaggcaccaggcagtaccagggtgggggcagaaataaatcaaagtccttgtccttgaaaaacaatctcttg

SEQ ID NO: 404883 - DNA, 956 bp, Homo sapiens
gacgcccggagactggcgggccgagggtcggcgtcaggctcaagcccctgccggcgcccttggatctgtcctgggccccagaggcggcggggcggggtccgggcttcgcggccgtcgcccccacccctctcctgcgggcccggcagccatggcggtggaaggaggaatgaaatgtgtgaagttcttgctctacgtcctcctgctggccttttgcgcctgtgcagtgggactgattgccgtgggtgtcggggcacagcttgtcctgagtcagaccataatccagggggctacccctggctctctgttgccagtggtcatcatcgcagtgggtgtcttcctcttcctggtggcttttgtgggctgctgcggggcctgcaaggagaactattgtcttatgatcacgtttgccatctttctgtctcttatcatgttggtggaggtggccgcagccattgctggctatgtgtttagagataaggtgatgtcagagtttaataacaacttccggcagcagatggagaattacccgaaaaacaaccacactgcttcgatcctggacaggatgcaggcagattttaagtgctgtggggctgctaactacacagattgggagaaaatcccttccatgtcgaagaaccgagtccccgactcctgctgcattaatgttactgtgggctgtgggattaatttcaacgagaaggcgatccataaggagggctgtgtggagaagattgggggctggctgaggaaaaatgtgctggtggtagctgcagcagcccttggaattgcttttgtcgaggttttgggaattgtctttgcctgctgcctcgtgaagagtatcagaagtggctacgaggtgatgtaggggtctggtctcctcagcctcctcatctgggggagtggaatagtatcctccaggtttttcaattaaacggattattttttcagaccgaaaa

SEQ ID NO: 404884 - DNA, 961 bp, Homo sapiens
cccggcggacttcggcgcgggctgggagagaccacccgcagtcccttcctccagggctcgccccaggcccgcggagactcgtccggcgctctccagccgccctggagcaactttgcttcgaagttccctgggcccgggcagggcccggcagccatggcggtggaaggaggaatgaaatgtgtgaagttcttgctctacgtcctcctgctggccttttgcgcctgtgcagtgggactgattgccgtgggtgtcggggcacagcttgtcctgagtcagaccataatccagggggctacccctggctctctgttgccagtggtcatcatcgcagtgggtgtcttcctcttcctggtggcttttgtgggctgctgcggggcctgcaaggagaactattgtcttatgatcacgtttgccatctttctgtctcttatcatgttggtggaggtggccgcagccattgctggctatgtgtttagagataaggtgatgtcagagtttaataacaacttccggcagcagatggagaattacccgaaaaacaaccacactgcttcgatcctggacaggatgcaggcagattttaagtgctgtggggctgctaactacacagattgggagaaaatcccttccatgtcgaagaaccgagtccccgactcctgctgcattaatgttactgtgggctgtgggattaatttcaacgagaaggcgatccataaggagggctgtgtggagaagattgggggctggctgaggaaaaatgtgctggtggtagctgcagcagcccttggaattgcttttgtcgaggttttgggaattgtctttgcctgctgcctcgtgaagagtatcagaagtggctacgaggtgatgtaggggtctggtctcctcagcctcctcatctgggggagtggaatagtatcctccaggtttttcaattaaacggattattttttcagaccgaaaa

SEQ ID NO: 404885 - DNA, 923 bp, Homo sapiens
gggacacatcactcttgctcccttttcctcttcccttctcctggcctaactggccagaggaacccggtctcagtcacagctgatgcgcgcgtgggatgtgcactggaggatagtgaggggggcagttctgggagagaattgagctgggagccctggaggcctgtagaaagcattattctaggcctgtgcagtgggactgattgccgtgggtgtcggggcacagcttgtcctgagtcagaccataatccagggggctacccctggctctctgttgccagtggtcatcatcgcagtgggtgtcttcctcttcctggtggcttttgtgggctgctgcggggcctgcaaggagaactattgtcttatgatcacgtttgccatctttctgtctcttatcatgttggtggaggtggccgcagccattgctggctatgtgtttagagataaggtgatgtcagagtttaataacaacttccggcagcagatggagaattacccgaaaaacaaccacactgcttcgatcctggacaggatgcaggcagattttaagtgctgtggggctgctaactacacagattgggagaaaatcccttccatgtcgaagaaccgagtccccgactcctgctgcattaatgttactgtgggctgtgggattaatttcaacgagaaggcgatccataaggagggctgtgtggagaagattgggggctggctgaggaaaaatgtgctggtggtagctgcagcagcccttggaattgcttttgtcgaggttttgggaattgtctttgcctgctgcctcgtgaagagtatcagaagtggctacgaggtgatgtaggggtctggtctcctcagcctcctcatctgggggagtggaatagtatcctccaggtttttcaattaaacggattattttttcagaccgaaaa

SEQ ID NO: 404886 - DNA, 1000 bp, Homo sapiens
ttcttccgggtaggggccacgtggccctggccgggcggggggctcggcccaccccgcgccgggcccagtgactcaggccgcagctgttaccgcgtcacatgagggaggccggcggccactcggcgggggaggggaccgtggctggagcccggggcggggccgcgcggcaggcggggcgggagccggggggcgcagctagagagccccggagccgcggcgggagaggaacgcgcagccagccttgggaagcccaggcccggcagccatggcggtggaaggaggaatgaaatgtgtgaagttcttgctctacgtcctcctgctggccttttgcgcctgtgcagtgggactgattgccgtgggtgtcggggcacagcttgtcctgagtcagaccataatccagggggctacccctggctctctgttgccagtggtcatcatcgcagtgggtgtcttcctcttcctggtggcttttgtgggctgctgcggggcctgcaaggagaactattgtcttatgatcacgtttgccatctttctgtctcttatcatgttggtggaggtggccgcagccattgctggctatgtgtttagagataaggtgatgtcagagtttaataacaacttccggcagcagatggagaattacccgaaaaacaaccacactgcttcgatcctggacaggatgcaggcagattttaagtgctgtggggctgctaactacacagattgggagaaaatcccttccatgtcgaagaaccgagtccccgactcctgctgcattaatgttactgtgggctgtgggattaatttcaacgagaaggcgatccataaggagggctgtgtggagaagattgggggctggctgaggaaaaatgtacttcgggccctgcaggggaactatgtcttatgtcacgttgcatctttcttctctatcatgttgtggagtgccgcaccatgctgctatgtgtttagagatagtatgtcagagttatcatcaccaccg

SEQ ID NO: 404887 - DNA, 1899 bp, Homo sapiens
ttcttccgggtaggggccacgtggccctggccgggcggggggctcggcccaccccgcgccgggcccagtgactcaggccgcagctgttaccgcgtcacatgagggaggccggcggccactcggcgggggaggggaccgtggctggagcccggggcggggccgcgcggcaggcggggcgggagccggggggcgcagctagagagccccggagccgcggcgggagaggaacgcgcagccagccttgggaagcccaggcccggcagccatggcggtggaaggaggaatgaaatgtgtgaagttcttgctctacgtcctcctgctggccttttgcgcctgtgcagtgggactgattgccgtgggtgtcggggcacagcttgtcctgagtcagaccataatccagggggctacccctggctctctgttgccagtggtcatcatcgcagtgggtgtcttcctcttcctggtggcttttgtgggctgctgcggggcctgcaaggagaactattgtcttatgatcacgtttgccatctttctgtctcttatcatgttggtggaggtggccgcagccattgctggctatgtgtttagagataaggtgatgtcagagtttaataacaacttccggcagcagatggagaattacccgaaaaacaaccacactgcttcgatcctggacaggatgcaggcagattttaagtgctgtggggctgctaactacacagattgggagaaaatcccttccatgtcgaagaaccgagtccccgactcctgctgcattaatgttactgtgggctgtgggattaatttcaacgagaaggcgatccataaggaggttttgggaattgtctttgcctgctgcctcgtgaagagtatcagaagtggctacgaggtgatgtaggggtctggtctcctcagcctcctcatctgggggagtggaatagtatcctccaggtttttcaattaaacggattattttttcagaccgaaaagagatggtctgagtttgtcttagagtgatgcttgattccttcctttccttactgatgttccctgtcctctgggaccttaatgcatgtgtacttcgaggtctattttggggggtgtttgggaaaggaggactttgcgaaggtgttggttgggcaggcagtgggagaagtgaggatccagagactgtggtgctttctgccccctagtcttatgctgccaggctcactatgaacattcatgaagccatctgctgcataagtcaaagcagctccccagaaaggtcccacctgcgagagcccagcccccatctgccttggacatcttcctggccttctgtgcaccgctaagggcccagcacctcccttcctggccaatcctcaagggatccagctcctttcgaagtatgataagttgccttgacacctgtgtggtcagtgtccttagcaggagaatttatgtgaatattgccttttcttccatggaagccacccagcctggcccagaaccctcatcacctgctcttctcccccaagaaatatgaagaccattcccagtacagacactgaattgcaaccttactccccttcagaaaataagggaaatgtattaaagtgccctttgatggccactccccgacgtgcagctgtagatgtgaggcagttccctggcgccccactgtgggtgctagctgttttgcagggactgaacaggccagagaccgtgagcatgtcggtttggagtagttggcacttaaatggggtcagccttccactgggcacatttctgcccaccttctttttattttttaaacaatacacttttgttagtgcttattttgtggcaggcaccaggcagtaccagggtgggggcagaaataaatcaaagtccttgtccttgaaaaacaatctcttg

SEQ ID NO: 404888 - DNA, 914 bp, Homo sapiens
  misc_feature (855)..(855): n is a, c, g, or t
  misc_feature (891)..(891): n is a, c, g, or t
  misc_feature (893)..(893): n is a, c, g, or t
ttcttccgggtaggggccacgtggccctggccgggcggggggctcggcccaccccgcgccgggcccagtgactcaggccgcagctgttaccgcgtcacatgagggaggccggcggccactcggcgggggaggggaccgtggctggagcccggggcggggccgcgcggcaggcggggcgggagccggggggcgcagctagagagccccggagccgcggcgggagaggaacgcgcagccagccttgggaagcccaggcccggcagccatggcggtggaaggaggaatgaaatgtgtgaagttcttgctctacgtcctcctgctggccttttgcgcctgtgcagtgggactgattgccgtgggtgtcggggcacagcttgtcctgagtcagaccataatccagggggctacccctggctctctgttgccagtggtcatcatcgcagtgggtgtcttcctcttcctggtggcttttgtgggctgctgcggggcctgcaaggagaactattgtcttatgatcacgtttgccatctttctgtctcttatcatgttggtggaggtggccgcagccattgctggctatgtgtttagagataaggtgatgtcagagtttaataacaacttccggcagcagatggagaattacccgaaaaacaaccacactgcttcgatcctggacaggatgcaggcagattttaagtgctgtggggctgctaactacacagattgggagaaaatcccttccatgtcgaagaaccgagtccccgactcctgctgcattaatgttactgtgggctgtgggattaatttcaacgagaaggcgatccataaggaggctgtgtggagaagtctggcacnacttcgtccaccgtgacctctcggactcgcggcgtntnggttctcgcgtgtcaggtacc

SEQ ID NO: 404889 - DNA, 1009 bp, Homo sapiens
ttcttccgggtaggggccacgtggccctggccgggcggggggctcggcccaccccgcgccgggcccagtgactcaggccgcagctgttaccgcgtcacatgagggaggccggcggccactcggcgggggaggggaccgtggctggagcccggggcggggccgcgcggcaggcggggcgggagccggggggcgcagctagagagccccggagccgcggcgggagaggaacgcgcagccagccttgggaagcccaggcccggcagccatggcggtggaaggaggaatgaaatgtgtgaagttcttgctctacgtcctcctgctggccttttgcgcctgtgcagtgggactgattgccgtgggtgtcggggcacagcttgtcctgagtcagaccataatccagggggctacccctggctctctgttgccagtggtcatcatcgcagtgggtgtcttcctcttcctggtggcttttgtgggctgctgcggggcctgcaaggagaactattgtcttatgatcacgtttgccatctttctgtctcttatcatgttggtggaggtggccgcagccattgctggctatgtgtttagagataaggtgatgtcagagtttaataacaacttccggcagcagatggagaattacccgaaaaacaaccacactgcttcgatcctggacaggatgcaggcagattttaagtgctgtggggctgctaactacacagattgggctgtgggattaatttcaacgagaaggcgatccataaggagggctgtgtggagaagattgggggctggctgaggaaaaatgtgctggtggtagctgcagcagcccttggaattgcttttgtcgaggttttgggaattgtctttgcctgctgcctcgtgaagagtatcagaagtggctacgaggtgatgtaggggtctggtctcctcagcctcctcatctgggggagtggaatagtatcctccaggtttttcaattaaacggattattttttcagaccgaaaa

SEQ ID NO: 404890 - DNA, 956 bp, Homo sapiens
gtggcttcggggaagggcttcctccccttttctcagactaggatccctggaaaatggagaagctgtgctaatagaggggggccagaaatccccactctagaatgctgtagaatgttgggagacacccaggatctctccgccccggcgctcagagggtaactctcacccacctcgtccgcttctctgaaccagagtgacccaggctgcgctccgccccgctctcctaccccgagttggcacggaggcccggcagccatggcggtggaaggaggaatgaaatgtgtgaagttcttgctctacgtcctcctgctggccttttgcgcctgtgcagtgggactgattgccgtgggtgtcggggcacagcttgtcctgagtcagaccataatccagggggctacccctggctctctgttgccagtggtcatcatcgcagtgggtgtcttcctcttcctggtggcttttgtgggctgctgcggggcctgcaaggagaactattgtcttatgatcacgtttgccatctttctgtctcttatcatgttggtggaggtggccgcagccattgctggctatgtgtttagagataaggtgatgtcagagtttaataacaacttccggcagcagatggagaattaccaaccgagtccccgactcctgctgcattaatgttactgtgggctgtgggattaatttcaacgagaaggcgatccataaggagggctgtgtggagaagattgggggctggctgaggaaaaatgtgctggtggtagctgcagcagcccttggaattgcttttgtcgaggttttgggaattgtctttgcctgctgcctcgtgaagagtatcagaagtggctacgaggtgatgtaggggtctggtctcctcagcctcctcatctgggggagtggaatagtatcctccaggtttttcaattaaacggattattttttcagaccgaaaa

SEQ ID NO: 404891 - DNA, 829 bp, Homo sapiens
ttcttccgggtaggggccacgtggccctggccgggcggggggctcggcccaccccgcgccgggcccagtgactcaggccgcagctgttaccgcgtcacatgagggaggccggcggccactcggcgggggaggggaccgtggctggagcccggggcggggccgcgcggcaggcggggcgggagccggggggcgcagctagagagccccggagccgcggcgggagaggaacgcgcagccagccttgggaagcccaggcccggcagccatggcggtggaaggaggaatgaaatgtgtgaagttcttgctctacgtcctcctgctggccttttgcgcctgtgcagtgggactgattgccgtgggtgtcggggcacagcttgtcctgagtcagaccataatccagggggctacccctggctctctgttgccagtggtcatcatcgcagtgggtgtcttcctcttcctggtggcttttgtgggctgctgcggggcctgcaaggagaactattgtcttatgatcacgtttgccatctttctgtctcttatcatgttggtggaggtggccgcagccattgctggctatgtgtttagagataaggtgatgtcagagtttaataacaacttccggcagcagatggagaattacccgaaaaacaaccacactgcttcgatcctggacaggatgcaggcagattttaagtgctgtggggctgctaactaggcaagtccaaaatccacagggcagtcctcaggaagggtgggccagaactcttagacacagactgaagcccctggcaatgggtggaatttctccccctcccagggtcgacgc

SEQ ID NO: 404892 - DNA, 801 bp, Homo sapiens
ttcttccgggtaggggccacgtggccctggccgggcggggggctcggcccaccccgcgccgggcccagtgactcaggccgcagctgttaccgcgtcacatgagggaggccggcggccactcggcgggggaggggaccgtggctggagcccggggcggggccgcgcggcaggcggggcgggagccggggggcgcagctagagagccccggagccgcggcgggagaggaacgcgcagccagccttgggaagcccaggcccggcagccatggcggtggaaggaggaatgaaatgtgtgaagttcttgctctacgtcctcctgctggccttttgcgcctgtgcagtgggactgattgccgtgggtgtcggggcacagcttgtcctgagtcagaccataatccagggggctacccctggctctctgttgccagtggtcatcatcgcagtgggtgtcttcctcttcctggtggcttttgtgggctgctgcggggcctgcaaggagaactattgtcttatgatcacgtttgccatctttctgtctcttatcatgttggtggaggtggccgcagccattgctggctatgtgtttagagataaggtgatgtcagagtttaataacaacttccggcagcagatggagaattaccgttttgggaattgtctttgcctgctgcctcgtgaagagtatcagaagtggctacgaggtgatgtaggggtctggtctcctcagcctcctcatctgggggagtggaatagtatcctccaggtttttcaattaaacggattattttttcagaccgaaaa

SEQ ID NO: 404893 - DNA, 649 bp, Homo sapiens
  misc_feature (648)..(648): n is a, c, g, or t
ttcttccgggtaggggccacgtggccctggccgggcggggggctcggcccaccccgcgccgggcccagtgactcaggccgcagctgttaccgcgtcacatgagggaggccggcggccactcggcgggggaggggaccgtggctggagcccggggcggggccgcgcggcaggcggggcgggagccggggggcgcagctagagagccccggagccgcggcgggagaggaacgcgcagccagccttgggaagcccaggcccggcagccatggcggtggaaggaggaatgaaatgtgtgaagttcttgctctacgtcctcctgctggccttttgcgcctgtgcagtgggactgattgccgtgggtgtcggggcacagcttgtcctgagtcagaccataatccagggggctacccctggctctctgttgccagtggtcatcatcgcagtgggtgtcttcctcttcctggtggcttttgtgggctgctgcggggcctgcaaggagaactattgtcttatgatcacgtttgccatctttctgtctcttatcatgttggtggaggtggccgcagccattgctggctatgtgtttagagataaggcgatgcccccacttcctccccccttccggccccccatggcgcattccccccnc

SEQ ID NO: 404894 - DNA, 325 bp, Homo sapiens
cagggaagagacagaggcacaaggagggggttggggtgggaagtttctgatggtgcttttgtcctttgtgcctgccaccttcagggctgtgtggagaagattgggggctggctgaggaaaaatgtgctggtggtagctgcagcagcccttggaattgcttttgtcgaggttttgggaattgtctttgcctgctgcctcgtgaagagtatcagaagtggctacgaggtgatgtaggggtctggtctcctcagcctcctcatctgggggagtggaatagtatcctccaggtttttcaattaaacggattattttttcagaccgaaaa

SEQ ID NO: 404895 - DNA, 218 bp, Homo sapiens
  misc_feature (6)..(6): n is a, c, g, or t
  misc_feature (42)..(42): n is a, c, g, or t
tggtancgtttgggaagcggtttccctctgtctaccaccaanatttggagtcatcagtattcctgaacttgaactctaccgtaaacaatgtaatgccaggaagaagtaccgaatgtcagctagaaaccggtgcagagggaaaagagtcaggcagagctgatggatccagtttgaaaaaacaaaatgccattcaacggtaaaaaaaaaaaataataaaa

SEQ ID NO: 404896 - DNA, 741 bp, Homo sapiens
ctctagcggagacagaaaaattcgctgcaagtacagcactttctagattgctcctggagtgtgggaacaacagtctctcctgtccacgttactgaatccagaaaaaaggtgaacttacgaacatgggaaaagaaatccagctaaagcctaaggcaaatgtctcttcttacgttcactttttgctgaattacagaaacaaattcaaggagcagcagccaaatacctacgttggctttaaagagttctctagaaagtgttcggaaaaatggagatccatctcaaagcatgaaaaggccaaatatgaagccctggccaaactcgacaaagcccgataccaggaagaaatgatgaattatgttggcaagaggaagaaacggagaaagcgggatccccaggcacccagacggcctccatcatccttcctactcttctgccaagaccactatgctcagctgaagagggagaacccgaactggtcggtggtgcaggtggccaaggccacagggaagatgtggtcaacagcgacagacctggagaagcacccttatgagcaaagagtggctctcctgagagctaagtacttcgaggaacttgaactctaccgtaaacaatgtaatgccaggaagaagtaccgaatgtcagctagaaaccggtgcagagggaaaagagtcaggcagagctgatggatccagtttgaaaaaacaaaatgccattcaacggtaaaaaaaaaaaataataaaa

SEQ ID NO: 404897 - DNA, 712 bp, Homo sapiens
ctctagcggagacagaaaaattcgctgcaagtacagcactttctagattgctcctggagtgtgggaacaacagtctctcctgtccacgttactgaatccagaaaaaagaaacaaattcaaggagcagcagccaaatacctacgttggctttaaagagttctctagaaagtgttcggaaaaatggagatccatctcaaagcatgaaaaggccaaatatgaagccctggccaaactcgacaaagcccgataccaggaagaaatgatgaattatgttggcaagaggaagaaacggagaaagcgggatccccaggcacccagacggcctccatcatccttcctactcttctgccaagaccactatgctcagctgaagagggagaacccgaactggtcggtggtgcaggtggccaaggccacagggaagatgtggtcaacagcgacagacctggagaagcacccttatgagcaaagagtggctctcctgagagctaagtacttcgaggaacttgaactctaccgtaaacaatgtaatgccaggaagaagtaccgaatgtcagctagaaaccggtgcagagggaaaagagtcaggcagagctgatggatccagtttgaaaaaacaaaatgccattcaacgaaaaaaaaaaaaaaacacaaaaacaaaaaagacaaaaaagaccacagaccaaccaggaaacaaaaacaagaacaaaag

SEQ ID NO: 404898 - DNA, 522 bp, Homo sapiens
ataatacaagcgtggtctggttgatgggtatttttagatggttcttatgtctatagtaggaggcttaacattttagcagaatctgaacatctgagcatttagcctaaggcagttaactcctacaaagtgtccatgaaacaaatacatctgaaaaggcctatgctccaatgcagatctgtaatccatgagcagttttggagtacagatcagattaatgaagatactttaacaacatgccacctaatctgatgttaatagttaacgttacccctgaattggcaggaattgtcaaaggaaatagagatgcaagcttacatcaaatttaaaagtatggcaggatgattatgtagataatgtgttaagtggttttcacagacaaattaactatgcacagttatatattaacataatgccactgtattttagtaaaaatataagggaaaccaagtcctgaaaaataaccaggctaacttttactaccttccagttttgtcgacgcggcccgcgaatttagtagtagta

SEQ ID NO: 404899 - DNA, 451 bp, Homo sapiens
ggcaacataggtgaaccttgtctctaccaaaaatgcaaaaattagccaggcgtggtgatgcacgtctgtaatcccagcactttgggaggccgagtcgggcagatcacaaggtcaggagatcgagaccatcctggccaacatggtgaaaccccgtctctagtaaaatacaaaaaaaattagctgagcatggtggtgcgcgcctgtagtcccagctactcaggaggctgaagcaggggaatcgcttgaacccgggaggtagagattgcagtgagccgagatcgcaccactgctctccaggctggcgacagggcaagactccgtctcaacaacaacaaaaaaagaagtgttgagtaaccagtgagctgacaagcccaccacgtggaggactcgggtaggagacttgggcttgggggagtggatcgcattctatgatgacagagctagctggggg

SEQ ID NO: 404900 - DNA, 621 bp, Homo sapiens
ggcaacataggtgaaccttgtctctaccaaaaatgcaaaaattagccaggcgtggtgatgcacgtctgtaatcccagcactttgggaggccgagtcgggcagatcacaaggtcaggagatcgagaccatcctggccaacatggtgaaaccccgtctctagtaaaatacaaaaaaaattagctgagcatggtggtgcgcgcctgtagtcccagctactcaggaggctgaagcaggggaatcgcttgaacccgggaggtagagattgcagtgagccgagatcgcaccactgctctccaggctggcgacagggcaagactccgtctcaacaacaacaaaaaaagaagtgttgagtaaccagtgagctgacaagcccaccacgtggaggactcgggctgtgagaagctcggcaggaaggcgggagaggccccaccttcagaggcgcagctcagaaggcttgagagctccccgtgaaagggatccctgcagtgcagaaactgtctctgttacctgcattgctctgaacaaaaccgacccagagcagtttcagtgatggtgataatctcaagcaatgccattaccaaatcttaatgccctgatcctggccacctttgaggaggtaag

SEQ ID NO: 404901 - DNA, 388 bp, Homo sapiens
gagggtcggagagggaaggaagggagaaaaacagaggggggagagggaataactgactccttcaggaagcgctcttgaattttagctcaaaagacacttagcaatttgcagtagttacctgttactccataataaattaccccaaaatattagttgagtgtggtggtgcacacttgtagtcctagctactcaggaggctgaggtgggagcattgcttcaggaggctgagctgcagtgagctatgatcatgccactgcactctgacctgggcaacagagtgagatcctatttctataaaaataaataaataaatcaccctaaaacttagtggcttcaagcaataaacatttattttctgtccatttctgtgggtcaggaattctggagt

SEQ ID NO: 404902 - DNA, 486 bp, Homo sapiens
tgtcctcttttcccttgtcatcttcaacatagacttaactcccttaaacccaaactctgttgggccctgaccctccagtaattggttaccagtgtgtcaggcaatcagactttccagtggtgccactgagatggagccccccaaaaagagtagagtttccatttctagattgtggattttcagattttcagataaattctgccatttttatttcatttcctggaagtcagggtcagttcatgaaaagctgttaaacaatatgctaaagttgaaatgtcaaccctcactctaaactctccctgttcagggcataaaatgaagacctcactgggttttatagtggctttccgattttgctagtccattgaagaagggagtttgaaagttgttgtacaccgttaacgattatctgcccatgtcctgcctgaaataccctgattgtttatggaaagtaactttaataaagctagatatagtttggcttgg

SEQ ID NO: 404903 - DNA, 479 bp, Homo sapiens
gcaccgtcaagactgtgtattgcagcggctgtcaggaaaccaagtatgcctccgggagggttaagatcaaagatgaagctggaaatgtcgtcctggacgagaagcagatgagccctcaacacgcagcatcacatgggaaatgccaattgcagatttttgctaaaacagacaaaaactaataacatattagctgccctaaatgatcttggagagccaccaaaactttaggactacccaagtcatctagaaattgcaaaggaaaagacattctctcccctatttaggaaacttggttagagcagcacacgtcagagaacagaaggctcacaaaagaacgatttcttgtcttctgctagcttttgaatattttgctcttgcttctctagttcttttaattgtgatgttagggtgtcaattttagatccttcctgctttctgatgtgggcatttagtattataaatttttctcataacactgc

SEQ ID NO: 404904 - DNA, 416 bp, Homo sapiens
ctaaggctcaggtctgcctcttgggtgagcagcgactacgtgagactggtattacatgggtgggaaaataatttatcaacagttttaggtaaagaaatgcagatttattagagaaggtatgaaaatacgttgaaaggttgcaatgggcagaccagccagagaggagctgacttcaaggaaacaaaggcttgctggagattttatccgatggttcttgggctgcagagtgctgtgcagtaccgagaactccaaggttacagggagctaacttgcatgtgtctcgtgatagctgagtgcaggaagattgtgagttatttgcacaggagggctacgtgtcctgcaccatgaagaaaggcagacttagagtgcatctgctcttcttgctatcccttggtcccactagcctgactcccttt

SEQ ID NO: 404905 - DNA, 446 bp, Homo sapiens
gtctacttctaaataaaactattactacatcttcattgccacagtccttcagattttgtttactggtagctgttggagatattctgacttcctgtaaatagaattccaagtattctgagagacaaaatagaatgaaagtgcactgctaaagatgtggatttatttccttaacacattaaattcatagtcagcagtaatgtatatccaggtgttttatctcaaacacaatatggcaaatatttaaacgccttccaatttttgaaaatttctccttttcataaggtttgttagattattttggccttcagaattccctatttcatggtacctggtcaaaaatgtcatagccattcattgaacatacatatactgagcatcagttgtatgtcagatagtgtcctaggaacaaaaataaataagaaaaaactctgtcactcaaggtgttc

SEQ ID NO: 404906 - DNA, 335 bp, Homo sapiens
gtcttgctctgttatctaggctagagtgcaatggcacaatctcagctcactgcaacttctgcctcccaggttcaagtgactctcctacctcagcttcctaagtagctgggattacaggcatgtgccaccacaccctgctaatttttgtaattttagtagagactggggtctcaccatgttggctaagctggtctagaacttctgacctcaaatggtccacccccatcggcctcccaaagtgctgggattacaggcatgagccaccatgcccggccccagctataagggttctttctatgaaaacctaagataaatactctggaaaggtgaggtgc

SEQ ID NO: 404907 - DNA, 561 bp, Homo sapiens
atttaaggtgggtttgtttttgtctttgtgttttattttttgtgtcagctcaaagcacttaatgtaagaaaatactagaagaaagaagtactggaagaaaacggccacactggagtggaaggttctttctaagcatgacctagaagccgtcattagagagttggccaagacctgattaataaatttgaccaaattaaaaactcgctacaaaaaaaaaaaaaaaaaaaaaggaaaagaaattttctgacttatctcatctgatagtaggttataagaccctcattccagaagaggttctgccctatacctgggaggaaggaatgctgtacagagagaccaagaagaatatggccaggccttgctgggatccccccagtcccagtctgtgaccattagatgatactccttttgttcaattacatttctgcacagctgttcattcttcatcaaatctaagcataaaaatagttttcccctgggtccttgggtcttcatttctgaaggctcccatgtcacctaaaactttgattaaataaatgtattatgcttttctcttgttaa

SEQ ID NO: 404908 - DNA, 506 bp, Homo sapiens
aggggcagtgtcccgcaggcagtgaactggcacagcacccctgcccctgaccctcgccattgccattgtgatgggggaggggtcagggcccctctgcacagtccaagccacagcaaaatctgggaagtctcctggtctttgcccaggaaacagccttcctagacaggctctgaattattcacctcttccccttcatattacaactgccactcagacgtgaaggtgcagcacaaagcttcagaaacaatggaagaaactgaaatcaggatcctgactcctgcatgggaaagctatagctgtgtgactttgtgcaaatcacacacctgttctgtgtcttgcgtctgcatctgtgaaatgcaggtgaacctagcacttacctttgagggctccttggagaattaaatgaattaattcatacaaaggacttagagagatgtccggcactgagtaaacactcagtgctagctgttatgatgatgattaaagataatcaaagcttaaaaaaa

SEQ ID NO: 404909 - DNA, 443 bp, Homo sapiens
ggatcttaaaatttattcacaatgttttcatgttttatattaggaattatctggttctacagaagtagagaattccattcctacgggaatatcagaaggaggttaaagtgggcacaggtaaatcatccatttggctatcaaaaagtctgattctgaccaggcgcagtggctcacgcctataatcccaccactttgacaggccgaggcgggcagatgacctgatgtcaggagtcgagaccagcctggccaagatggtgaagccccgtctctactaaaaatacaaaaattagctgggcgtggaggcgggcacctgtaatcccagctacttgggaggctgaggcaggagaatcacttgaatccgggaggcggaggttgcagtgagaggagattgagccactgcactccagcccgggcgacagagtgagactccgtctcaaaaaaaa

SEQ ID NO: 404910 - DNA, 545 bp, Homo sapiens
tgagacaaggtctcattctgtagcctaggctggagtgcagtagtgctagcatgaggcttactgcagcctggacctcctgggctcaaacaattctcccactgtagcttcccacgtagctgagagtacaggtgcacaccaccacacttggctaatttttatgtgttcggtagagatgagttttcgccatgttgccggggccagtcacaaactcctgagctcaaaagatccactcgccttggcctcccaaagtgctgggattacagcagtgaaccacctcacccagcccacagtttgcatttctaacaagttcccaggtgatgctaatgctgctggtctgggggtagggaaagggaatgggaagcacgccttgataactaatgatctagacctgcttttccattatggtggtcactagccaaatgtggttactaatcacttcaaaggcgggtagggagactagggaactgaattttttatattatttcattttaattaatttaaacaccatgcacggtctagagatcattcagagacaaggctctaat

SEQ ID NO: 404911 - DNA, 344 bp, Homo sapiens
actttacagtttacattagactctcctccccgacgtcatttgcacctcccaaggccagttctcccggtggtttccagccctggggcgtttgtggttctctctgcctagtgggatgcaactggcatttagtgtttgtccgtatgtgggtgtggctggggagggcagagaggcaaacagccccgcacaagctgtacagtccccctcatcaagatgtggcactccctctttgccaatagcaactcctttttgaaacactgggcctgaagcaatcatcttgaagacatttttcatcaatcttgttgaaatcaacctggtttttcaaaatagaggaagcacatcaatga

SEQ ID NO: 404912 - DNA, 335 bp, Homo sapiens
aaatgctgcctgtgcccaaagcccccttccgcggacttctaagattaggagcaaactcaggggtaggggctgggggtgcagggagaggggatctgaaccacctgtccgcaagcaatagtcctattttgggctggtggcttctgagaggtgactcattgtggactcaggatgaccaagacaaagcaactctggctgattccagccaggaggattgaggcctgtgagttatacctgtggttgaaaaccgaagcttcccttgcccctgctccctccagtagtggccccttggggctatttgtgtcagaatattgaatgtgcgtgtgtgtgtgcgtgtg

SEQ ID NO: 404913 - DNA, 466 bp, Homo sapiens
aaggcaggagaatcgcttgaacccaggaggcagaggttgcagtgaggtgaggttggcaccattgcactgtagcctgggcaaaaagagcaaaactccatctcaaaataaataaataaataaaatgttcagtactcaccaaggtgcccctgttgtctctacttttatcttgatgcatcactgaattgatgttagatttcaaattcatcattgccctgatactattctatcctgaagccacctttatatagtgatgaaagaaattagcgatttgttattatcctctctctgttggtatacatcaaatactcacctaaaaaagagcaacaaccagtggaaaacatgatgtttttatttgggtgactatttacttgtaacctactagcaaactataaaattgtatgatatgcagaattttaactgaattgctttaagtgaacatttaaacatgataaacaatattgatggt

SEQ ID NO: 404914 - DNA, 2088 bp, Homo sapiens
ttttgtgatttacgttaaacagtttcagcattgagagtgagatgcttaagaattttaatttcatgtgagtgtgcagaaattataagaaactattaatttagagctggtcaccaaatgaaattttagaaccttcagtgctgctctttagtattttccatctcctacctttacactggaaatgaattttttaacttcgatctacaaaagtgcataaaaattcctctgtccatagagtttattttagatatttctctatgagtgactatacactagaatgtacatttgtatagaaaaagtaatttatataacttagaagaaagtcgtttttataacttatctatctctctctggtttttatttgtgtcacttctgcattgcccagtattttgagttgggggaaaaatgaactcacctggccccacctcctgttccagtgtgaaatactgacacttgctgccagcccagcctcctcacataagcattagaaatatcagacagtccactaggttagagcacctcattcatgaggttctgttatttattcggctctcccactaaaatgcagggcataaatttatgtgtctgctctaagactgcagctgtctgccccccctccaccctcctcctgcccttcctgtgtcagtgttacattcgctccccccacttttggtctcaggtctgtctcctttttgtttttatgggtgatttgcagtgattcagacagggcatccttgcatgttggcacttcctggaggttaccaggaggcagccatccttccttggcttggccaggcatccccgactccaccccactttccccttggtggtggaaaggtgggttggaggtgtgtactggggcacatagcccaggaatgttgctctgagaagaggacatgtgcagtagacacaaaaatataaggaagcaattatgttcatcaagccgaaagttgcagattttgaggaaatgtgtttaagataccactacataataaaagggaaaaccacttggcatttaaataacttacttcaagaggaaattatgatattttcagtctacaaatagagtggtttttaagccaaccttgagtaggtacaagcaaattataaacagtctgctcaaatgattttactatacttagactagaaaatggctcctcttctctctccctctggtccctatgtcccagtgctgtccctcatatgttacaattgttcgtgtatgtattttagaatattcacaggtaaatgatgcaaataatatatatataatgttaaatcatcctcaaactgggtgtatatgactttaggtaaaacagttccttactttaattgtctgttgaaagctttctgatctttctgataatactatacattttagtatatgtggcattgcttttgagggggggaatagccattttaacaaaaaaacttgtcacctatacctactatatagggcattttgctatgctgtatattgaaggctatattgtaatgatagaaactttcttaagtttgtatgacttctagaaagctgctttcagagtgaaaatctcctaggtcatttgttgaaaggttacttagactggatgtgtaatgttttttcttacatctcatgattgaaaccatgggaattgtgattcagagagaagtactgaaagtgaatgtctataaggtatcatctgagaagggttctggaatttagggttttgttgttgttacagagatgggatcttgatacgttgttcaggctggtctccaactcctggtctcaagtgagcctcgcatagctaaaagtggtgaagcttggacatgaatactggcccttcacttctctgctatcctgcctctcatagtctgcctctctcatagtaaataaatacagattatacttattatcaggccaaaattgtgaccacagtgtgggacattgggacttggttgcattgctctaaccagcaagaagcttgggtatcagctttgagaattattcccttctgtgtcacctcttgaatcaaatgtgtaccagtggtgcagcctccctaaacggatacagtatttcttcattctgcttacatatgactctttaaa

SEQ ID NO: 404915 - DNA, 393 bp, Homo sapiens
tagccctggacctgtctctgatcctgagagctgggccctctgcagctgagaacgtgccctgcagccgctttccctccttagccgtcgtgcacaacctgtgctgtgagacgctgctgcttgcctggcactgctgttgaatcagtctccatctcctcattttgatggcagcctgggtttgttatccttcaaagatcgtctcttggaaggacaccagcctctgattacatttccgagcctgcctggaggcagctaagctaatccgacacgatttgggtggattcccttctggcctcatgttctgacacaacctctggcagcagtagggtgggaagatggacaaaataattacgccctatgagttgaaaggagaattaaaattaattccctcgtgca

SEQ ID NO: 404916 - DNA, 649 bp, Homo sapiens
cttcctctctgcattcttttgcatgcccaccttatctaaaaaaatcaaatgtttagccaaccaggattagttcagattgtacgacccgaccctggccaatggggaaagggtacaggggcaggacttgtgtcaggaataaaggctcttgtgcccctttgttcaggtgtgctctcatggtgactggacaagaacgcacccctctgtgcagaactaaaattgctttgctaggaatcctttgttcgagtgttcaatttccttatgattttgagcgttattcctaacaggaagaaaagggatattcaggcctttcacagacctgacaacagagctgcacttcaatgtgacaggtattgaccatgtgtggctcctgggagcctggaatgtggctggtctgagctgcaatttgcaagaaaggtaaaatgcagagttagtttcaaagatttagttccataaatataaaaatatacaacatatagataaaaatatctatatataatatggataaaaatacatagcataatgcaatatatagatacataattatgttatatataaatatatatctcattcataattatacattgctcacatattaaaataatattttggatatattgctttaattaaattgttacaacagacggatgca

SEQ ID NO: 404917 - DNA, 394 bp, Homo sapiens
agaaggaactgaaagcagggacttgaacagatatttggacacccatgtccatagcagtgtgattagccagaaggtggaagcagcctacatgccctcagatggacggagtaatatgtggcatatacttacagtggcgtgttatccagccttggaaaaggaagaagatcctgacccaggccacggcatggatgaaccctgaggacgtgatactgagtgaagtaaggcagacacaaaaagacaaagactgcacctttttgagttttctaaagtggtcacagtcatagagacagaaagaggaatggtgggtcctgaactgtgcacttcgaaatggttaagatggtaaattttgttacatgtattttaccacaattaaatatgaaaatctaaagaaaaa

SEQ ID NO: 404918 - DNA, 779 bp, Homo sapiens
tgtcctgaatatacacttcaattaccacagtgacaagtgtttgctttttttttaaggaaaaaagaagcagtttctgagttgtttaccaataacttatgttaaaataagataagtttttattggctatacattcttatttatattatagattacagaaacatgaagataataggtgagacagctagtcaggaacagaatgtcttaaaaaagttgtcctcaggcataggttcagggatgtgactgacatctcatatattcttgcctctctgagcctgatacattttgtgtaggtcagacaggtctgggctatttttttttttcctcagccaatatccttctaaatatgtacacataggcaattggaaatagatgtaatcaataatttaaatgtattaaaatatttattgttagaatgttaatttacctgtaactctgcttatagtacaaagctttatatatatatcacatttccttaaaacattaagaagtgtgggctgggcacagtggctcatgcctgtaatcccagcactttgggaagcgaaggtgggcggatcacgaggtcaggagtttgagaccagcctggccaacatggtgaaactctgtctctactaaaaatacaaaaattacctgggcgtggtggcgggcgcctgtaatcccagctacttaggaggctgaggcaggagaatcgtttgaacccgggaggtggaggttccagtgagctgagattgtgccattgcactgcagcctgggcaacagggcgagacactgtctcaaaaaaa

SEQ ID NO: 404919 - DNA, 435 bp, Homo sapiens
tcattttttcttaaaacacacctatcccatttaaatcccacaagttttcaatgagagcattagaaggatcttctcccattttacaaactagaacatgaaggttcagagagtgatgcactttggatgttgccctcatccagatctcacgctgaaatgtaatccccagtgctggaggtggcgcctggtgggaggtgacgggatcatgggggcccatttctcatgaatggcttatcaccatccccttggtgctgtcctcccgagagtgagtgacttcctgagagacctggcggtttaaaagtatgtggcatcttgctctctcttgcccccacttagctttccaccatgattgggagcttctagaggcttccccagaaacagataccgctatgcttcctgcagcctaagcaataagagtgagaccctgcctcaaaaaaa

SEQ ID NO: 404920 - DNA, 533 bp, Homo sapiens
tcattttttcttaaaacacacctatcccatttaaatcccacaagttttcaatgagagcattagaaggatcttctcccattttacaaactagaacatgaaggttcagagagtgatgcactttggatgttgccctcatccagatctcacgctgaaatgtaatccccagtgctggaggtggcgcctggtgggaggtgacgggatcatgggggcccatttctcatgaatggcttatcaccatccccttggtgctgtcctcccgagagtgagtgacttcctgagagacctggcggtttaaaagtatgtggcatcttgctctctcttgcccccacttagctttccaccatgattgggagcttctagaggcttccccagaaacagataccgctatgcttcctgtacagcctgcagattcatgagctaattcatcctcttttctttataaattacccagttttagttatttgtttatttgttttttggatggagtctcactccagcctaagcaataagagtgagaccctgcctcaaaaaaa

SEQ ID NO: 404921 - DNA, 539 bp, Homo sapiens
cgtacacccaaggccctgagacagagtctcgctctgtcacccaggctggagtgcggtggcgcgatctcggctcactgcaagctctgcctcccgggttcactccattcttctgcctcagcctccccggcagctgggactacaggcgcataccgccacgcccagctaattttttgtatttttagaagagatggggtttaaccatgttagccagaatggtcttgatcttctgaccttgtgatccgcccgcctcagcctcccaaagtgctgggattacaggcaggagccaccacatccggcctattctactgctttttaaaaataattttgagtacttattctccttcccctcacctttgccaaaaatccatgacataactgataaaaatattttaggctgatttgctatttaattagaaatcaatttgaataataattctaaaatattaggacatagtctaaccccactaaaatcaaacaaaaacatcgttccctttacagagatctttaaaaactttgagcaagcaaaaaaaaaaaacttc

SEQ ID NO: 404922 - DNA, 484 bp, Homo sapiens
  misc_feature (441)..(441): n is a, c, g, or t
  misc_feature (464)..(464): n is a, c, g, or t
cgagggccgcgccagactgcgacggatacagggagggcaagggtttccttttggcgcttccctttggaccccggagtgaaaaactctaacgtccagatcagtggagagaaacgcagatttaggaccctgaggagtctttttcacccgtttcccgtcactcgctcaggcgcgccgagggcagtccttgtggggtcctcgtggccagccaagatggttgcccccgcagtgaaggttgcccgaggatggtcgggcctggcgttgggcgtgcggcgggctgtcttgcagcttccagggctaactcaggtgagatggagccgctatagtcctgaattcaaggatcccttgattgacaaggaatattatcgcaagccagtggaggagctaactgaggaggagaaatatgttcgggagcggcacatgcgagggttatcctcagagtcnagtgcgtactagggcatcatggnacgaaagcaaatttgttccc

SEQ ID NO: 404923 - DNA, 463 bp, Homo sapiens
  misc_feature (444)..(444): n is a, c, g, or t
  misc_feature (446)..(446): n is a, c, g, or t
cgagggccgcgccagactgcgacggatacagggagggcaagggtttccttttggcgcttccctttggaccccggagtgaaaaactctaacgtccagatcagtggagagaaacgcagatttaggaccctgaggagtctttttcacccgtttcccgtcactcgctcaggcgcgccgagggcagtccttgtggggtcctcgtggccagccaagatggttgcccccgcagtgaaggttgcccgaggatggtcgggcctggcgttgggcgtgcggcgggctgtcttgcagcttccagggctaactcaggtgagatggagccgctatagtcctgaattcaaggatcccttgattgacaaggaatattatcgcaagccagtggaggagctaactgaggaggagaaatatgttcgggagcggcacatggaaaggtatctaaagagtcgggancntactgatgtattctatg

SEQ ID NO: 404924 - DNA, 1410 bp, Homo sapiens
cgagggccgcgccagactgcgacggatacagggagggcaagggtttccttttggcgcttccctttggaccccggagtgaaaaactctaacgtccagatcagtggagagaaacgcagatttaggaccctgaggagtctttttcacccgtttcccgtcactcgctcaggcgcgccgagggcagtccttgtggggtcctcgtggccagccaagatggttgcccccgcagtgaaggttgcccgaggatggtcgggcctggcgttgggcgtgcggcgggctgtcttgcagcttccagggctaactcaggtgagatggagccgctatagtcctgaattcaaggatcccttgattgacaaggaatattatcgcaagccagtggaggagctaactgaggaggagaaatatgttcgggagctcaagaagactcagctcatcaaagctgctccagcagggaaaacaagttctgtgtttgaagacccagtcatcagtaaattcaccaacatgatgatgataggaggaaacaaagtactggccagatccctcatgattcagactctggaagctgtgaaaaggaagcagtttgagaagtaccatgccgcttctgcagaggaacaggcaaccatcgaacgcaacccctacaccatcttccatcaagcactgaaaaactgtgagcctatgattgggctggtacccatcctcaagggaggccgtttctaccaggtccctgtacccctacccgaccggcgtcgccgcttcctagccatgaagtggatgatcactgagtgccgggataaaaagcaccagcggacactgatgccggagaagctgtcacacaagctgctggaggctttccataaccagggccccgtgatcaagaggaagcatgacttgcacaagatggcagaggccaaccgtgccctggcccactaccgctggtggtagagtctccaggaggagcccagggccctctgccgcaagaaacagtgtgagctactgccacgctgaaaactacctgtgggttaaggatgtagttcctttgtaagggtgggcaggcctcgtaagaaagatgtagcagcatattcactatccgttaatccttctttctttgaggctggaacttgctctctctgcccctatttccttgtaaagagggagcacattgacttgggaatttcctccaggaaactcagggctgttttctcttcccttaggttggggcggacctttggacatataaaggaagcagttttagtatcagaaaagatttattagaaaattctcacgctgaactggtgtagcatgtggtgcagcattcagtgaaactggctggaggaaataggcttgtttccagagttgtccttatacaaaatgtataaaaagcagtttctggtgacaaaacacaacacaaaaagg

SEQ ID NO: 404925 - DNA, 1299 bp, Homo sapiens
  misc_feature (1)..(1): n is a, c, g, or t
ntgctgttctgaggtttccgtagtggatcttggcttctctttcctctctcctccaggtggctgtcctgcctggtacttccagccaatctcgtgagccaggcgcccagataggcaaagtttcttgtaggcttcagacgcacgacttgagggcagcaggaaccaccatccgctttttcttgcccgcgtcatcctgcaaattccaggctaactcaggtgagatggagccgctatagtcctgaattcaaggatcccttgattgacaaggaatattatcgcaagccagtggaggagctaactgaggaggagaaatatgttcgggagctcaagaagactcagctcatcaaagctgctccagcagggaaaacaagttctgtgtttgaagacccagtcatcagtaaattcaccaacatgatgatgataggaggaaacaaagtactggccagatccctcatgattcagactctggaagctgtgaaaaggaagcagtttgagaagtaccatgccgcttctgcagaggaacaggcaaccatcgaacgcaacccctacaccatcttccatcaagcactgaaaaactgtgagcctatgattgggctggtacccatcctcaagggaggccgtttctaccaggtccctgtacccctacccgaccggcgtcgccgcttcctagccatgaagtggatgatcactgagtgccgggataaaaagcaccagcggacactgatgccggagaagctgtcacacaagctgctggaggctttccataaccagggccccgtgatcaagaggaagcatgacttgcacaagatggcagaggccaaccgtgccctggcccactaccgctggtggtagagtctccaggaggagcccagggccctctgccgcaagaaacagtgtgagctactgccacgctgaaaactacctgtgggttaaggatgtagttcctttgtaagggtgggcaggcctcgtaagaaagatgtagcagcatattcactatccgttaatccttctttctttgaggctggaacttgctctctctgcccctatttccttgtaaagagggagcacattgacttgggaatttcctccaggaaactcagggctgttttctcttcccttaggttggggcggacctttggacatataaaggaagcagttttagtatcagaaaagatttattagaaaattctcacgctgaactggtgtagcatgtggtgcagcattcagtgaaactggctggaggaaataggcttgtttccagagttgtccttatacaaaatgtataaaaagcagtttctggtg

SEQ ID NO: 404926 - DNA, 1337 bp, Homo sapiens
cgagggccgcgccagactgcgacggatacagggagggcaagggtttccttttggcgcttccctttggaccccggagtgaaaaactctaacgtccagatcagtggagagaaacgcagatttaggaccctgaggagtctttttcacccgtttcccgtcactcgctcaggcgcgccgagggcagtccttgtggggtcctcgtggccagccaagatggttgcccccgcagtgaaggttgcccgaggatggtcgggcctggcgttgggcgtgcggcgggctgtcttgcagcttccagggctaactcaggtgagatggagccgctatagtcctgaattcaaggatcccttgattgacaaggaatattatcgcaagccagtggaggagctaactgaggaggagaaatatgttcgggagctcaagaagactcagctcatcaaagctgctccagcagggaaaacaagttctgtgtttgaagacccagtcatcaggttagatggaaacaaacatggatgatcactgagtgccgggataaaaagcaccagcggacactgatgccggagaagctgtcacacaagctgctggaggctttccataaccagggccccgtgatcaagaggaagcatgacttgcacaagatggcagaggccaaccgtgccctggcccactaccgctggtggtagagtctccaggaggagcccagggccctctgccgcaagaaacagtgttggggcggacctttggacatataaaggaagcagttttagtatcagaaaagatttattagaaaattctcacgctgaactggtgtagcatgtggtgcagcattcagtgaaactggctggaggaaataggcttgtttccagagttgtccttatacaaaatgtataaaaagcagtttctggtgaaaaaaaagaaaaaaaaaaaaaaagaaatgaaacaataaagagaacaggaaaaaacaaaagataaaaaaggaaacatacggaaaaaaatatgtacacacagacaagaatatgcccggaacacgctcaagacaaataaaaacaaaagaagagggggggggggaggcgggaaagaacataatctcaccacaccaggaggggaggaagagcaatgaaacacaagcaaacaccgagacgtagcgtattgaagaacaccggggacggcccaaccaacgaggttagacataacatagagacaagaagacagagcagaccggccataaaaagacaacgaggagacagacagcaaacacaaaaccgccaggagatagttataagagagcagaccaaccaacatctggtagagggaaacaaccaggaggggacgcaaccacacaa

SEQ ID NO: 404927 - DNA, 1389 bp, Homo sapiens
cgagggccgcgccagactgcgacggatacagggagggcaagggtttccttttggcgcttccctttggaccccggagtgaaaaactctaacgtccagatcagtggagagaaacgcagatttaggaccctgaggagtctttttcacccgtttcccgtcactcgctcaggcgcgccgagggcagtccttgtggggtcctcgtggccagccaagatggttgcccccgcagtgaaggttgcccgaggatggtcgggcctggcgttgggcgtgcggcgggctgtcttgcagcttccagggctaactcaggtgagatggagccgctatagtcctgaattcaaggatcccttgattgacaaggaatattatcgcaagccagtggaggagctaactgaggaggagaaatatgttcgggagctcaagaagactcagctcatcaaagctgctccagcagggaaaacaagttctgtgtttgaagacccagtcatcagtaaattcaccaacatgatgatgataggaggaaacaaagtactggccagatccctcatgattcagactctggaagctgtgaaaaggaagcagtttgagaagtaccatgccgcttctgcagaggaacaggcaaccatcgaacgcaacccctacaccatcttccatcaagcactgaaaaactgtgagcctatgattgggctggtacccatcctcaagggaggccgtttctaccaggtccctgtacccctacccgaccggcgtcgccgcttcctagccatgaagtggatgatcactgagtgccgggataaaaagcaccagcggacactgatgccggagaagctgtcacacaagctgctggaggctttccataaccagggccccgtgatcaagaggaagcatgacttgcacaagatggcagaggccaaccgtgccctggcccactaccgctggtggtagagtctccaggaggagcccagggccctctgccgcaagaaacagtgtgagctactgccacgctgaaaactacctgtgggttaaggatgtagttcctttgtaagggtgggcaggcctcgtaagaaagatgtagcagcatattcactatccgttaatccttctttctttgaggctggaacttgctctctctgcccctatttccttgtaaagagggagcacattgacttgggaatttcctccaggaaactcagggctgttttctcttcccttaggttggggcggacctttggacatataaaggaagcagttttagtatcagaaaagatttattagaaaattctcacgctgaactggtgtagcatgtggtgcagcattcagtgaaactggctggaggaaataggcttgtttccagagttgtccttatacaaaatgtataaaaagcagtttctggtg

SEQ ID NO: 404928 - DNA, 1599 bp, Homo sapiens
cgagggccgcgccagactgcgacggatacagggagggcaagggtttccttttggcgcttccctttggaccccggagtgaaaaactctaacgtccagatcagtggagagaaacgcagatttaggaccctgaggagtctttttcacccgtttcccgtcactcgctcaggcgcgccgagggcagtccttgtggggtcctcgtggccagccaagatggttgcccccgcagtgaaggttgcccgaggatggtcgggcctggcgttgggcgtgcggcgggctgtcttgcagcttccagggctaactcaggtgagatggagccgctatagtcctgaattcaaggatcccttgattgacaaggaatattatcgcaagccagtggaggagctaactgaggaggagaaatatgttcgggagctcaagaagactcagctcatcaaagctgctccagcagggaaaacaagttctgtgtttgaagacccagtcatcagtaaattcaccaacatgatgatgataggaggaaacaaagtactggccagatccctcatgattcagactctggaagctgtgaaaaggaagcagtttgagaagtaccatgccgcttctgcagaggaacaggcaaccatcgaacgcaacccctacaccatcttccatcaagcactgaaaaactgtgagcctatgattgggctggtacccatcctcaagggaggccgtttctaccaggtccctgtacccctacccgaccggcgtcgccgcttcctagccatgaagtggatgatcactgagtgccgggataaaaagcaccagcggacactgatgccggagaagctgtcacacaagctgctggaggctttccataaccagggccccgtgatcaagaggaagcatgacttgcacaagatggcagaggccaaccgtgccctggcccactaccgctggtggtagagtctccaggaggagcccagggccctctgccgcaagaaacagtgttggggcggacctttggacatataaaggaagcagttttagtatcagaaaagatttattagaaaattctcacgctgaactggtgtagcatgtggtgcagcattcagtgaaactggctggaggaaataggcttgtttccagagttgtccttatacaaaatgtataaaaagcagtttctggtgaaaaaaaagaaaaaaaaaaaaaaagaaatgaaacaataaagagaacaggaaaaaacaaaagataaaaaaggaaacatacggaaaaaaatatgtacacacagacaagaatatgcccggaacacgctcaagacaaataaaaacaaaagaagagggggggggggaggcgggaaagaacataatctcaccacaccaggaggggaggaagagcaatgaaacacaagcaaacaccgagacgtagcgtattgaagaacaccggggacggcccaaccaacgaggttagacataacatagagacaagaagacagagcagaccggccataaaaagacaacgaggagacagacagcaaacacaaaaccgccaggagatagttataagagagcagaccaaccaacatctggtagagggaaacaaccaggaggggacgcaaccacacaa

SEQ ID NO: 404929 - DNA, 1900 bp, Homo sapiens
cgagggccgcgccagactgcgacggatacagggagggcaagggtttccttttggcgcttccctttggaccccggagtgaaaaactctaacgtccagatcagtggagagaaacgcagatttaggaccctgaggagtctttttcacccgtttcccgtcactcgctcaggcgcgccgagggcagtccttgtggggtcctcgtggccagccaagatggttgcccccgcagtgaaggttgcccgaggatggtcgggcctggcgttgggcgtgcggcgggctgtcttgcagcttccagggtgagagggtggcgagcagcggggggggcgctgcgaggaaggaagggggccacaggcaggccgcgtgggcccctagagagagcattgccctgggggccggagtatctggattcaagcttctaagttagctgcgtgaccctgcgccaatccgaaggtttagtgactacctctcgcctaaggagtctggctgatctagggttctaacgcggagctgaaagtgcggttcagctaaagagctcagatctgggatcgcctgtgaattgggatgggtgtgtaggcgccaagcccatccttaccgttagcacttgaccaggaggagactttacccgcctgcttggggaatgtcctcctacttgggacaagggcctgaattgttgtggctcaggtttagctcgcggtctccgcgccgctctccctcgtcggcgcgttggcagtcatgcctattgttaagtcaaacctactcgcttgtggagtcagcttttgcctgcctcctcctttccccccctcccaggctaactcaggtgagatggagccgctatagtcctgaattcaaggatcccttgattgacaaggaatattatcgcaagccagtggaggagctaactgaggaggagaaatatgttcgggagctcaagaagactcagctcatcaaagctgctccagcagggaaaacaagttctgtgtttgaagacccagtcatcagtaaattcaccaacatgatgatgataggaggaaacaaagtactggccagatccctcatgattcagactctggaagctgtgaaaaggaagcagtttgagaagtaccatgccgcttctgcagaggaacaggcaaccatcgaacgcaacccctacaccatcttccatcaagcactgaaaaactgtgagcctatgattgggctggtacccatcctcaagggaggccgtttctaccaggtccctgtacccctacccgaccggcgtcgccgcttcctagccatgaagtggatgatcactgagtgccgggataaaaagcaccagcggacactgatgccggagaagctgtcacacaagctgctggaggctttccataaccagggccccgtgatcaagaggaagcatgacttgcacaagatggcagaggccaaccgtgccctggcccactaccgctggtggtagagtctccaggaggagcccagggccctctgccgcaagaaacagtgtgagctactgccacgctgaaaactacctgtgggttaaggatgtagttcctttgtaagggtgggcaggcctcgtaagaaagatgtagcagcatattcactatccgttaatccttctttctttgaggctggaacttgctctctctgcccctatttccttgtaaagagggagcacattgacttgggaatttcctccaggaaactcagggctgttttctcttcccttaggttggggcggacctttggacatataaaggaagcagttttagtatcagaaaagatttattagaaaattctcacgctgaactggtgtagcatgtggtgcagcattcagtgaaactggctggaggaaataggcttgtttccagagttgtccttatacaaaatgtataaaaagcagtttctggtg

SEQ ID NO: 404930 - DNA, 1414 bp, Homo sapiens
  misc_feature (1)..(1): n is a, c, g, or t
ntgctgttctgaggtttccgtagtggatcttggcttctctttcctctctcctccaggtggctgtcctgcctggtacttccagccaatctcgtgagccaggcgcccagataggcaaagtttcttgtaggcttcagacgcacgacttgagggcagcaggaaccaccatccgctttttcttgcccgcgtcatcctgcaaattccaggctaactcaggtgagatggagccgctatagtcctgaattcaaggatcccttgattgacaaggaatattatcgcaagccagtggaggagctaactgaggaggagaaatatgttcgggagctcaagaagactcagctcatcaaagctgctccagcagggaaaacaagttctgtgtttgaagacccagtcatcaggttagatggaaacaaacacttgttacatggactgggactatcccagggagggtttctggtgaggattctgtgatacagccttggagagctaaacgtgttgcttttctctttgaagtaaattcaccaacatgatgatgataggaggaaacaaagtactggccagatccctcatgattcagactctggaagctgtgaaaaggaagcagtttgagaagtaccatgccgcttctgcagaggaacaggcaaccatcgaacgcaacccctacaccatcttccatcaagcactgaaaaactgtgagcctatgattgggctggtacccatcctcaagggaggccgtttctaccaggtccctgtacccctacccgaccggcgtcgccgcttcctagccatgaagtggatgatcactgagtgccgggataaaaagcaccagcggacactgatgccggagaagctgtcacacaagctgctggaggctttccataaccagggccccgtgatcaagaggaagcatgacttgcacaagatggcagaggccaaccgtgccctggcccactaccgctggtggtagagtctccaggaggagcccagggccctctgccgcaagaaacagtgtgagctactgccacgctgaaaactacctgtgggttaaggatgtagttcctttgtaagggtgggcaggcctcgtaagaaagatgtagcagcatattcactatccgttaatccttctttctttgaggctggaacttgctctctctgcccctatttccttgtaaagagggagcacattgacttgggaatttcctccaggaaactcagggctgttttctcttcccttaggttggggcggacctttggacatataaaggaagcagttttagtatcagaaaagatttattagaaaattctcacgctgaactggtgtagcatgtggtgcagcattcagtgaaactggctggaggaaataggcttgtttccagagttgtccttatacaaaatgtataaaaagcagtttctggtg

SEQ ID NO: 404931 - DNA, 1200 bp, Homo sapiens
gattaacttccctgcatgtgtacgggctttaatgaagccctgtaagagtcagcaactgccattccttggtgtttcggaagtaaacacacaattaaaaaaaaaggaacaaataaaaaataaaacaactgccattccccacctcaccccccaccccctccatgccacaaatctcaatccactctttctgtcctagtctagcaaagggggaggcacttaaaaactttgttttggatgtgctgtgagaggagctgcattgccagcgcagaaccagaggatgggagtaaagggcaaggtactagcttggctgggtaaaccctttagggagcctggggcagcctcttccaccatattcttttgcagactctggaagctgtgaaaaggaagcagtttgagaagtaccatgccgcttctgcagaggaacaggcaaccatcgaacgcaacccctacaccatcttccatcaagcactgaaaaactgtgagcctatgattgggctggtacccatcctcaagggaggccgtttctaccaggtccctgtacccctacccgaccggcgtcgccgcttcctagccatgaagtggatgatcactgagtgccgggataaaaagcaccagcggacactgatgccggagaagctgtcacacaagctgctggaggctttccataaccagggccccgtgatcaagaggaagcatgacttgcacaagatggcagaggccaaccgtgccctggcccactaccgctggtggtagagtctccaggaggagcccagggccctctgccgcaagaaacagtgtgagctactgccacgctgaaaactacctgtgggttaaggatgtagttcctttgtaagggtgggcaggcctcgtaagaaagatgtagcagcatattcactatccgttaatccttctttctttgaggctggaacttgctctctctgcccctatttccttgtaaagagggagcacattgacttgggaatttcctccaggaaactcagggctgttttctcttcccttaggttggggcggacctttggacatataaaggaagcagttttagtatcagaaaagatttattagaaaattctcacgctgaactggtgtagcatgtggtgcagcattcagtgaaactggctggaggaaataggcttgtttccagagttgtccttatacaaaatgtataaaaagcagtttctggtg

SEQ ID NO: 404932 - DNA, 1143 bp, Homo sapiens
gattaacttccctgcatgtgtacgggctttaatgaagccctgtaagagtcagcaactgccattccttggtgtttcggaagtaaacacacaattaaaaaaaaaggaacaaataaaaaataaaacaactgccattccccacctcaccccccaccccctccatgccacaaatctcaatccactctttctgtcctagtctagcaaagggggaggcacttaaaaactttgttttggatgtgctgtgagaggagctgcattgccagcgcagaaccagaggatgggagtaaagggcaaggtactagcttggctgggtaaaccctttagggagcctggggcagcctcttccaccatattcttttgcagactctggaagctgtgaaaaggaagcagtttgagaagtaccatgccgcttctgcagaggaacaggcaaccatcgaacgcaacccctacaccatcttccatcaagcactgaaaaactgtgagcctatgattgggctggtacccatcctcaagggaggccgtttctaccaggtccctgtacccctacccgaccggcgtcgccgcttcctagccatgaagtggatgatcactgagtgccgggataaaaagcaccagcggacactgatgccggagaagcatgacttgcacaagatggcagaggccaaccgtgccctggcccactaccgctggtggtagagtctccaggaggagcccagggccctctgccgcaagaaacagtgtgagctactgccacgctgaaaactacctgtgggttaaggatgtagttcctttgtaagggtgggcaggcctcgtaagaaagatgtagcagcatattcactatccgttaatccttctttctttgaggctggaacttgctctctctgcccctatttccttgtaaagagggagcacattgacttgggaatttcctccaggaaactcagggctgttttctcttcccttaggttggggcggacctttggacatataaaggaagcagttttagtatcagaaaagatttattagaaaattctcacgctgaactggtgtagcatgtggtgcagcattcagtgaaactggctggaggaaataggcttgtttccagagttgtccttatacaaaatgtataaaaagcagtttctggtg

SEQ ID NO: 404933 - DNA, 1196 bp, Homo sapiens
  misc_feature (877)..(877): n is a, c, g, or t
  misc_feature (880)..(880): n is a, c, g, or t
  misc_feature (882)..(882): n is a, c, g, or t
  misc_feature (884)..(884): n is a, c, g, or t
ggacgcgtgggtcgacccacgcgtccgcctgcccctttccagttagcccttcgcgttcggcttagtctgcggtcctcttgcattgcgactccgagtttaacttccaacacacactttcaacctccaagagacgcccccacctgtgtcgccccaatagcgacttttctcaccgtggtcgccgcggaacttcaagggtccttcctacccgcgttgctgagagtctgggtttacgcgtcacctcgggcgggacccgatcctccgctcctgaggcccccacaatgaagcagtcggacgcgtctccccaagaaagggtggactccgacgaccagtggggagagtactcctgcgtcttcctccccgagcccatgggcacggccaacatccagctccacgggcctcccagagtgaaggctgtgaagtcgtcagaacacatcaacgagggggagacggccatgctggtctgcaagtcagagtccgtgccacctgtcactgactgggcctggtacaagatcactgactctgaggacaaggccctcatgaacggctccgagagcaggttcttcgtgagttcctcgcagggccggtcagagctacacattgagaacctgaacatggaggccgaccccggccagtaccggtgcaacggcaccagctccaagggctccgaccaggccatcatcacgctccgcgtgcgcagccacctggccgcctctggcccttcctgggcatcgtggctgaggtgctggtgctggtcaaccatcatcttcatctacgagaagcgccggaagcccgaggacgtcctggatgatgacgacggcgggtctgacccctgcaagagcagcgggcagcaccggaaggacaaggcaagaacgtccgncanangnaactctctggaggacagtggccgaggaaccacacgaacacagactgtgaccccgaccggagcaccatcacgcggcgagcagatcacagggtctcagcgtgaaggaaacgcgcaccgagatccacaagaagccactatataaaacaggggtaccacagaggaatcgggcagcaaatacatccacgagggtaccaacgagcgagcgacgtgaccaggggcaaccggcgagctaccgggggacacaccgcgaaaaccagattaacagacggccagcactaactcagcacgttgtgcgccgcgccgcgacgcatgt

SEQ ID NO: 404934 - DNA, 1353 bp, Homo sapiens
  misc_feature (1034)..(1034): n is a, c, g, or t
  misc_feature (1037)..(1037): n is a, c, g, or t
  misc_feature (1039)..(1039): n is a, c, g, or t
  misc_feature (1041)..(1041): n is a, c, g, or t
ggacgcgtgggtcgacccacgcgtccgcctgcccctttccagttagcccttcgcgttcggcttagtctgcggtcctcttgcattgcgactccgagtttaacttccaacacacactttcaacctccaagagacgcccccacctgtgtcgccccaatagcgacttttctcaccgtggtcgccgcggaacttcaagggtccttcctacccgcgttgctgagagtctgggtttacgcgtcacctcgggcgggacccgatcctccgctcctgaggcccccacaatgaagcagtcggacgcgtctccccaagaaagccggcacagtcttcactaccgtagaagaccttggctccaagatactcctcacctgctccttgaatgacagcgccacagaggtcacagggcaccgctggctgaaggggggcgtggtgctgaaggaggacgcgctgcccggccagaaaacggagttcaaggtggactccgacgaccagtggggagagtactcctgcgtcttcctccccgagcccatgggcacggccaacatccagctccacgggcctcccagagtgaaggctgtgaagtcgtcagaacacatcaacgagggggagacggccatgctggtctgcaagtcagagtccgtgccacctgtcactgactgggcctggtacaagatcactgactctgaggacaaggccctcatgaacggctccgagagcaggttcttcgtgagttcctcgcagggccggtcagagctacacattgagaacctgaacatggaggccgaccccggccagtaccggtgcaacggcaccagctccaagggctccgaccaggccatcatcacgctccgcgtgcgcagccacctggccgcctctggcccttcctgggcatcgtggctgaggtgctggtgctggtcaaccatcatcttcatctacgagaagcgccggaagcccgaggacgtcctggatgatgacgacggcgggtctgacccctgcaagagcagcgggcagcaccggaaggacaaggcaagaacgtccgncanangnaactctctggaggacagtggccgaggaaccacacgaacacagactgtgaccccgaccggagcaccatcacgcggcgagcagatcacagggtctcagcgtgaaggaaacgcgcaccgagatccacaagaagccactatataaaacaggggtaccacagaggaatcgggcagcaaatacatccacgagggtaccaacgagcgagcgacgtgaccaggggcaaccggcgagctaccgggggacacaccgcgaaaaccagattaacagacggccagcactaactcagcacgttgtgcgccgcgccgcgacgcatgt

SEQ ID NO: 404935 - DNA, 434 bp, Homo sapiens
cgatgattaattttgaaaagttactcaaacaattacaattcaacttggtcaacatcagttctcacaaatagaagctgactgtcatttattcactcagttcctgttggctgagtgttggctctagggctggcaccaggcactggaattaaacattctggactccagaggggcatgaaaactcttcctgaaggagatgcagaggaagattcgaactggaggaaaaccctaaaatgataaatggaaggccttaacaagtttcctcctccacgttggacaattatgtcaaaaacaggattgtctacatggatgatctcacttttcaggaaacttaaaatttacccattattgggaagcttaaatgaattgaagctatgcaagtcttttatattattaaatatttaaaagtaaacctgtactaatctaaaaaagcaact

SEQ ID NO: 404936 - DNA, 1991 bp, Homo sapiens
catggacatgaatgtgtggcttaaattacattgctgtgtgggcatgaatcagacgctctgcccatgaagagttctagcaccaagtcagtgcaagacccgaggtgtggctgagtgttggctctagggctggcaccaggcactggaattaaacattctggactccagaggggcatgaaaactcttcctgaaggagatgcagaggaagattcgaactggaggaaaaccctaaaataaacaataacaacaaaagttcaaaacctgaaaagtgaaccatgaagctcagtaaaaaggaccgaggagaagatgaagaaagtgattcagcgaaaaagaaattggactggtcctgctcgctcctcgtggcctccctcgcgggcgccttcggctcctccttcctctacggctacaacctgtcggtggtgaatgcccccaccccgtacatcaaggccttttacaatgagtcatgggaaagaaggcatggacgtccaatagacccagacactctgactctgctctggtctgtgactgtgtccatattcgccatcggtggacttgtggggacattaattgtgaagatgattggaaaggttcttgggaggaagcacactttgctggccaataatgggtttgcaatttctgctgcattgctgatggcctgctcgctccaggcaggagcctttgaaatgctcatcgtgggacgcttcatcatgggcatagatggaggcgtcgccctcagtgtgctccccatgtacctcagtgagatctcacccaaggagatccgtggctctctggggcaggtgactgccatctttatctgcattggcgtgttcactgggcagcttctgggcctgcccgagctgctgggaaaggagagtacctggccatacctgtttggagtgattgtggtccctgccgttgtccagctgctgagccttccctttctcccggacagcccacgctacctgctcttggagaagcacaacgaggcaagagctgtgaaagccttccaaacgttcttgggtaaagcagacgtttcccaagaggtagaggaggtcctggctgagagccgcgtgcagaggagcatccgcctggtgtccgtgctggagctgctgagagctccctacgtccgctggcaggtggtcaccgtgattgtcaccatggcctgctaccagctctgtggcctcaatgcaatttggttctataccaacagcatctttggaaaagctgggatccctctggcaaagatcccatacgtcaccttgagtacagggggcatcgagactttggctgccgtcttctctggtttggtcattgagcacctgggacggagacccctcctcattggtggctttgggctcatgggcctcttctttgggaccctcaccatcacgctgaccctgcaggaccacgccccctgggtcccctacctgagtatcgtgggcattctggccatcatcgcctctttctgcagtgggccaggtggcatcccgttcatcttgactggtgagttcttccagcaatctcagcggccggctgccttcatcattgcaggcaccgtcaactggctctccaactttgctgttgggctcctcttcccattcattcagaaaagtctggacacctactgtttcctagtctttgctacaatttgtatcacaggtgctatctacctgtattttgtgctgcctgagaccaaaaacagaacctatgcagaaatcagccaggcattttccaaaaggaacaaagcatacccaccagaagagaaaatcgactcagctgtcactgatggtaagataaatggaaggccttaacaagtttcctcctccacgttggacaattatgtcaaaaacaggattgtctacatggatgatctcacttttcaggaaacttaaaatttacccattattgggaagcttaaatgaattgaagctatgcaagtcttttatattattaaatatttaaaagtaaacctgtactaatctaaaaaagcaact

SEQ ID NO: 404937 - DNA, 1863 bp, Homo sapiens
catggacatgaatgtgtggcttaaattacattgctgtgtgggcatgaatcagacgctctgcccatgaagagttctagcaccaagtcagtgcaagacccgaggtgaaacaataacaacaaaagttcaaaacctgaaaagtgaaccatgaagctcagtaaaaaggaccgaggagaagatgaagaaagtgattcagcgaaaaagaaattggactggtcctgctcgctcctcgtggcctccctcgcgggcgccttcggctcctccttcctctacggctacaacctgtcggtggtgaatgcccccaccccgtacatcaaggccttttacaatgagtcatgggaaagaaggcatggacgtccaatagacccagacactctgactctgctctggtctgtgactgtgtccatattcgccatcggtggacttgtggggacattaattgtgaagatgattggaaaggttcttgggaggaagcacactttgctggccaataatgggtttgcaatttctgctgcattgctgatggcctgctcgctccaggcaggagcctttgaaatgctcatcgtgggacgcttcatcatgggcatagatggaggcgtcgccctcagtgtgctccccatgtacctcagtgagatctcacccaaggagatccgtggctctctggggcaggtgactgccatctttatctgcattggcgtgttcactgggcagcttctgggcctgcccgagctgctgggaaaggagagtacctggccatacctgtttggagtgattgtggtccctgccgttgtccagctgctgagccttccctttctcccggacagcccacgctacctgctcttggagaagcacaacgaggcaagagctgtgaaagccttccaaacgttcttgggtaaagcagacgtttcccaagaggtagaggaggtcctggctgagagccgcgtgcagaggagcatccgcctggtgtccgtgctggagctgctgagagctccctacgtccgctggcaggtggtcaccgtgattgtcaccatggcctgctaccagctctgtggcctcaatgcaatttggttctataccaacagcatctttggaaaagctgggatccctctggcaaagatcccatacgtcaccttgagtacagggggcatcgagactttggctgccgtcttctctggtttggtcattgagcacctgggacggagacccctcctcattggtggctttgggctcatgggcctcttctttgggaccctcaccatcacgctgaccctgcaggaccacgccccctgggtcccctacctgagtatcgtgggcattctggccatcatcgcctctttctgcagtgggccaggtggcatcccgttcatcttgactggtgagttcttccagcaatctcagcggccggctgccttcatcattgcaggcaccgtcaactggctctccaactttgctgttgggctcctcttcccattcattcagaaaagtctggacacctactgtttcctagtctttgctacaatttgtatcacaggtgctatctacctgtattttgtgctgcctgagaccaaaaacagaacctatgcagaaatcagccaggcattttccaaaaggaacaaagcatacccaccagaagagaaaatcgactcagctgtcactgatggtaagataaatggaaggccttaacaagtttcctcctccacgttggacaattatgtcaaaaacaggattgtctacatggatgatctcacttttcaggaaacttaaaatttacccattattgggaagcttaaatgaattgaagctatgcaagtcttttatattattaaatatttaaaagtaaacctgtactaatctaaaaaagcaact

SEQ ID NO: 404938 - DNA, 1920 bp, Homo sapiens
gtttcaggaatcctcacgcaacccggaaggaacgcaagggcgtggccgctaaacctgagggcgcccggcctgcgcacgcggacctggactggaaccctacttgcaggtccccaacttgcgtctcttctctctgtctctaccccagccaaggacaaagacttctcctccggaaggcctcccccagctgagggaacgttccaggtcttccctcggccctggctgcgcgcccggtgccggctctgacgtggtttcctctcccctcaggactggtcctgctcgctcctcgtggcctccctcgcgggcgccttcggctcctccttcctctacggctacaacctgtcggtggtgaatgcccccaccccgtacatcaaggccttttacaatgagtcatgggaaagaaggcatggacgtccaatagacccagacactctgactctgctctggtctgtgactgtgtccatattcgccatcggtggacttgtggggacattaattgtgaagatgattggaaaggttcttgggaggaagcacactttgctggccaataatgggtttgcaatttctgctgcattgctgatggcctgctcgctccaggcaggagcctttgaaatgctcatcgtgggacgcttcatcatgggcatagatggaggcgtcgccctcagtgtgctccccatgtacctcagtgagatctcacccaaggagatccgtggctctctggggcaggtgactgccatctttatctgcattggcgtgttcactgggcagcttctgggcctgcccgagctgctgggaaaggagagtacctggccatacctgtttggagtgattgtggtccctgccgttgtccagctgctgagccttccctttctcccggacagcccacgctacctgctcttggagaagcacaacgaggcaagagctgtgaaagccttccaaacgttcttgggtaaagcagacgtttcccaagaggtagaggaggtcctggctgagagccgcgtgcagaggagcatccgcctggtgtccgtgctggagctgctgagagctccctacgtccgctggcaggtggtcaccgtgattgtcaccatggcctgctaccagctctgtggcctcaatgcaatttggttctataccaacagcatctttggaaaagctgggatccctctggcaaagatcccatacgtcaccttgagtacagggggcatcgagactttggctgccgtcttctctggtttggtcattgagcacctgggacggagacccctcctcattggtggctttgggctcatgggcctcttctttgggaccctcaccatcacgctgaccctgcaggaccacgccccctgggtcccctacctgagtatcgtgggcattctggccatcatcgcctctttctgcagtgggccaggtggcatcccgttcatcttgactggtgagttcttccagcaatctcagcggccggctgccttcatcattgcaggcaccgtcaactggctctccaactttgctgttgggctcctcttcccattcattcagaaaagtctggacacctactgtttcctagtctttgctacaatttgtatcacaggtgctatctacctgtattttgtgctgcctgagaccaaaaacagaacctatgcagaaatcagccaggcattttccaaaaggaacaaagcatacccaccagaagagaaaatcgactcagctgtcactgatggtaagataaatggaaggccttaacaagtttcctcctccacgttggacaattatgtcaaaaacaggattgtctacatggatgatctcacttttcaggaaacttaaaatttacccattattgggaagcttaaatgaattgaagctatgcaagtcttttatattattaaatatttaaaagtaaacctgtactaatctaaaaaagcaact

SEQ ID NO: 404939 - DNA, 3135 bp, Homo sapiens
ggaaatgccttggcagagtctggggtccctggactgagccatcagctgggtcactgagacccatggcaaggaaacaaaataggaattccaaggaactgggcctagttcccctcacagatgacaccagccacgccaggcctccagggccagggagggcactgctggagtgtgaccacctgaggagtggggtgccaggtggaaggagaagaaaggactggtcctgctcgctcctcgtggcctccctcgcgggcgccttcggctcctccttcctctacggctacaacctgtcggtggtgaatgcccccaccccgtacatcaaggccttttacaatgagtcatgggaaagaaggcatggacgtccaatagacccagacactctgactctgctctggtctgtgactgtgtccatattcgccatcggtggacttgtggggacattaattgtgaagatgattggaaaggttcttgggaggaagcacactttgctggccaataatgggtttgcaatttctgctgcattgctgatggcctgctcgctccaggcaggagcctttgaaatgctcatcgtgggacgcttcatcatgggcatagatggaggcgtcgccctcagtgtgctccccatgtacctcagtgagatctcacccaaggagatccgtggctctctggggcaggtgactgccatctttatctgcattggcgtgttcactgggcagcttctgggcctgcccgagctgctgggaaaggagagtacctggccatacctgtttggagtgattgtggtccctgccgttgtccagctgctgagccttccctttctcccggacagcccacgctacctgctcttggagaagcacaacgaggcaagagctgtgaaagccttccaaacgttcttgggtaaagcagacgtttcccaagaggtagaggaggtcctggctgagagccgcgtgcagaggagcatccgcctggtgtccgtgctggagctgctgagagctccctacgtccgctggcaggtggtcaccgtgattgtcaccatggcctgctaccagctctgtggcctcaatgcaatttggttctataccaacagcatctttggaaaagctgggatccctctggcaaagatcccatacgtcaccttgagtacagggggcatcgagactttggctgccgtcttctctggtttggtcattgagcacctgggacggagacccctcctcattggtggctttgggctcatgggcctcttctttgggaccctcaccatcacgctgaccctgcaggaccacgccccctgggtcccctacctgagtatcgtgggcattctggccatcatcgcctctttctgcagtgggccaggtggcatcccgttcatcttgactggtgagttcttccagcaatctcagcggccggctgccttcatcattgcaggcaccgtcaactggctctccaactttgctgttgggctcctcttcccattcattcagaaaagtctggacacctactgtttcctagtctttgctacaatttgtatcacaggtgctatctacctgtattttgtgctgcctgagaccaaaaacagaacctatgcagaaatcagccaggcattttccaaaaggaacaaagcatacccaccagaagagaaaatcgactcagctgtcactgatggtaacagctcaaaggaactaagacaaagatcatggagaccatcgggtgagtctcaagacttcccccagctctgcttggctggtctcctgctggtattttctgtctgtagagaggaacaagaacttccattttatcttgcttacctgcacttatgaaaagtcaaactgagtcatgctgagagccagggaacataggagtcagttcttctgcagcagcactcagccagttgaaggcaatgtggagtgatggaaggagagcagtgatgcagtgatgctggcaccaactcctttactatggcatccattgtaccagctgccatacaccaggcaacttctacactttatctctaatcatcctagaataagtattagtttccccatcttctagaaaggaaaactcagacccagagacactaagcaagtagctcaacatcacacacgttatctgtgattaagcctgagttagaaatggagccttgggatttccacatttatgctcttttcatgaaggctacctgactttgatactcaagtttgtcctctacaacgggactgctggactagaaatctctaagtcccctttacctctggattctgtgtctctaaggatgagaataacaaaactcctttgcctctagcactttccaactgaaggccctatcacgctcatgacatctaatcactgcagccagaagcattaaataaaatggatggattgacattgggggtgggtgaggcggggaagttgggggtgtggagaaacaactctctttacataatgattgctactatgatttggttataagtaacccatgaagacaatcaggcttctctggcagtccctaattgtagtgaatgttggaatacagtgaccacacaaatgctccagactgattgcgaaggtgccacttctaaatcagctgggcaagtgcattgcataagctgagtatttagcttaatgattggagccagttgatgaaacacaagaatctggaagcctcctgctacttctcagaagataagacaatggcattccatcaccagtgtttactgtggtacccaaagggagctccagttactttcctctgtgcctgtaacccttggatcacctggttgcaccagacccatcctgactaaaatccctccaaaggaccaaagaggggatagggacaaaaataaaaaataaatctcatctgctctctttcctaaggacccagcagcctctatccatccatcgttcattcactcattccacacactttcatctagcccctgctgaatgccaagcactgggctggaactctggggactgtggaggtggaataggagaatatgggctttctgtgagcagtgtttgcctaaaatatatacatcaaggttgtaggatcatgtgcaccactgcactctagcctgggcgcagagtgagaccctgtttcaaaaaaataaaaaaattgtaggatcatggaaaaaaagt

SEQ ID NO: 404940 - DNA, 2873 bp, Homo sapiens
ggaaatgccttggcagagtctggggtccctggactgagccatcagctgggtcactgagacccatggcaaggaaacaaaataggaattccaaggaactgggcctagttcccctcacagatgacaccagccacgccaggcctccagggccagggagggcactgctggagtgtgaccacctgaggagtggggtgccaggtggaaggagaagaaaggactggtcctgctcgctcctcgtggcctccctcgcgggcgccttcggctcctccttcctctacggctacaacctgtcggtggtgaatgcccccaccccgtacatcaaggccttttacaatgagtcatgggaaagaaggcatggacgtccaatagacccagacactctgactctgctctggtctgtgactgtgtccatattcgccatcggtggacttgtggggacattaattgtgaagatgattggaaaggttcttgggaggaagcacactttgctggccaataatgggtttgcaatttctgctgcattgctgatggcctgctcgctccaggcaggagcctttgaaatgctcatcgtgggacgcttcatcatgggcatagatggaggcgtcgccctcagtgtgctccccatgtacctcagtgagatctcacccaaggagatccgtggctctctggggcaggtgactgccatctttatctgcattggcgtgttcactgggcagcttctgggcctgcccgagctgctgggaaaggagagtacctggccatacctgtttggagtgattgtggtccctgccgttgtccagctgctgagccttccctttctcccggacagcccacgctacctgctcttggagaagcacaacgaggcaagagctgtgaaagccttccaaacgttcttgggtaaagcagacgtttcccaagaggtagaggaggtcctggctgagagccgcgtgcagaggagcatccgcctggtgtccgtgctggagctgctgagagctccctacgtccgctggcaggtggtcaccgtgattgtcaccatggcctgctaccagctctgtggcctcaatgcaatttggttctataccaacagcatctttggaaaagctgggatccctctggcaaagatcccatacgtcaccttgagtacagggggcatcgagactttggctgccgtcttctctggtttggtcattgagcacctgggacggagacccctcctcattggtggctttgggctcatgggcctcttctttgggaccctcaccatcacgctgaccctgcaggaccacgccccctgggtcccctacctgagtatcgtgggcattctggccatcatcgcctctttctgcagtgggccaggtggcatcccgttcatcttgactggtgagttcttccagcaatctcagcggccggctgccttcatcattgcaggcaccgtcaactggctctccaactttgctgttgggctcctcttcccattcattcagaaaagtctggacacctactgtttcctagtctttgctacaatttgtatcacaggtgctatctacctgtattttgtgctgcctgagaccaaaaacagaacctatgcagaaatcagccaggcattttccaaaaggaacaaagcatacccaccagaagagaaaatcgactcagctgtcactgatggtaacagctcaaaggaactaagacaaagatcatggagaccatcgggtgagtctcaagacttcccccagctctgcttggctggtctcctgctggtattttctgtctgtagagaggaacaagaacttccattttatcttgcttacctgcacttatgaaaagtcaaactgagtcatgctgagagccagggaacataggagtcagttcttctgcagcagcactcagccagttgaaggcaatgtggagtgatggaaggagagcagtgatgcagtgatgctggcaccaactcctttactatggcatccattgtaccagctgccatacaccaggcaacttctacactttatctctaatcatcctagaataagtattagtttccccatcttctagaaaggaaaactcagacccagagacactaagcaagtagctcaacatcacacacgttatctgtgattaagcctgagttagaaatggagccttgggatttccacatttatgctcttttcatgaaggctacctgactttgatactcaagtttgtcctctacaacgggactgctggactagaaatctctaagtcccctttacctctggattctgtgtctctaaggatgagaataacaaaactcctttgcctctagcactttccaactgaaggccctatcacgctcatgacatctaatcactgcagccagaagcattaaataaaatggatggattgacattgggggtgggtgaggcggggaagttgggggtgtggagaaacaactctctttacataatgattgctactatgatttggttataagtaacccatgaagacaatcaggcttctctggcagtccctaattgtagtgaatgttggaatacagtgaccacacaaatgctccagactgattgcgaaggtgccacttctaaatcagctgggcaagtgcattgcataagctgagtatttagcttaatgattggagccagttgatgaaacacaagaatctggaagcctcctgctacttctcagaagataagacaatggcattccatcaccagtgtttactgtggtacccaaagggagctccagttactttcctctgtgcctgtaacccttggatcacctggttgcaccagacccatcctgactaaaatccctccaaaggaccaaagaggggatagggacaaaaataaaaaataaatctcatctgctctctttcctaagga

SEQ ID NO: 404941 - DNA, 1893 bp, Homo sapiens
ggaaatgccttggcagagtctggggtccctggactgagccatcagctgggtcactgagacccatggcaaggaaacaaaataggaattccaaggaactgggcctagttcccctcacagatgacaccagccacgccaggcctccagggccagggagggcactgctggagtgtgaccacctgaggagtggggtgccaggtggaaggagaagaaaggactggtcctgctcgctcctcgtggcctccctcgcgggcgccttcggctcctccttcctctacggctacaacctgtcggtggtgaatgcccccaccccgtacatcaaggccttttacaatgagtcatgggaaagaaggcatggacgtccaatagacccagacactctgactctgctctggtctgtgactgtgtccatattcgccatcggtggacttgtggggacattaattgtgaagatgattggaaaggttcttgggaggaagcacactttgctggccaataatgggtttgcaatttctgctgcattgctgatggcctgctcgctccaggcaggagcctttgaaatgctcatcgtgggacgcttcatcatgggcatagatggaggcgtcgccctcagtgtgctccccatgtacctcagtgagatctcacccaaggagatccgtggctctctggggcaggtgactgccatctttatctgcattggcgtgttcactgggcagcttctgggcctgcccgagctgctgggaaaggagagtacctggccatacctgtttggagtgattgtggtccctgccgttgtccagctgctgagccttccctttctcccggacagcccacgctacctgctcttggagaagcacaacgaggcaagagctgtgaaagccttccaaacgttcttgggtaaagcagacgtttcccaagaggtagaggaggtcctggctgagagccgcgtgcagaggagcatccgcctggtgtccgtgctggagctgctgagagctccctacgtccgctggcaggtggtcaccgtgattgtcaccatggcctgctaccagctctgtggcctcaatgcaatttggttctataccaacagcatctttggaaaagctgggatccctctggcaaagatcccatacgtcaccttgagtacagggggcatcgagactttggctgccgtcttctctggtttggtcattgagcacctgggacggagacccctcctcattggtggctttgggctcatgggcctcttctttgggaccctcaccatcacgctgaccctgcaggaccacgccccctgggtcccctacctgagtatcgtgggcattctggccatcatcgcctctttctgcagtgggccaggtggcatcccgttcatcttgactggtgagttcttccagcaatctcagcggccggctgccttcatcattgcaggcaccgtcaactggctctccaactttgctgttgggctcctcttcccattcattcagaaaagtctggacacctactgtttcctagtctttgctacaatttgtatcacaggtgctatctacctgtattttgtgctgcctgagaccaaaaacagaacctatgcagaaatcagccaggcattttccaaaaggaacaaagcatacccaccagaagagaaaatcgactcagctgtcactgatggtaatgacctcatgtcaagaaggcagacctgcagaaatgaatgtgcctggatacctgagtcaccaggtgaaggaaactcccattgacctgcatcacactccagatatgaaacccttctttttctgcactgtcactgaggttagggattattactcactgcagcttagcctagcattaagttgcttgactaatataagtttcaataaatgttgctccatttcacatggcttc

SEQ ID NO: 404942 - DNA, 812 bp, Homo sapiens
catggacatgaatgtgtggcttaaattacattgctgtgtgggcatgaatcagacgctctgcccatgaagagttctagcaccaagtcagtgcaagacccgaggtgtggctgagtgttggctctagggctggcaccaggcactggaattaaacattctggactccagaggggcatgaaaactcttcctgaaggagatgcagaggaagattcgaactggaggaaaaccctaaaatgacgtggacagctaactagctagatggatggatggatggatggatgggatttattatggaattggctcacatgattatggaggctgagaagtcccttgacaggccatctgcaagctggagaccctgggattctggcggcacggctcagtccaaatccagaagcttcagcaccaggaaagccaatggtaattctcagtctgacgccaaaggcctgagaaccagagcaatggatgggacgctggtgcaagtcctaaagtccaaaggtcagggagctcggagttctgaccttcaagagcaggagaagaagagtatcccagctccaggagagagacagacagagaaacaaaacaaaacaaaacaaacaaacaaaaaaagtgcctttttttctgcccattttgtttgatctagaccaccagtcgatggatggtgcctgccccccactggagggcagatctgctcccttcagtccacagactcccacaccagtctcctccagaaacgccttcacagacacaccccaaagtgaggcttgaccagctttctagggattctttaattcaggcacctgaaattaagcatc

SEQ ID NO: 404943 - DNA, 388 bp, Homo sapiens
caatagtgatgagggatctccagctatctgtgcactctctatgcttcccagactctttggcagttgtgttgggtactggctgagttctggaaaacaggaatgtgagcagagtgctgcagatctccttgtcaggagcacctaagaactggcatgactctacaccctctctccttctgcagtgacctcatgtcaagaaggcagacctgcagaaatgaatgtgcctggatacctgagtcaccaggtgaaggaaactcccattgacctgcatcacactccagatatgaaacccttctttttctgcactgtcactgaggttagggattattactcactgcagcttagcctagcattaagttgcttgactaatataagtttcaataaatgttgc

SEQ ID NO: 404944 - DNA, 1868 bp, Homo sapiens
ggaaatgccttggcagagtctggggtccctggactgagccatcagctgggtcactgagacccatggcaaggaaacaaaataggaattccaaggaactgggcctagttcccctcacagatgacaccagccacgccaggcctccagggccagggagggcactgctggagtgtgaccacctgaggagtggggtgccaggtggaaggagaagaaaggactggtcctgctcgctcctcgtggcctccctcgcgggcgccttcggctcctccttcctctacggctacaacctgtcggtggtgaatgcccccaccccgtacatcaaggccttttacaatgagtcatgggaaagaaggcatggacgtccaatagacccagacactctgactctgctctggtctgtgactgtgtccatattcgccatcggtggacttgtggggacattaattgtgaagatgattggaaaggttcttgggaggaagcacactttgctggccaataatgggtttgcaatttctgctgcattgctgatggcctgctcgctccaggcaggagcctttgaaatgctcatcgtgggacgcttcatcatgggcatagatggaggcgtcgccctcagtgtgctccccatgtacctcagtgagatctcacccaaggagatccgtggctctctggggcaggtgactgccatctttatctgcattggcgtgttcactgggcagcttctgggcctgcccgagctgctgggaaaggagagtacctggccatacctgtttggagtgattgtggtccctgccgttgtccagctgctgagccttccctttctcccggacagcccacgctacctgctcttggagaagcacaacgaggcaagagctgtgaaagccttccaaacgttcttgggtaaagcagacgtttcccaagaggtagaggaggtcctggctgagagccgcgtgcagaggagcatccgcctggtgtccgtgctggagctgctgagagctccctacgtccgctggcaggtggtcaccgtgattgtcaccatggcctgctaccagctctgtggcctcaatgcaatttggttctataccaacagcatctttggaaaagctgggatccctctggcaaagatcccatacgtcaccttgagtacagggggcatcgagactttggctgccgtcttctctggtttggtcattgagcacctgggacggagacccctcctcattggtggctttgggctcatgggcctcttctttgggaccctcaccatcacgctgaccctgcaggaccacgccccctgggtcccctacctgagtatcgtgggcattctggccatcatcgcctctttctgcagtgggccaggtggcatcccgttcatcttgactggtgagttcttccagcaatctcagcggccggctgccttcatcattgcaggcaccgtcaactggctctccaactttgctgttgggctcctcttcccattcattcagaaaagtctggacacctactgtttcctagtctttgctacaatttgtatcacaggtgctatctacctgtattttgtgctgcctgagaccaaaaacagaacctatgcagaaatcagccaggcattttccaaaaggaacaaagcatacccaccagaagagaaaatcgactcagctgtcactgatggtaagataaatggaaggccttaacaagtttcctcctccacgttggacaattatgtcaaaaacaggattgtctacatggatgatctcacttttcaggaaacttaaaatttacccattattgggaagcttaaatgaattgaagctatgcaagtcttttatattattaaatatttaaaagtaaacctgtactaatctaaaaaagcaact

SEQ ID NO: 404945 - DNA, 363 bp, Homo sapiens
ccgccaccaaaaaagaacacccattgtaaacggtcatgtggtatttcctcaacctggaatgaccttcccctatcttcttctcctggagaacaccaagtcatgatgtcagacaagagcttggattttggagacatggtgacctcatgtcaagaaggcagacctgcagaaatgaatgtgcctggatacctgagtcaccaggtgaaggaaactcccattgacctgcatcacactccagatatgaaacccttctttttctgcactgtcactgaggttagggattattactcactgcagcttagcctagcattaagttgcttgactaatataagtttcaataaatgttgctccatttcacatggcttc

SEQ ID NO: 404946 - DNA, 1816 bp, Homo sapiens
ggaaatgccttggcagagtctggggtccctggactgagccatcagctgggtcactgagacccatggcaaggaaacaaaataggaattccaaggaactgggcctagttcccctcacagatgacaccagccacgccaggcctccagggccagggagggcactgctggagtgtgaccacctgaggagtggggtgccaggtggaaggagaagaaaggactggtcctgctcgctcctcgtggcctccctcgcgggcgccttcggctcctccttcctctacggctacaacctgtcggtggtgaatgcccccaccccgtacatcaaggccttttacaatgagtcatgggaaagaaggcatggacgtccaatagacccagacactctgactctgctctggtctgtgactgtgtccatattcgccatcggtggacttgtggggacattaattgtgaagatgattggaaaggttcttgggaggaagcacactttgctggccaataatgggtttgcaatttctgctgcattgctgatggcctgctcgctccaggcaggagcctttgaaatgctcatcgtgggacgcttcatcatgggcatagatggaggcgtcgccctcagtgtgctccccatgtacctcagtgagatctcacccaaggagatccgtggctctctggggcaggtgactgccatctttatctgcattggcgtgttcactgggcagcttctgggcctgcccgagctgctgggaaaggagagtacctggccatacctgtttggagtgattgtggtccctgccgttgtccagctgctgagccttccctttctcccggacagcccacgctacctgctcttggagaagcacaacgaggcaagagctgtgaaagccttccaaacgttcttgggtaaagcagacgtttcccaagaggtagaggaggtcctggctgagagccgcgtgcagaggagcatccgcctggtgtccgtgctggagctgctgagagctccctacgtccgctggcaggtggtcaccgtgattgtcaccatggcctgctaccagctctgtggcctcaatgcaatttggttctataccaacagcatctttggaaaagctgggatccctctggcaaagatcccatacgtcaccttgagtacagggggcatcgagactttggctgccgtcttctctggtttggtcattgagcacctgggacggagacccctcctcattggtggctttgggctcatgggcctcttctttgggaccctcaccatcacgctgaccctgcaggaccacgccccctgggtcccctacctgagtatcgtgggcattctggccatcatcgcctctttctgcagtgggccaggtggcatcccgttcatcttgactggtgagttcttccagcaatctcagcggccggctgccttcatcattgcaggcaccgtcaactggctctccaactttgctgttgggctcctcttcccattcattcaggtgctatctacctgtattttgtgctgcctgagaccaaaaacagaacctatgcagaaatcagccaggcattttccaaaaggaacaaagcatacccaccagaagagaaaatcgactcagctgtcactgatggtaagataaatggaaggccttaacaagtttcctcctccacgttggacaattatgtcaaaaacaggattgtctacatggatgatctcacttttcaggaaacttaaaatttacccattattgggaagcttaaatgaattgaagctatgcaagtcttttatattattaaatatttaaaagtaaacctgtactaatctaaaaaagcaact

SEQ ID NO: 404947 - DNA, 828 bp, Homo sapiens
gtttcaggaatcctcacgcaacccggaaggaacgcaagggcgtggccgctaaacctgagggcgcccggcctgcgcacgcggacctggactggaaccctacttgcaggtccccaacttgcgtctcttctctctgtctctaccccagccaaggacaaagacttctcctccggaaggcctcccccagctgagggaacgttccaggtcttccctcggccctggctgcgcgcccggtgccggctctgacgtggtttcctctcccctcaggactggtcctgctcgctcctcgtggcctccctcgcgggcgccttcggctcctccttcctctacggctacaacctgtcggtggtgaatgcccccaccccgtacatcaaggccttttacaatgagtcatgggaaagaaggcatggacgtccaatagacccagacactctgactctgctctggtctgtgactgtgtccatattcgccatcggtggacttgtggggacattaattgtgaagatgattggaaaggttcttgggagcatcctgggagccagtgagcagtgtgtggaaagagtagagcttctccaagtgatggaggagtcgtcacatcaatctgatggggccagaacattcgtgtcttaacttgaatcatgtgtcttccacttactagctgtgtgcccttggccaaatcatttaatttatttgagcctcaattttcttatctgtaaaatagggatgatagtttctacctgcagggaatgttacaagagttagaccaaatgaatggaaggagaatggccatgagttgtagctgaataaataaaaattcttgtcattgaccac

SEQ ID NO: 404948 - DNA, 371 bp, Homo sapiens
attctgagatgctactactagacttgaggaccactgtgttgaatgatggaaccagaattcaagaagaccttaacaggcttgagcaatgtgccaaaaaagacaagatacatttagaatctttctaagttcgatccccatttttcaccctgctccatggctggaggctgatctttatggatttcatcaatggtgtccctcaccctctggtatccagtaggccaaggaagagtcccctcaggagagtggaggaagagaaaagagagcaatctgggtaatgatgattgaatgagttatcacctataaagagcatccctagaacaaaataagtatgttttaaataaatacaaataaaaattccaatcctcactgta

SEQ ID NO: 404949 - DNA, 377 bp, Homo sapiens
cttgtttccctgtgtgtgtagtgatgtatggctgcagcttgtcaaaagattctgggtctgctgtgatactgggtgcgtctaggctaggagtatagctagagaggacattccattgtagtggaagattggaggtgggcaggtcttttctactcctgagaagtctaggaaagaattactgaaaacaaccatctgtaaggaaaatatttttttatccagcctaacttttcattatcattataagtctaacctatttccttttgcttcatctgtcctctgatagtcaggagactgtatgccccaaatcctgctccatgttttgtaaaaaacagttttttctatgcttaaccagcttctctaaaaataaatctttagatata

SEQ ID NO: 404950 - DNA, 370 bp, Homo sapiens
caccgacgagagtgctggggaataaaaaggggatcttcactcggcagagacaaccaaaaagtgcagcgttccttttgcgagagagatactggaagattgccaatgaaaccaggtatccccactcagtagccaagtcacaatgtttggaaaacagcctgtttacttgagcaagactgataccacctgcgtgtcccttcctccccgagtcagggcgacttccacagcagcagaacaagtgcctcctggactgttcacggcagaccagaacgtttctggcctgggttttgtggtcatctattctagcagggaacactaaaggtggaaataaaagattttctattatggaaataaagagttggcatgaaagtgg

SEQ ID NO: 404951 - DNA, 1629 bp, Homo sapiens
tgcaagcagcttttagccctggcagcacagaagcagaagaattgaggaattctctgccactcctgtagtatcctttaacaggttaagtggttgtcaagcttcttttttaaatttgtaaacctatttgaatcaatttgtgactcctgcattccggcccggcagaaagagctcgaagagacgcagagcgcggcgcgctcccccacggccctccaggccggcgggtgagatggggagatgagctagggggccccggactggctgcgccctctgccctgcagacacggggggccccgctgtggctgcccactggccgggcgcaggcctcgaagccgcggcgaacctctcttccccaccccacctcggtgactgttggcggcggcctctccctgcccagaccccgccgccggatcctgcccggcctcgacgaaaccccgccgagccgccgagacgcagtgtctccgggtggcggcgggagaggcgggccgggaagcatggcggccgccccaacaccgcgcggcggagaccgttagggtgtgcagggcccgggaaggcggtctcgcgacgcaggcaagctcggccgcctctttaggccacggagccgcgcgagtccgggcccgggtgaccgctctgttcccactggacgagacctgccgagtcctcaggacaacggacaaaggccttaacgggcttgggaggtgagcgaagtcccgaacgatgacgggtggaacagttagcggccttcgggcggttggtctcgttctaccagagcttgctgtcggaagagagaaatggtggaatgacaagccacgtctggcctcttggaaatgcccaccaccctttgggaagatttactggccgtttatggaaggcctgtgtatttaatatgaaacagctgctctcaacactacccaaaccttttaatagaaaacatttgccacatctagcccttctatgagctagatggaaagaggttgctgatgtatgataaagttagaaaatcacacatcttgtaaattctcatttgcttaaaagaaatcatagaaaataaatgtcttctggagacgacttttggaaatggagttgttaacacggcctctggaagcgagacgtccacgtttgttaagtggtttagaggacatggagctggaagacctgagaaggaagagaagaagcttctgtgccagactggtcatatttagaagacattttcatattctctccattgttttgtgtgcatttcattcctcactactgtgtatatggttgacaatgctaagcttttttgaaatgtctattctttttagatattctgaagtgcctgatatatgtagaaaaaaataaccttttgtaaatatctttttgttacaattcatatgaaatgtttggtgggggaatggcccaatcacctgttgagtaatactcattgtgtttgtgcactggttcaggggaggagggggaagtgcagagatctctatgccactgtgcttacagcgaggcaagattaatcattatctctgcgcattttgttttacttgtctgtgtatatagtgtacataaaggacagacaagtcctgatttacaacatctagtctttctagatattaaagaggttgccagtacatgataaaa

SEQ ID NO: 404952 - DNA, 365 bp, Homo sapiens
ccaatcatgagttctttaacattattagtcatcaggaaaatgctaattaaaaaccacaatgagatgccactagaataaaattaaaaagatatctaactccaaatgttgaactctcatacttccttagtgaaagtgttataacacttctctattaatgtccattaatagaagaatgaatagatataccgtggtgtatctgtaaaatgaaataccacttagcaacagaaacaaattactgatgttccaaaacaaggatgaatatccaaaacattttgctgacacagttaagcacatattgcacaattccttttttatgaagttcaagaacagacaaaattaatctacggtttaagaaatcagaacag

SEQ ID NO: 404953 - DNA, 309 bp, Homo sapiens
cctatcctcgttcatcaagagattgcattgggatttggaatccgggaacttaagagtatttgccttatcttatccttcgtcatgccctacaaaatgtgtttaatccaccatgagactactgccagatctgaccaggcctcaaaagatcacttcttaggaatctctgaagttttggagagatattagtcctgggtcctgcaatgtgagcagattcaactgagcaaatgtatatagcaaaaagaatttcaggtctaccaaaaggtaagttctgacatggcttcaaatatatgcctcacttatgtaaccaat

SEQ ID NO: 404954 - DNA, 485 bp, Homo sapiens
tgtactaccccaagcccatcaataccacttttcaaccttaacttgctggtgtagtttctactggtttccaaacatgctaataagaacagctaaaagttactgagcacttattacttgccaggcattgctttaagcgtgttacatgtttaattcatttaatcctcttccatcccctttttacaggggaagaaacttaagcataagtgaaaataacttgccttacatcacgaagtatgaaggagcagggatgcgaatactaattgtaaagtccctgctcctgtgtacaacaaggaagacaaatcataatctcaaatgcaagcttcaaatcccaaaattcagatttgggaaaggggattaggatgccaaataggaatactgacctgtaaaaagaaaaagtaactttaggcattctccacaaaacagtgtgagggaaaatggtaatctttttattctttgggcgtacggggatccccgtacgcccaaat

SEQ ID NO: 404955 - DNA, 395 bp, Homo sapiens
tctgagcagacatgctctggaaaacacagacattctcagaaaactgcagtctgctgaaaatgccaggagagttcaggagactggactcttcattaggccttggcatgtttcattgtttttgcatagggaatggtgtcaacacttcttatctgaacatctgtatgtccaactctttttttctaatcctgtttcaaatggacaagatcttaggacacaagagaagatgtgtgcttgggacaaagcatatgaccattgctggacttctgaaatctaaatcagatcatcactgcagctaatagatgctggccttttttgcagtgagttacctctaatatacacttactgaaagcacacatcttcacagctgaaaataaaaataaaatatattccattac

SEQ ID NO: 404956 - DNA, 344 bp, Homo sapiens
tgacccacagagcacggaagcgaggctcagaaacagctggattgactacagctcggcatcggcctcatttgaacatggtttgaacagttggctgcctgagatcagccaaaacagtgcttggtataaaagtaggtcacgggctgtttacacctccagttaggttacagtttactatgtacgaaaaaacctttcagccgaacttaaaatacctaaggaggcagctgtggggtaaacttaatataacacattgctgctgtaacaaatcactacaaacttagtgacttcaaacagcacaaacttattacttaccagtttgcaagatcagaagtccaaaatatgaatct

SEQ ID NO: 404957 - DNA, 664 bp, Homo sapiens
gaaattgattttcaggatcatggggtgctggctaggcaagtttgaaatatataaagcaggccagcaggctggaaattctcaggcaggagttggcacttcagacttgaggcagaatttcttctccttcagggaaattttagttttgctgttaagaccttccaactgactgggtgagctatggttttcatggataatctcctttgtttaaagtcaactgactgtagaagttaatcatatctacaaaaaccttacagcgacacccagattagtgtttgattgattaattatagcctagccaagttgacacgtaaaagtaaccatcacagtgacttacctcaaacatttggtgatcttagcctgcctgttcatatttaagggtgagatctagaaaaactggtgggggtatttataggagaagattgccaactggaaatcattgctttagggtgaccaagaggaggtatagaatcttataatgggaaacccctaaataccagattgggaagtttttccctccagagggccttcaatttcccctgaaaagtctctactcccttgggaggaggggatgtgctatgtgtgggtgctgtccttcgataatgagtggatctggggaggcaggagggacttttcccacattagagtcttttaatgaatgtcactg

SEQ ID NO: 404958 - DNA, 617 bp, Homo sapiens
ctcaggaacagccttctcctgcctcctctgcacctggacaactcaactcctgccaagatgtcctgccagcagaaccagcagcagtgccaacccccacccaagtgtccctcacccaagtgtcccccaaagagcccagtacagtgtctgcctccagcttcctctggctgtgccccaagctctgggggctgtggccctagctccgagggcggctgcttcctgaaccaccacaggcgccaccaccgatgccggcgccagaggcccaactcctgtgacaggggcagtggtcagcaaggcgggggctctggctgcggccatggctctggaggctgctgctgacctggatcctgatgctgagacaagcgattttggaggaaacaagaatcccaagggcccaggaaaaccccatcttgatgcatgagttcccagataccctcttctggctttcacaggctgagctaggggttttcctgtggaaggtctgagctctccccagaaggcacttcctgtctgatgtccaggatgtcacatgttcccttacccctgtacctgtgaaggattggcagtgcttgtgcctgacctcatcaaaaaataaagctccttgtcctcattaaaaaaaa

SEQ ID NO: 404959 - DNA, 711 bp, Homo sapiens
catctggcatgtcccaccaactccacatcagcttccctcaccttcctgcagctcttgcctcaggaggccgctggtcttagagacattggactgtagattttggactaacaaatggctttgttttgtccaggacaactcaactcctgccaagatgtcctgccagcagaaccagcagcagtgccaacccccacccaagtgtccctcacccaagtgtcccccaaagagcccagtacagtgtctgcctccagcttcctctggctgtgccccaagctctgggggctgtggccctagctccgagggcggctgcttcctgaaccaccacaggcgccaccaccgatgccggcgccagaggcccaactcctgtgacaggggcagtggtcagcaaggcgggggctctggctgcggccatggctctggaggctgctgctgacctggatcctgatgctgagacaagcgattttggaggaaacaagaatcccaagggcccaggaaaaccccatcttgatgcatgagttcccagataccctcttctggctttcacaggctgagctaggggttttcctgtggaaggtctgagctctccccagaaggcacttcctgtctgatgtccaggatgtcacatgttcccttacccctgtacctgtgaaggattggcagtgcttgtgcctgacctcatcaaaaaataaagctccttgtcctcattaaaaaaaa

SEQ ID NO: 404960 - DNA, 683 bp, Homo sapiens
agggaactgcaggtacaaaagtccaggggcaagagagagtacagacaaggtccagttctactgcagacttttggggaagggataatgctagaggagaggctggagagtgagacagacctcataatacagagtacagacttcaacccaagggcagtgagaaatcattgaaagtttgttttagcagggaaataaaacgacaggttttgcctacaggcagtccccaactcaacgatggttcgacttaggatttttcaactttacgatggtgcgaaatgattcagtatgctcctcaccttatgatgcagttatatcagataaacccattttaagctgaaaatatggtgaagttgaagaagcacttctgccttacgatattttcaatttataatggatgggtttattcagacataactccattgtaagtcgtaaagcttctgtactgaaaaaaatcacttgacctcagggtataagatggattgcagggagcaagccttggccaggagacttttgcattggtttcggagaggaaagacggtgacttgacatatatagtggtgatgaggggaggacagatttggaagatgtttaggaagcagaattaatagaacttggggattgataggacttggttggatttgaggtaaggggagaggacatagggttgacgctcagatttctagttt

SEQ ID NO: 404961 - DNA, 109 bp, Homo sapiens
gttattaaccatgtagatttttaaaatataactaccatgtgtgctttaattttgaccattatagtttttggctatcgaagactgtgatcgagactgatctaaggttaat

SEQ ID NO: 404962 - DNA, 433 bp, Homo sapiens
aataatgtgcaaatgttttttgcattcaaagcacatccacatctgttggaagaccttaaatgagtttttgttcttagataacccacattagttgaatgtgttaagtaaaacgatacttgtaccccccccccccacccctttgtcaactgctgtgaatgctgtatggtgtgtgttctcttctgttactgatatgtaagtgtggtgatgtgaactaaagctgatgggttgagaacatggactgagcttgtaatgtgctttgcaggagtacttggaagcagagttcaccagtgagctcaggtgtctcaaagaagggtggaagttctaatgtctgttagctagccataagaatgctgtttgctgcagttctgtgtcctgtgcttggatgctttttataagagttgtcaatgttggaaattcttaaaactgatttaaa

SEQ ID NO: 404963 - DNA, 754 bp, Homo sapiens
cccactgtttcctttctgctggctggcctgcacactagcctgcctttgtgaggaagcggctgttaagcagacacagcaggagaagtttagaagtcaggagtttcattccttgcctaatgaaaagggatgcagacttgtggctgaggccaacagggaaaggcagtatggggagcaggaattagtgtttgctctgtggagcagataaggtggaagccagcctgcggtctgcctaccttcccatgtctcaaagacagagctccacaaatctatcccagagaaactgggttatgtgagatgcagaggagaaccccactgagaagtggtagcaaggcagtacaccttgttttcagcagagcctgggtctccatgtcatgtatcctcatagcctggaataaagatggtactctccctttgcagatagtggtggcaggcctcccctcttggaatttgctcctctcctctgtgagattcattcctgaattcctacttcccccagatactctttcgtggagaatctcttgctgtggcatcagacttgtgacaagcagagggaggttttctggaaatggctcactcagcatcgttcctgcagcagtgtgggaaccagaagtgaagaagcctctgcacagggaaaggagacctgtgctgccgcaggttattctgctcttttttcacagatccctcccactttgcaagcctgggtctagtgtgctactaagaggctagagtgcttcctgggtgggcatatttgaat

SEQ ID NO: 404964 - DNA, 708 bp, Homo sapiens
aaacaaaaggaaagaattctttagtgataatgaagacaccataagtccctatggcttccttctatcaaggatgaagtatgggattcaaaatagggtattttggccagtgttaggatattctacaatgagattatgatagaaggcatagtggaagcaatgaaaaattttaaaaacttcttttatctccacaactgttgctaaaaaatgtcttgctcttgagggagggtcccttgagaatacaaaaaagaacattagaaatattaaaagataaacatggcatttatgtagttaaacataagcaattatttcatctatattaatctcccatccctaggtgcatgcttagcttaaaagaaaagcatctttaacaggagcactagaggtctacagcactatacttgatcttccacttcacatgcaggaagaggtggtctgatatgaggctttacaaggattcctaagcagggctgctatggtttgaatgtttgaacgggccgggattacaggcatgaatcaatgagcccagccatgactaccattctgtggtagtttaccaagagacaagagctaggcacacaaatatgaggttttcttcagatccttccataagtactatttaataaacacaagtttaagaagagttttgaaaaagttatattattaccattgatagaattataatagcatagctctcttcaaatcattacc

SEQ ID NO: 404965 - DNA, 443 bp, Homo sapiens
cgaagtcactcataagtccattgacacaaggggaaccataatggcaagaaagttggtatggaaggacagatactattaatatataattccatttatccaaggtacttagagcagtcagtttagagacagaaagtagaatggtggttgccaggggctgaggaaaggggaaaagaatgaagttgttgtttaatgtgtgcagaatttcagatgtgcaagatgaaaaagttctggagatctgttgcacagcagagtgaatatacataatgctactgaactatacacttaaaaatggttaagatgatcagttttttgtgtttttttaaccacaataaaaattttcagaccaggtgccgtggctcaatcctagcactttgggagaccaaagtgggagggttgtttgaacccaaaaattgagaccagcatagattcccatcgctaccaaa

SEQ ID NO: 404966 - DNA, 610 bp, Homo sapiens
gcaggcagtccaggcaggggaagggaggagcaagaaaggatctcagaggtcagcagcaaagggaagcaggcagcagaagaaagcactatatgatcatgtatgctcagctaacagcaccacacttgcgtctgctgggtcatctagttggcgttatttgagaactaataaagatccctttttcaggttctctctactttctcaggaaataaacagcagcaaagcccagagcttataaagcacaagactggttattttgatgggggtcaggaaagacagggatattgggcatgtaccctctagggcagaccaggtagaaaacccagaaagttgcttgaaggtactgagttccaggttaggagtgcagagaagagagaaacaggaagcagaaagtggggagtggcttagcacaaacacaacacaatgtttacatacttcacaatgatgccaatgctgcaaatggcaacactgagtcaacagcattaggcaccaggacacttagctcctggccttcagggagcagtgggaagaaaaccctgcagggtggtgacaggcagtctccctcttcacgcactctggggaaccatggccttggcactgcgctgggcacctt

SEQ ID NO: 404967 - DNA, 597 bp, Homo sapiens
cctcgacactgttggcctactgacttgcctggacgctgcgccacatcccaccggcccttacactgtggtgtccagcagcatccggcttcatggggggacttgaaccctgcagcaggctcctgctcctgcctctcctgctggctgtaagtggtctccgtcctgtccaggcccaggcccagagcgattgcagttgctctacggtgagcccgggcgtgctggcagggatcgtgatgggagacctggtgctgacagtgctcattgccctggccgtgtacttcctgggccggctggtccctcgggggcgaggggctgcggaggcagcgacccggaaacagcgtatcactgagaccgagtcgccttatcaggagctccagggtcagaggtcggatgtctacagcgacctcaacacacagaggccgtattacaaatgagcccgaatcatgacagtcagcaacatgatacctggatccagccattcctgaagcccaccctgcacctcattccaactcctaccgcgatacagacccacagagtgccatccctgagagaccagaccgctccccaatactctcctaaaataaacatgaagcacaaaaa

SEQ ID NO: 404968 - DNA, 521 bp, Homo sapiens
gtcttcactcagaactcacaccttgcaaatcatcaaaggactcacaccggagagaaaccttaccgatgcaatgagtgtgggaaagccttcagtgttcgttcaagcctaaccacccatcaggcaatccatactgggaaaaaaccttacaaatgtaatgaatgtggcaaggtctttactcaaaatgctcacctggcaaatcaccgaagaattcatactggggagaaaccttacaggtgtacagagtgtgggaaagcctttagggtaagatcaagtctaactacccatatggcaatccacactggagaaaagcgttacaaatgtaatgagtgtggcaaggtcttcaggcagagttcaaatcttgcaagtcatcacagaatgcataccggagagaaaccttacaagtgtaatgagtgtggaaaagcctttagaggacattcaaacctaactacccacagagtgccatccctgagagaccagaccgctccccaatactctcctaaaataaacatgaagcacaaaaa

SEQ ID NO: 404969 - DNA, 586 bp, Homo sapiens
acagtggctggagtgtggggggaagaaactacagaggggaaattgagaaatgcctctctgaggaggtgacgtgagctgagacttgaagggagaggggatctaggggaacagagttttaggcagaggaaacagcacacgcagggaccctgaggctggggcacactgatgaggcagaggagaagggggaacattgaatgtacttgaataaaatccggatctctttcatggctataaggctgaagaagctgccaggggccttgcaggccactgggagaaggctggattttatttggtgggtcccttccactgatggcccccattcctttaggagctccagggtcagaggtcggatgtctacagcgacctcaacacacagaggccgtattacaaatgagcccgaatcatgacagtcagcaacatgatacctggatccagccattcctgaagcccaccctgcacctcattccaactcctaccgcgatacagacccacagagtgccatccctgagatatcatcatatccaccccacaacttttgcaacagccagccaaatttgggacgatctgctatataagttccccaagg

SEQ ID NO: 404970 - DNA, 746 bp, Homo sapiens
cctcgacactgttggcctactgacttgcctggacgctgcgccacatcccaccggcccttacactgtggtgtccagcagcatccggcttcatggggggacttgaaccctgcagcaggctcctgctcctgcctctcctgctggctgtaagtggtctccgtcctgtccaggcccaggcccagagcggtaggcctagacccagcagtccctctctctacctcccagagacctccctgtctccgtctctcccacaccctttccaaacctccctgccgctgacccccctccccacagttcccagcacacactgacctcccctgacccctgtgctgcagattgcagttgctctacggtgagcccgggcgtgctggcagggatcgtgatgggagacctggtgctgacagtgctcattgccctggccgtgtacttcctgggccggctggtccctcgggggcgaggggctgcggaggcagcgacccggaaacagcgtatcactgagaccgagtcgccttatcaggagctccagggtcagaggtcggatgtctacagcgacctcaacacacagaggccgtattacaaatgagcccgaatcatgacagtcagcaacatgatacctggatccagccattcctgaagcccaccctgcacctcattccaactcctaccgcgatacagacccacagagtgccatccctgagagaccagaccgctccccaatactctcctaaaataaacatgaagcacaaaaa

SEQ ID NO: 404971 - DNA, 564 bp, Homo sapiens
cctcgacactgttggcctactgacttgcctggacgctgcgccacatcccaccggcccttacactgtggtgtccagcagcatccggcttcatggggggacttgaaccctgcagcaggctcctgctcctgcctctcctgctggctgtaagtgattgcagttgctctacggtgagcccgggcgtgctggcagggatcgtgatgggagacctggtgctgacagtgctcattgccctggccgtgtacttcctgggccggctggtccctcgggggcgaggggctgcggaggcagcgacccggaaacagcgtatcactgagaccgagtcgccttatcaggagctccagggtcagaggtcggatgtctacagcgacctcaacacacagaggccgtattacaaatgagcccgaatcatgacagtcagcaacatgatacctggatccagccattcctgaagcccaccctgcacctcattccaactcctaccgcgatacagacccacagagtgccatccctgagagaccagaccgctccccaatactctcctaaaataaacatgaagcacaaaaa

SEQ ID NO: 404972 - DNA, 781 bp, Homo sapiens
cctcgacactgttggcctactgacttgcctggacgctgcgccacatcccaccggcccttacactgtggtgtccagcagcatccggcttcatggggggacttgaaccctgcagcaggctcctgctcctgcctctcctgctggctgtaagtggtctccgtcctgtccaggcccaggcccagagcgattgcagttgctctacggtgagcccgggcgtgctggcagggatcgtgatgggagacctggtgctgacagtgctcattgccctggccgtgtacttcctgggccggctggtccctcgggggcgaggggctgcggaggcagcgacccggaaacagcgtatcactgagaccgagtcgccttatcaggagctccagggtcagaggtcggatgtctacagcgacctcaacacacagaggccgtattacaaatgagcccgaatcatgacagtcagcaacatgatacctggatccagccattcctgaagcccaccctgcacctcattccaactcctaccgcgatacagacccacagagtgccatccctgagagaccagaccgctccccaatactctcctaaaataaacatgaagcacaaaaaaaaaaaaaaaaaaaaaaaaagggggggggcccggcctgaaaagttttaaaaccattctttgggccggggccaaagaggaactgtcaaagggtccaggaaccggcagaaaggggggttccccaaaaagcccggggacgggttgaaaacccaaggttcgggccggtccacaggacccgggcgatac

SEQ ID NO: 404973 - DNA, 1035 bp, Homo sapiens
acagtggctggagtgtggggggaagaaactacagaggggaaattgagaaatgcctctctgaggaggtgacgtgagctgagacttgaagggagaggggatctaggggaacagagttttaggcagaggaaacagcacacgcagggaccctgaggctggggcacactgatgaggcagaggagaagggggaacattgaatgtacttgaataaaatccggatctctttcatggctataaggctgaagaagctgccaggggccttgcaggccactgggagaaggctggattttatttggtgggtcccttccactgatggcccccattcctttaggagctccagggtcagaggtcggatgtctacagcgacctcaacacacagaggccgtattacaaatgagcccgaatcatgacagtcagcaacatgatacctggatccagccattcctgaagcccaccctgcacctcattccaactcctaccgcgatacagacccacagagtgccatccctgagagaccagaccgctccccaatactctcctaaaataaacatgaagcacaaaaaaaaaaaaaaaaaaaaaaaaaaaaaaaaaaaaaaaaaaaaaaaaaaaaaaaaaaaaaaaaaaaaaaaaaaaaaaaaaaaaaaaaaaaaaaaaccttgtggcccgcttgggccaagccgattttagattcggccaggtttatccatgcggccgaatttggggctaattgggccaattcgccctatggggggccgtttaacaattaatgggccggggttttaaaacgttggaactgggaaaaccttggggttcccaaattaaatccccttgaggaaaatccccttttggccagttggcgaaatagcgaaggggcccgaacggacgcgctttccaaaaagtgtggcacccggaagggccaaggaaaattgaaggcggtaaaatttggtaaaaatccgggtaaaattttggtaaaataggctattttttacccaatggcccaaatcggatttgggacaagggtcccttttaaagaacgcg

SEQ ID NO: 404974 - DNA, 1154 bp, Homo sapiens
cctcgacactgttggcctactgacttgcctggacgctgcgccacatcccaccggcccttacactgtggtgtccagcagcatccggcttcatggggggacttgaaccctgcagcaggctcctgctcctgcctctcctgctggctgtaagtggtggtgagttaggggcttccgtggctgcctcccgggtccctgggctcagcttggggcagggcagggagtggggtggaacgagagaaccaaaagtgggtgttgggatgggagcaggtccccaacctcccaaagcctgtgggtttctcccagagcccaagcccccaagttttgtcgtccgctacaagcaggggagaagagacatctaagtgtgttgccacaggacaagttgtgcagaagtaacgcacatagtccggtggcccagacgccagccccctgagtcccgccagacacgctctcccccttgctaacctcttggctgtcaggatccaccttccctggcttctaaacttgcctcccccacccccgtcataactctgtgcctcagtttaccttctttttcctcctcaggtctccgtcctgtccaggcccaggcccagagcggtaggcctagacccagcagtccctctctctacctcccagagacctccctgtctccgtctctcccacaccctttccaaacctccctgccgctgacccccctccccacagttcccagcacacactgacctcccctgacccctgtgctgcagattgcagttgctctacggtgagcccgggcgtgctggcagggatcgtgatgggagacctggtgctgacagtgctcattgccctggccgtgtacttcctgggccggctggtccctcgggggcgaggggctgcggaggcagcgacccggaaacagcgtatcactgagaccgagtcgccttatcaggagctccagggtcagaggtcggatgtctacagcgacctcaacacacagaggccgtattacaaatgagcccgaatcatgacagtcagcaacatgatacctggatccagccattcctgaagcccaccctgcacctcattccaactcctaccgcgatacagacccacagagtgccatccctgagagaccagaccgctccccaatactctcctaaaataaacatgaagcacaaaaa

SEQ ID NO: 404975 - DNA, 982 bp, Homo sapiens
cctcgacactgttggcctactgacttgcctggacgctgcgccacatcccaccggcccttacactgtggtgtccagcagcatccggcttcatggggggacttgaaccctgcagcaggctcctgctcctgcctctcctgctggctgtaagtggtctccgtcctgtccaggcccaggcccagagcgattgcagttgctctacggtgagcccgggcgtgctggcagggatcgtgatgggagacctggtgctgacagtgctcattgccctggccgtgtacttcctgggccggctggtccctcgggggcgaggggctgcggaggcagcgacccggaaacagcgtatcactgagaccgagtcgccttatcaggagctccagggtcagaggtcggatgtctacagcgacctcaacacacagaggccgtattacaaatgagcccgaatcatgacagtcagcaacatgatacctggatccagccattcctgaagcccaccctgcacctcattccaactcctaccgcgatacagacccacagagtgccatccctgagagaccagaccgctccccaatactctcctaaaataaacatgaagcacaaaaaaaaaaaaaaaaaaaaaaaaaaaaggggggggggttaaaaatttcccccggggggcccaagtttagggttaacccagtttttttgtacaagagggggccccttataggaagccgtatttaataagcgcaaggaacggggcccgatggttttaacaaagcgtttcggtgagtgggaaaaaacgttgccaagcttggggactcgtgtgtggagggaccctttaaattttggggggtgggtgacaattgtggagacaacattacctaagagagatttaagagctcaggggtaattataaaattttcaagggtgctaatgtgtgtaaccaagcgtgaaaatgattgcgtgtgaaaatttggtagggagtattattttagaatttttgcgg

SEQ ID NO: 404976 - DNA, 1072 bp, Homo sapiens
cctcgacactgttggcctactgacttgcctggacgctgcgccacatcccaccggcccttacactgtggtgtccagcagcatccggcttcatggggggacttgaaccctgcagcaggctcctgctcctgcctctcctgctggctgtaagtggtctccgtcctgtccaggcccaggcccagagcgattgcagttgctctacggtgagcccgggcgtgctggcagggatcgtgatgggagacctggtgctgacagtgctcattgccctggccgtgtacttcctgggccggctggtccctcgggggcgaggggctgcggaggcagcgacccggaaacagcgtatcactgagaccgagtcgccttatcaggagctccagggtcagaggtcggatgtctacagcgacctcaacacacagaggccgtattacaaatgagcccgaatcatgacagtcagcaacatgatacctggatccagccattcctgaagcccaccctgcacctcattccaactcctaccgcgatacagacccacagagtgccatccctgagagaccagaccgctccccaatactctcctaaaataaacatgaagcacaaaaaaaaaaaaaaaaaaaaaaaaaaaaaaaaaaaaaaaaaaaaaaaaaaaaaaaaaaaaaaaaaaaaaaaaaaaaaaaaaaaaaaaaaaaaaaaaccttgtggcccgcttgggccaagccgattttagattcggccaggtttatccatgcggccgaatttggggctaattgggccaattcgccctatggggggccgtttaacaattaatgggccggggttttaaaacgttggaactgggaaaaccttggggttcccaaattaaatccccttgaggaaaatccccttttggccagttggcgaaatagcgaaggggcccgaacggacgcgctttccaaaaagtgtggcacccggaagggccaaggaaaattgaaggcggtaaaatttggtaaaaatccgggtaaaattttggtaaaataggctattttttacccaatggcccaaatcggatttgggacaagggtcccttttaaagaacgcg

SEQ ID NO: 404977 - DNA, 616 bp, Homo sapiens
  misc_feature (605)..(605): n is a, c, g, or t
cctcgacactgttggcctactgacttgcctggacgctgcgccacatcccaccggcccttacactgtggtgtccagcagcatccggcttcatggggggacttgaaccctgcagcaggctcctgctcctgcctctcctgctggctgtaagtggtctccgtcctgtccaggcccaggcccagagcgattgcagttgctctacggtgagcccgggcgtgctggcagggatcgtgatgggagacctggtgctgacagtgctcattgccctggccgtgtacttcctgggccggctggtccctcgggggcgaggggctgcggaggcagcgacccggaaacagcgtatcactgagaccgagtcgccttatcaggagctccagggtcagaggtcggatgtctacagcgacctcaacacacagaggccgtattacaaatgagcccgaatcatgacagtcagcaacatgatacctggatccagccattcctgaagcccaccctgcacctcattcctggataattgtttttgtgttttttatagagacagcatcttgctatgtcgcccaggctggtctcaaactactgaactcaagcgatctgcccacctggacctncaaaagtggag

SEQ ID NO: 404978 - DNA, 1107 bp, Homo sapiens
cctcgacactgttggcctactgacttgcctggacgctgcgccacatcccaccggcccttacactgtggtgtccagcagcatccggcttcatggggggacttgaaccctgcagcaggctcctgctcctgcctctcctgctggctgtaagtggtggtgagttaggggcttccgtggctgcctcccgggtccctgggctcagcttggggcagggcagggagtggggtggaacgagagaaccaaaagtgggtgttgggatgggagcaggtccccaacctcccaaagcctgtgggtttctcccagagcccaagcccccaagttttgtcgtccgctacaagcaggggagaagagacatctaagtgtgttgccacaggacaagttgtgcagaagtaacgcacatagtccggtggcccagacgccagccccctgagtcccgccagacacgctctcccccttgctaacctcttggctgtcaggatccaccttccctggcttctaaacttgcctcccccacccccgtcataactctgtgcctcagtttaccttctttttcctcctcaggtctccgtcctgtccaggcccaggcccagagcggtaggcctagacccagcagtccctctctctacctcccagagacctccctgtctccgtctctcccacaccctttccaaacctccctgccgctgacccccctccccacagttcccagcacacactgacctcccctgacccctgtgctgcagattgcagttgctctacggtgagcccgggcgtgctggcagggatcgtgatgggagacctggtgctgacagtgctcattgccctggccgtgtacttcctgggccggctggtccctcgggggcgaggggctgcggagggagctccagggtcagaggtcggatgtctacagcgacctcaacacacagaggccgtattacaaatgagcccgaatcatgacagtcagcaacatgatacctggatccagccattcctgaagcccaccctgcacctcattccaactcctaccgcgatacagacccacagagtgccatccctgagagaccagaccgctccccaatactctcctaaaataaacatgaagcacaaaaa

SEQ ID NO: 404979 - DNA, 366 bp, Homo sapiens
acctaaatagcctcatgtggctagtgggtactgtatttgggtaatgcagatgctatttcaaagatctaagaatatttccaagcaatctaacccctgtcactctcttggcctatataataatgctcttaagaaagaaacaggaagggtgcggtagctcacacctgtatcccaacactttgggagatggaggagggaggatcacttgagcctaagagatcgagaccagcctgggcaacatagggagaccccatctctacagaaaaggctgaggtgggaggatcgcttgagcccaggagtttgaggctgcggtgagctaggatcccaccactgcactttggcctgggcaacagagtaagaccccatgtc

SEQ ID NO: 404980 - DNA, 677 bp, Homo sapiens
acactgtaaatgttagtcatggaggatgtgtaccaacatggaagagtgtttacaatgtatctttagagaaaagatggactatccaagtatgcatactggaattatcattagattaccatacatctgggtgaggagcagaacagagacataagtaacagcaaccgtgaacctcagaggcagccaagggctggagtgcaatggcaccatcgcggctcactgcaacctccacctcctgggttcaagcgattctcctgcctcagcctcccgagtagctgggattacaggtgcccaccaccacgcccagctaatttgtgtatttttagtagagacgggtttcaccatgctggcctcgaactcctgacttcaggtgatccacctgcctcggcctcccaaagtgccgggattacaggggaagccagccaccatgtcataaggacaaagcagccctgaggagaaccaatcccttggggaggaactcggcccccagtcagcagccaataccaacttgcccatgtgtgagttagtcaccttgaaagtggatctgctgtcccagccaagccttcagatgagaccacagctctggccaacacctgactgcagcctcatgagagacccagagaaccatcctgttgagtctctcttgaattcttggcccatagaaattgctagtgatagta

SEQ ID NO: 404981 - DNA, 1160 bp, Homo sapiens
  misc_feature (1)..(1): n is a, c, g, or t
  misc_feature (15)..(15): n is a, c, g, or t
nccgctctagagtancccacctcctaccccacgattcactacctggtctttaccagaaaaagtttgccgtcacctgatctagagccaggtttggagcagagatgtgctgacagcttttgagtctcttacatgcctccaccttctttctttgcatcaaaaggacatgaaagtttccatgtcagtaatagcgagtggcttgccctcccacagctaaaaattatatataaactccagacaaagctttaaaaaaacaactgtttgaaggcactgcagagcaaccaaatgcagtcagggactgcaaaggggagctttcttgtgtaagatccacatttttacagcttttccccagtgggtatttcccagttcgagtggcacagggtagctagtacttaagcagaaagcttgtgttgagtgcagagtttaggactgctagagcagccagaaaaagaggaggcaaatcgcagaaaagggattcaacaaggagggaccccctaaaatctgtttataaattccctgaagtttttttgacccccaaattgtgaattcacaagagagacattataaaatgcaacagaaaccagtagctggcaagggtgacaagacagcagagatttcagctgctcctcattacagcagggctagacttcaaagtttgaatccaatcctgctgtgttacaggggatcactaaacaccttgggcattccgatgaaacttcagaagagccatgccttgggagtagaaaccgtgtcctaggactaagggcaaatccaaaaacccaagtagaccaaccaatctcaggatgagtcaccagtaacttaatactcttcagagaagaaaaaaaccaagcgtctacagtgcatcatccacactgtccagtggacagtcagcactactacacatatgaagaaacaggaaggtgtgacccagtgagtagaagcaaaccctaaagtgacccttttcttggaatttgcagacacagaatttaaagcacatattttacatatgttcagagatttaaagaaaactaggccaggcacagtggctcatgcctttaatcccagcactttggaaggccgagacaggcatattgcttgagtcgaggagttccaaaccagcatggacaacatggcaaaagcccatctcttaagggaaaaaaaaa

SEQ ID NO: 404982 - DNA, 998 bp, Homo sapiens
aagccgtcagcactccttgttctgtttttctttcttcctttccttttctctgagagtttaatactttcaaaggaaaagctttaaaaaaacaactgtttgaaggcactgcagagcaaccaaatgcagtcagggactgcaaaggggagctttcttgtgtaagatccacatttttacagcttttccccagtgggtatttcccagttcgagtggcacagggtagctagtacttaagcagaaagcttgtgttgagtgcagagtttaggactgctagagcagccagaaaaagaggaggcaaatcgcagaaaagggattcaacaaggagggaccccctaaaatctgtttataaattccctgaagtttttttgacccccaaattgtgaattcacaagagagacattataaaatgcaacagaaaccagtagctggcaagggtgacaagacagcagagatttcagctgctcctcattacagcagggctagacttcaaagtttgaatccaatcctgctgtgttacaggggatcactaaacaccttgggcattccgatgaaacttcagaagagccatgccttgggagtagaaaccgtgtcctaggactaagggcaaatccaaaaacccaagtagaccaaccaatctcaggatgagtcaccagtaacttaatactcttcagagaagaaaaaaaccaagcgtctacagtgcatcatccacactgtccagtggacagtcagcactactacacatatgaagaaacaggaaggtgtgacccagtgagtagaagcaaaccctaaagtgacccttttcttggaatttgcagacacagaatttaaagcacatattttacatatgttcagagatttaaagaaaactaggccaggcacagtggctcatgcctttaatcccagcactttggaaggccgagacaggcatattgcttgagtcgaggagttccaaaccagcatggacaacatggcaaaagcccatctcttaagggaaaaaaaaa

SEQ ID NO: 404983 - DNA, 1585 bp, Homo sapiens
gacaagaagacctgactccatgagtagaagcaaacccgaaagtgatcccattattagaatttgcagacagaatttacacatatatttttgggccacatccaacctgccaccagtttttgtaaataaagctttcatggaacatagccatgcttgtttgtttattatctatggcagggacgtccagtcttttggcttccctgggccacatcggaagaagaattgtctcaggctgcatataaaatacaccaacgatagctgatgagcttaaaaaaaaaaaatcgcaaaaacagctcagtgttttaagaaagtttatggatttgtgttgggccacattcaaagctgtcctgggccacataacaggccgcaggttagacgagcttggtctgtggctaccttcactctacaatagtagagttgagtagttgcagcagagattatgtgacccataaagcctaaatattcactacctggtctttaccagaaaaagtttgccgtcacctgatctagagccaggtttggagcagagatgtgctgacagcttttgagtctcttacatgcctccaccttctttctttgcatcaaaaggacatgaaagtttccatgtcagtaatagcgagtggcttgccctcccacagctaaaaattatatataaactccagacaaagctttaaaaaaacaactgtttgaaggcactgcagagcaaccaaatgcagtcagggactgcaaaggggagctttcttgtgtaagatccacatttttacagcttttccccagtgggtatttcccagttcgagtggcacagggtagctagtacttaagcagaaagcttgtgttgagtgcagagtttaggactgctagagcagccagaaaaagaggaggcaaatcgcagaaaagggattcaacaaggagggaccccctaaaatctgtttataaattccctgaagtttttttgacccccaaattgtgaattcacaagagagacattataaaatgcaacagaaaccagtagctggcaagggtgacaagacagcagagatttcagctgctcctcattacagcagggctagacttcaaagtttgaatccaatcctgctgtgttacaggggatcactaaacaccttgggcattccgatgaaacttcagaagagccatgccttgggagtagaaaccgtgtcctaggactaagggcaaatccaaaaacccaagtagaccaaccaatctcaggatgagtcaccagtaacttaatactcttcagagaagaaaaaaaccaagcgtctacagtgcatcatccacactgtccagtggacagtcagcactactacacatatgaagaaacaggaaggtgtgacccagtgagtagaagcaaaccctaaagtgacccttttcttggaatttgcagacacagaatttaaagcacatattttacatatgttcagagatttaaagaaaactaggccaggcacagtggctcatgcctttaatcccagcactttggaaggccgagacaggcatattgcttgagtcgaggagttccaaaccagcatggacaacatggcaaaagcccatctcttaagggaaaaaaaaa

SEQ ID NO: 404984 - DNA, 511 bp, Homo sapiens
ttagttccttccacacacccactgtgtccctagctgttccactagctgttccctctgcctggaatagtcttctcccttttcttcaaaaggctggctctttcttgacattcagatctcaccaccacaaacaaatgagatttcttcagaggccttccctgatctaatcaatcaattagccaccccactatttcaaggtcaacctgtttcgattatctgcatagcacttaattgaggtatatcgttattattcatatactatctcttcattagaatgtaaggtcaatgattagggacctttaccactgtattctggtgcctaaaacagtgcctggcccataacagaagttcataaagatgttgagtgaaaattttatgaataaatgaatagccaggcacggtggctcatgcctgtaatcctagcactttcagaggccaaggtgggcagatcacttgaggccaggagtttgagaccagcctggccaacatggcaaaaccccgtctctactaaaaa

SEQ ID NO: 404985 - DNA, 943 bp, Homo sapiens
agcgggctgccgccgcggcggccgctgctgctgctgcttctgccgccgctgccgccgccgctgcctggatatagtgcggcaagagcggagcttgcagcggactttgcgaggaggagcgcgcgggctgcgggcggctggggcaccgcgggagcggcggcggcggctctagcagaggcggccggggcagcgaaaggttctctctccagggctggacttaataactttgaaactgtccaccggtgtcacgtcctgaacatgagcctcctcctctccttctacctgctggggttgcttgtcagtagcgggcaagctcttcttcaagtgacaatttcacttagcaaagtagagcttagtgttggagaatctaaattcttcacatgtacagcgattggtgaacctgaaagtatagattggtataatcctcaaggagagaagataatttcaacacagagggtagtagtgcaaaaggaaggtgttaggtcacggttaaccatctacaatgcaaatatagaagatgcagggatatatcgttgtcaagcaacagatgccaaaggacaaacacaagaagctacagtagttttggaaatttaccaaaaactcactttcagagaagtggtatctccacaagaattcaaacaaggagaagatgcagaagtggtttgccgagttagcagttcacctgcacctgctgtcagctggttgtatcataatgaggaagtcaccactatttccgacaatcggttcgctatgttagcaaacaataacctgcagattctcaacatcaataaaagtgatgaaggtatatacagatgtgaaggaagagtggaggccaggggagaaattgacttccgtgatatcattgttattgttaatggtaagcagtaaataatttgtacatgttttatggattcattttagcaatgtaacttattgaatggcaacc

SEQ ID NO: 404986 - DNA, 6381 bp, Homo sapiens
agcgggctgccgccgcggcggccgctgctgctgctgcttctgccgccgctgccgccgccgctgcctggatatagtgcggcaagagcggagcttgcagcggactttgcgaggaggagcgcgcgggctgcgggcggctggggcaccgcgggagcggcggcggcggctctagcagaggcggccggggcagcgaaaggttctctctccagggctggacttaataactttgaaactgtccaccggtgtcacgtcctgaacatgagcctcctcctctccttctacctgctggggttgcttgtcagtagcgggcaagctcttcttcaagtgacaatttcacttagcaaagtagagcttagtgttggagaatctaaattcttcacatgtacagcgattggtgaacctgaaagtatagattggtataatcctcaaggagagaagataatttcaacacagagggtagtagtgcaaaaggaaggtgttaggtcacggttaaccatctacaatgcaaatatagaagatgcagggatatatcgttgtcaagcaacagatgccaaaggacaaacacaagaagctacagtagttttggaaatttaccaaaaactcactttcagagaagtggtatctccacaagaattcaaacaaggagaagatgcagaagtggtttgccgagttagcagttcacctgcacctgctgtcagctggttgtatcataatgaggaagtcaccactatttccgacaatcggttcgctatgttagcaaacaataacctgcagattctcaacatcaataaaagtgatgaaggtatatacagatgtgaaggaagagtggaggccaggggagaaattgacttccgtgatatcattgttattgttaatgtgccgccagcaatctcaatgcctcagaaatcttttaatgccacagcagagagaggagaagaaatgacattttcctgcagggcctcaggctctccagaacccgccatctcctggttcaggaatggcaagctcattgaagaaaatgagaagtacatattgaaagggagcaatacagaactcactgtcaggaacataatcaatagtgatggtggtccttatgtctgcagggccacaaataaggcaggagaagatgaaaagcaagctttcctccaagtctttgtacagcctcacataatacagcttaaaaatgaaactacatatgagaatggtcaagtcacactcgtatgtgatgcggaaggggagcctattccagaaatcacttggaaaagagctgtggatggcttcacgttcactgaaggcgataagagcctggacggccgtatcgaagtcaaagggcagcatggaagctcatcactgcatattaaagatgtgaagttgtcagattcagggagatatgactgtgaagctgcaagcagaattggagggcatcaaaagagcatgtaccttgatattgaatatgcccccaagtttatatcaaaccaaacaatttattactcttgggaaggaaatcctatcaatataagttgtgatgtgaaatcgaatccaccagcatcaattcactggagaagagataaattagtcttacctgctaaaaacacgaccaatttaaagacttatagtacaggaagaaagatgatattagagattgcacctacatctgacaatgactttggacgctataattgcacagccactaatcatataggaacaagatttcaagaatatattcttgctttggctgacgtgccatccagtccctatggagtgaagatcatagagctgtcgcagaccacggccaaggtttccttcaacaaaccggactcccatggaggtgtacctattcatcactatcaggtggatgtcaaagaagtagcgtcagaaatctggaaaattgtacgctcccatggagttcaaacaatggttgttttgaacaacctggaaccaaatacaacttatgaaatcagggttgcagctgtaaatggaaagggacaaggagactacagtaaaatagaaatcttccaaacattaccagttcgtgaaccaagtcctccatccatacatggacagccaagcagtggaaagagctttaaactcagcatcaccaaacaggacgatggaggggcccctattttggaatacattgtgaaatatagaagtaaagataaggaagaccaatggctagagaaaaaagtgcaaggaaataaagaccacatcattttggagcatctccagtggaccatggggatgaagttcagattaccagctgccaatagattgggatattctgaaccgacagtttatgaattcagcatgccaccaaagcccaacattattaaagacacgctgtttaatggtcttgggcttggagcagtaattggcctgggagttgctgcactgctgctaattcttgtggtaacagacgtcagctgcttctttattcggcaatgtgggttgctgatgtgcatcactaggagaatgtgtggaaagaaaagtggctccagtggcaaaagtaaagaactcgaagaaggaaaagctgcatacctgaaagatggatcaaaagaaccaatagtggagatgagaacagaggatgaaagagttactaatcacgaagatgggagcccagtaaatgagccaaatgaaaccacaccactgacagaacctgaaaaattgcctttaaaggaagaagatgggaaagaagctctaaatccagaaactatagaaattaaagtttctaacgacatcattcaatcaaaagaagacgacagcaaagcataacaacaatattacaggggcgtcaaagagccagttatctttagcagatattaaaaattgaaaactttggagaactcatttcaagttatgattcagtgcattttcaacattgatttttgatagactgaagtgccagatcaaaattgttacccatttgaaagaatattagttgtatataaaattagattagaaagactttctaaatctctatctctttatatatgtcctattcattcacaatggattatacaaaaaaaagtgtattgcaagtgaaataatattgatttctgccctcagcttcaaataaagtaaattgaaatgggaacaatatcaatatggtgtcttgatatatttataaatatgtgattatcatttatttttaaaataatttatcaaaaaacaagtctttagtgttcaaatacttcaaatcatatcctcagatatatttttagcccatggttttatataatctttaagaactaattttaccactgttataggttcaccattaaatataattggctaataaaaattttaaggttgactaaattaagaagaaattatttaacattttaatgtgccataaaagagtaaatgataaataattaaatgccactatgtgttctattccggatgttctagctagaagtcattttaagattttgataaacaactttggttgaagaaattccttaagtattcaacacaaactttctaatatcttttgttagggttataccagaataaaatgcttctttacttccaagctatgcaagctcccagaggtaatagagtgacacatgatttaacttatatgtaaggtttaaaaaagtatttatcattataaacatacataccatttgggagcaggtttattaaccttgagagccaaaggtttccttaggccctgtaacattcagaacctttggtgtttcaggtggtattatagctcaaatagtgacaggacagggaatgcgttccaaaggaatattggagcaattttaacattgcagaaacctgctctgggtgtgtctctctgtagagataacctgatgattattaaatgtaaaattaaggcaactcatgaatatttttatttacaaagtgcttgaaactcagccaaggagagaaaactaagtacttttatataattcatcacttttctggctacagcaggacagaatatgaccatcttcgtttgaaggcaccaaatcgtcgcagtgtctttgccataagttgcagggttaaatgcggaaatctctccttgcgttcctgtctggcgtattctgaagaaaagaacagaattcttgtgcctacctaagaatttgagtagtgtctaaacaaacaaagcagttaggtcattttaactgacttgattatccaactggtctttgacagatttgactgtccatatttagtttatgtttgtctgatcatccagtttgctttattttgctgtgttttattttgttgtttgttttgttttgtaccagtgtactaaaactagtcaaaatacttgaattagtttgtttgtgcaaagtgtacaagcttagtaaagtgtccatgaagcaatagccatgaatgctaattatttctaaatagggccacatggttttaaactaatgatggtgaaagaaatacgatgactgagaaagtcatttcgcatgtttactattgttatattcgtgctttacttcaagagtgcagaaatcataataaataacaaactatttttgtgttttctcaatgtgacatttctgtttctctcatttattcggattttccttgtaaagaaattgacatatatttcatatatatatacacatatatatatatacacatatatatacatatatatatatgatgttaaatttcctgccactcatgtggagtaatgatctgaaattaacagataatctgaagctaattatattcagactatttcaagtgcactgtttcagttgcccgggtggtccttacctcttgtccttgaaatccatgccatgctgaagcaaggcaatactgtgataaagtattttttttaatatttcaatggaatgctccaaatgatttataaaaatttcaaaataaaagatggcttgtagtaaattgtaaaatatgagtagaactgaaataacctgtttcattcttattctagattaaacaaacatatacatataaccatataaatgttatttttattgtctgagagtactcttaaatattagtataaagtgtcaaaagaattgactgaatataagtactgttaaaataatttgaaccctatgatattttaaaccaagaggcaaagatatcacctaaacttggtatttcttgataggttaggtgcaattaggcagtgacaatctgtattcaacaacatataagaggaaagagtaatatcagaattttgacacaaattaatgtgtcaacatattttacaatgattgtcaaaggaatttaagaattgtatttttaaagatttatttattatttttgtgggctaagacattgccattctattgatactaatgtctaacattaatgtttcttgttttcttttatttttaatattaataactataaaagcatttttcaaaggctatttgatccagcacacttcatatggatcttagtctttgaattaaatatttatataaatagattttattaatcaaattatttatttgtgtgccaacaattaattgtaactttatgatcatatctttgtttatgcttcttattttaaataattaagatgtatctgtgccttttaattagcatgacagtctgctttattaaaagaaaaaaactacaattaacatcattactagtatattttgcttagatttgagataatcaaatgatgctgtcttatttacagtcagtaattaagttcaattcaaactattttaccttgaatataaaatctaaatataataaactatactgtataatttactttaattcatgtcaaaacaattctttttatacacacacatgaaatattcttaatctgttctgtattgtttttctaaacaataaatacattctagatattgttgaaattaaattttgccagttgtaagacaaagacaacagataacttttgaaaatcaagcaaattactatggggtttcttgggtcttcattattccatttatatatattttttatttcgaataataaatcaacctttatttttggcaataagattatcactgacgaaaatatgtacagttcaagaagtagaaataatattttccattagttaatttaggaaatattggaatagcatattataattatttatgaggttcccaatgttgtttttcacagaaaataaggtaaacattcaacttaaatcccccatgaagttttttcatgctcatactcataatcattatcacataatgtgcttattcaacaaactttgtatctgggatatatttttaacaataagtttgttagcattatttatttatctttagagagaaaatatttgcatctgtttatttaccctttggaagcattaatacttagtcactcacattgaaattgcatatggatgtatcaacataggctaaaattaaattatggatgtcgcagaaatga

SEQ ID NO: 404987 - DNA, 5065 bp, Homo sapiens
gcatgcaaaactcctcatagcgcctgtgaaatgttgaaggaaggggattgctgacaatacaagccagaaagagcttttgcctgaaatactcagataattcaacaatggttgttttgaacaacctggaaccaaatacaacttatgaaatcagggttgcagctgtaaatggaaagggacaaggagactacagtaaaatagaaatcttccaaacattaccagttcgtgaaccaagtcctccatccatacatggacagccaagcagtggaaagagctttaaactcagcatcaccaaacaggacgatggaggggcccctattttggaatacattgtgaaatatagaagtaaagataaggaagaccaatggctagagaaaaaagtgcaaggaaataaagaccacatcattttggagcatctccagtggaccatggggatgaagttcagattaccagctgccaatagattgggatattctgaaccgacagtttatgaattcagcatgccaccaaagcccaacattattaaagacacgctgtttaatggtcttgggcttggagcagtaattggcctgggagttgctgcactgctgctaattcttgtggtaacagacgtcagctgcttctttattcggcaatgtgggttgctgatgtgcatcactaggagaatgtgtggaaagaaaagtggctccagtggcaaaagtaaagaactcgaagaaggaaaagctgcatacctgaaagatggatcaaaagaaccaatagtggagatgagaacagaggatgaaagagttactaatcacgaagatgggagcccagtaaatgagccaaatgaaaccacaccactgacagaacctgaaaaattgcctttaaaggaagaagatgggaaagaagctctaaatccagaaactatagaaattaaagtttctaacgacatcattcaatcaaaagaagacgacagcaaagcataacaacaatattacaggggcttgaacaacactacgaagagtatttggattgcgtgaccctatgaccaaaactattccattgaccttaatttcttgggaaacttctagcttggaatagcttgtacacatatacatatgatcaaatactcctgcccatgatccattcccttttgttattgttgttgttgttgctgttgttgttaattttgttaagaatttcaatatcaagactgactggcaccaacactttggtattcaatttgattctatgactgaagtactggaatttattatgtggctaaagtgctctatttattaagaactatatttaataccaccaacaaatataggggttaaggaaaaaaaacgttgagctacatgtgtaagaaggccctgcatgtgtatgagtcctattctgggcaaatagattcttaaagtggctttcaacttcaagatgaaggagcttaataatggttactcattttatcaggggaatttcagggaacgtaggcgtcaaagagccagttatctttagcagatattaaaaattgaaaactttggagaactcatttcaagttatgattcagtgcattttcaacattgatttttgatagactgaagtgccagatcaaaattgttacccatttgaaagaatattagttgtatataaaattagattagaaagactttctaaatctctatctctttatatatgtcctattcattcacaatggattatacaaaaaaaagtgtattgcaagtgaaataatattgatttctgccctcagcttcaaataaagtaaattgaaatgggaacaatatcaatatggtgtcttgatatatttataaatatgtgattatcatttatttttaaaataatttatcaaaaaacaagtctttagtgttcaaatacttcaaatcatatcctcagatatatttttagcccatggttttatataatctttaagaactaattttaccactgttataggttcaccattaaatataattggctaataaaaattttaaggttgactaaattaagaagaaattatttaacattttaatgtgccataaaagagtaaatgataaataattaaatgccactatgtgttctattccggatgttctagctagaagtcattttaagattttgataaacaactttggttgaagaaattccttaagtattcaacacaaactttctaatatcttttgttagggttataccagaataaaatgcttctttacttccaagctatgcaagctcccagaggtaatagagtgacacatgatttaacttatatgtaaggtttaaaaaagtatttatcattataaacatacataccatttgggagcaggtttattaaccttgagagccaaaggtttccttaggccctgtaacattcagaacctttggtgtttcaggtggtattatagctcaaatagtgacaggacagggaatgcgttccaaaggaatattggagcaattttaacattgcagaaacctgctctgggtgtgtctctctgtagagataacctgatgattattaaatgtaaaattaaggcaactcatgaatatttttatttacaaagtgcttgaaactcagccaaggagagaaaactaagtacttttatataattcatcacttttctggctacagcaggacagaatatgaccatcttcgtttgaaggcaccaaatcgtcgcagtgtctttgccataagttgcagggttaaatgcggaaatctctccttgcgttcctgtctggcgtattctgaagaaaagaacagaattcttgtgcctacctaagaatttgagtagtgtctaaacaaacaaagcagttaggtcattttaactgacttgattatccaactggtctttgacagatttgactgtccatatttagtttatgtttgtctgatcatccagtttgctttattttgctgtgttttattttgttgtttgttttgttttgtaccagtgtactaaaactagtcaaaatacttgaattagtttgtttgtgcaaagtgtacaagcttagtaaagtgtccatgaagcaatagccatgaatgctaattatttctaaatagggccacatggttttaaactaatgatggtgaaagaaatacgatgactgagaaagtcatttcgcatgtttactattgttatattcgtgctttacttcaagagtgcagaaatcataataaataacaaactatttttgtgttttctcaatgtgacatttctgtttctctcatttattcggattttccttgtaaagaaattgacatatatttcatatatatatacacatatatatatatacacatatatatacatatatatatatgatgttaaatttcctgccactcatgtggagtaatgatctgaaattaacagataatctgaagctaattatattcagactatttcaagtgcactgtttcagttgcccgggtggtccttacctcttgtccttgaaatccatgccatgctgaagcaaggcaatactgtgataaagtattttttttaatatttcaatggaatgctccaaatgatttataaaaatttcaaaataaaagatggcttgtagtaaattgtaaaatatgagtagaactgaaataacctgtttcattcttattctagattaaacaaacatatacatataaccatataaatgttatttttattgtctgagagtactcttaaatattagtataaagtgtcaaaagaattgactgaatataagtactgttaaaataatttgaaccctatgatattttaaaccaagaggcaaagatatcacctaaacttggtatttcttgataggttaggtgcaattaggcagtgacaatctgtattcaacaacatataagaggaaagagtaatatcagaattttgacacaaattaatgtgtcaacatattttacaatgattgtcaaaggaatttaagaattgtatttttaaagatttatttattatttttgtgggctaagacattgccattctattgatactaatgtctaacattaatgtttcttgttttcttttatttttaatattaataactataaaagcatttttcaaaggctatttgatccagcacacttcatatggatcttagtctttgaattaaatatttatataaatagattttattaatcaaattatttatttgtgtgccaacaattaattgtaactttatgatcatatctttgtttatgcttcttattttaaataattaagatgtatctgtgccttttaattagcatgacagtctgctttattaaaagaaaaaaactacaattaacatcattactagtatattttgcttagatttgagataatcaaatgatgctgtcttatttacagtcagtaattaagttcaattcaaactattttaccttgaatataaaatctaaatataataaactatactgtataatttactttaattcatgtcaaaacaattctttttatacacacacatgaaatattcttaatctgttctgtattgtttttctaaacaataaatacattctagatattgttgaaattaaattttgccagttgtaagacaaagacaacagataacttttgaaaatcaagcaaattactatggggtttcttgggtcttcattattccatttatatatattttttatttcgaataataaatcaacctttatttttggcaataagattatcactgacgaaaatatgtacagttcaagaagtagaaataatattttccattagttaatttaggaaatattggaatagcatattataattatttatgaggttcccaatgttgtttttcacagaaaataaggtaaacattcaacttaaatcccccatgaagttttttcatgctcatactcataatcattatcacataatgtgcttattcaacaaactttgtatctgggatatatttttaacaataagtttgttagcattatttatttatctttagagagaaaatatttgcatctgtttatttaccctttggaagcattaatacttagtcactcacattgaaattgcatatggatgtatcaacataggctaaaattaaattatggatgtcgcagaaatga

SEQ ID NO: 404988 - DNA, 2033 bp, Homo sapiens
agcgggctgccgccgcggcggccgctgctgctgctgcttctgccgccgctgccgccgccgctgcctggatatagtgcggcaagagcggagcttgcagcggactttgcgaggaggagcgcgcgggctgcgggcggctggggcaccgcgggagcggcggcggcggctctagcagaggcggccggggcagcgaaaggttctctctccagggctggacttaataactttgaaactgtccaccggtgtcacgtcctgaacatgagcctcctcctctccttctacctgctggggttgcttgtcagtagcgggcaagctcttcttcaagtgacaatttcacttagcaaagtagagcttagtgttggagaatctaaattcttcacatgtacagcgattggtgaacctgaaagtatagattggtataatcctcaaggagagaagataatttcaacacagagggtagtagtgcaaaaggaaggtgttaggtcacggttaaccatctacaatgcaaatatagaagatgcagggatatatcgttgtcaagcaacagatgccaaaggacaaacacaagaagctacagtagttttggaaatttaccaaaaactcactttcagagaagtggtatctccacaagaattcaaacaaggagaagatgcagaagtggtttgccgagttagcagttcacctgcacctgctgtcagctggttgtatcataatgaggaagtcaccactatttccgacaatcggttcgctatgttagcaaacaataacctgcagattctcaacatcaataaaagtgatgaaggtatatacagatgtgaaggaagagtggaggccaggggagaaattgacttccgtgatatcattgttattgttaatgtgccgccagcaatctcaatgcctcagaaatcttttaatgccacagcagagagaggagaagaaatgacattttcctgcagggcctcaggctctccagaacccgccatctcctggttcaggaatggcaagctcattgaagaaaatgagaagtacatattgaaagggagcaatacagaactcactgtcaggaacataatcaatagtgatggtggtccttatgtctgcagggccacaaataaggcaggagaagatgaaaagcaagctttcctccaagtctttgtacagcctcacataatacagcttaaaaatgaaactacatatgagaatggtcaagtcacactcgtatgtgatgcggaaggggagcctattccagaaatcacttggaaaagagctgtggatggcttcacgttcactgaaggcgataagagcctggacggccgtatcgaagtcaaagggcagcatggaagctcatcactgcatattaaagatgtgaagttgtcagattcagggagatatgactgtgaagctgcaagcagaattggagggcatcaaaagagcatgtaccttgatattgaatatgcccccaagtttatatcaaaccaaacaatttattactcttgggaaggaaatcctatcaatataagttgtgatgtgaaatcgaatccaccagcatcaattcactggagaagagataaattagtcttacctgctaaaaacacgaccaatttaaagacttatagtacaggaagaaagatgatattagagattgcacctacatctgacaatgactttggacgctataattgcacagccactaatcatataggaacaagatttcaagaatatattcttgctttggctgacgtgccatccagtccctatggagtgaagatcatagagctgtcgcagaccacggccaaggtttccttcaacaaaccggactcccatggaggtgtacctattcatcactatcaggtggatgtcaaagaagtagcgtcagaaatctggaaaattgtacgctcccatggagttcaaagtgagtcaacaatttcaaaatgtgttggttaattcaagctgatcttcagtatacctgtatgattggctttttcggtttcctccaacattttcttttcttttaataaaatggtgttgggaagata

SEQ ID NO: 404989 - DNA, 6872 bp, Homo sapiens
agcgggctgccgccgcggcggccgctgctgctgctgcttctgccgccgctgccgccgccgctgcctggatatagtgcggcaagagcggagcttgcagcggactttgcgaggaggagcgcgcgggctgcgggcggctggggcaccgcgggagcggcggcggcggctctagcagaggcggccggggcagcgaaaggttctctctccagggctggacttaataactttgaaactgtccaccggtgtcacgtcctgaacatgagcctcctcctctccttctacctgctggggttgcttgtcagtagcgggcaagctcttcttcaagtgacaatttcacttagcaaagtagagcttagtgttggagaatctaaattcttcacatgtacagcgattggtgaacctgaaagtatagattggtataatcctcaaggagagaagataatttcaacacagagggtagtagtgcaaaaggaaggtgttaggtcacggttaaccatctacaatgcaaatatagaagatgcagggatatatcgttgtcaagcaacagatgccaaaggacaaacacaagaagctacagtagttttggaaatttaccaaaaactcactttcagagaagtggtatctccacaagaattcaaacaaggagaagatgcagaagtggtttgccgagttagcagttcacctgcacctgctgtcagctggttgtatcataatgaggaagtcaccactatttccgacaatcggttcgctatgttagcaaacaataacctgcagattctcaacatcaataaaagtgatgaaggtatatacagatgtgaaggaagagtggaggccaggggagaaattgacttccgtgatatcattgttattgttaatgtgccgccagcaatctcaatgcctcagaaatcttttaatgccacagcagagagaggagaagaaatgacattttcctgcagggcctcaggctctccagaacccgccatctcctggttcaggaatggcaagctcattgaagaaaatgagaagtacatattgaaagggagcaatacagaactcactgtcaggaacataatcaatagtgatggtggtccttatgtctgcagggccacaaataaggcaggagaagatgaaaagcaagctttcctccaagtctttgtacagcctcacataatacagcttaaaaatgaaactacatatgagaatggtcaagtcacactcgtatgtgatgcggaaggggagcctattccagaaatcacttggaaaagagctgtggatggcttcacgttcactgaaggcgataagagcctggacggccgtatcgaagtcaaagggcagcatggaagctcatcactgcatattaaagatgtgaagttgtcagattcagggagatatgactgtgaagctgcaagcagaattggagggcatcaaaagagcatgtaccttgatattgaatatgcccccaagtttatatcaaaccaaacaatttattactcttgggaaggaaatcctatcaatataagttgtgatgtgaaatcgaatccaccagcatcaattcactggagaagagataaattagtcttacctgctaaaaacacgaccaatttaaagacttatagtacaggaagaaagatgatattagagattgcacctacatctgacaatgactttggacgctataattgcacagccactaatcatataggaacaagatttcaagaatatattcttgctttggctgacgtgccatccagtccctatggagtgaagatcatagagctgtcgcagaccacggccaaggtttccttcaacaaaccggactcccatggaggtgtacctattcatcactatcaggtggatgtcaaagaagtagcgtcagaaatctggaaaattgtacgctcccatggagttcaaacaatggttgttttgaacaacctggaaccaaatacaacttatgaaatcagggttgcagctgtaaatggaaagggacaaggagactacagtaaaatagaaatcttccaaacattaccagttcgtgaaccaagtcctccatccatacatggacagccaagcagtggaaagagctttaaactcagcatcaccaaacaggacgatggaggggcccctattttggaatacattgtgaaatatagaagtaaagataaggaagaccaatggctagagaaaaaagtgcaaggaaataaagaccacatcattttggagcatctccagtggaccatggggatgaagttcagattaccagctgccaatagattgggatattctgaaccgacagtttatgaattcagcatgccaccaaagcccaacattattaaagacacgctgtttaatggtcttgggcttggagcagtaattggcctgggagttgctgcactgctgctaattcttgtggtaacagacgtcagctgcttctttattcggcaatgtgggttgctgatgtgcatcactaggagaatgtgtggaaagaaaagtggctccagtggcaaaagtaaagaactcgaagaaggaaaagctgcatacctgaaagatggatcaaaagaaccaatagtggagatgagaacagaggatgaaagagttactaatcacgaagatgggagcccagtaaatgagccaaatgaaaccacaccactgacagaacctgaaaaattgcctttaaaggaagaagatgggaaagaagctctaaatccagaaactatagaaattaaagtttctaacgacatcattcaatcaaaagaagacgacagcaaagcataacaacaatattacaggggcttgaacaacactacgaagagtatttggattgcgtgaccctatgaccaaaactattccattgaccttaatttcttgggaaacttctagcttggaatagcttgtacacatatacatatgatcaaatactcctgcccatgatccattcccttttgttattgttgttgttgttgctgttgttgttaattttgttaagaatttcaatatcaagactgactggcaccaacactttggtattcaatttgattctatgactgaagtactggaatttattatgtggctaaagtgctctatttattaagaactatatttaataccaccaacaaatataggggttaaggaaaaaaaacgttgagctacatgtgtaagaaggccctgcatgtgtatgagtcctattctgggcaaatagattcttaaagtggctttcaacttcaagatgaaggagcttaataatggttactcattttatcaggggaatttcagggaacgtaggcgtcaaagagccagttatctttagcagatattaaaaattgaaaactttggagaactcatttcaagttatgattcagtgcattttcaacattgatttttgatagactgaagtgccagatcaaaattgttacccatttgaaagaatattagttgtatataaaattagattagaaagactttctaaatctctatctctttatatatgtcctattcattcacaatggattatacaaaaaaaagtgtattgcaagtgaaataatattgatttctgccctcagcttcaaataaagtaaattgaaatgggaacaatatcaatatggtgtcttgatatatttataaatatgtgattatcatttatttttaaaataatttatcaaaaaacaagtctttagtgttcaaatacttcaaatcatatcctcagatatatttttagcccatggttttatataatctttaagaactaattttaccactgttataggttcaccattaaatataattggctaataaaaattttaaggttgactaaattaagaagaaattatttaacattttaatgtgccataaaagagtaaatgataaataattaaatgccactatgtgttctattccggatgttctagctagaagtcattttaagattttgataaacaactttggttgaagaaattccttaagtattcaacacaaactttctaatatcttttgttagggttataccagaataaaatgcttctttacttccaagctatgcaagctcccagaggtaatagagtgacacatgatttaacttatatgtaaggtttaaaaaagtatttatcattataaacatacataccatttgggagcaggtttattaaccttgagagccaaaggtttccttaggccctgtaacattcagaacctttggtgtttcaggtggtattatagctcaaatagtgacaggacagggaatgcgttccaaaggaatattggagcaattttaacattgcagaaacctgctctgggtgtgtctctctgtagagataacctgatgattattaaatgtaaaattaaggcaactcatgaatatttttatttacaaagtgcttgaaactcagccaaggagagaaaactaagtacttttatataattcatcacttttctggctacagcaggacagaatatgaccatcttcgtttgaaggcaccaaatcgtcgcagtgtctttgccataagttgcagggttaaatgcggaaatctctccttgcgttcctgtctggcgtattctgaagaaaagaacagaattcttgtgcctacctaagaatttgagtagtgtctaaacaaacaaagcagttaggtcattttaactgacttgattatccaactggtctttgacagatttgactgtccatatttagtttatgtttgtctgatcatccagtttgctttattttgctgtgttttattttgttgtttgttttgttttgtaccagtgtactaaaactagtcaaaatacttgaattagtttgtttgtgcaaagtgtacaagcttagtaaagtgtccatgaagcaatagccatgaatgctaattatttctaaatagggccacatggttttaaactaatgatggtgaaagaaatacgatgactgagaaagtcatttcgcatgtttactattgttatattcgtgctttacttcaagagtgcagaaatcataataaataacaaactatttttgtgttttctcaatgtgacatttctgtttctctcatttattcggattttccttgtaaagaaattgacatatatttcatatatatatacacatatatatatatacacatatatatacatatatatatatgatgttaaatttcctgccactcatgtggagtaatgatctgaaattaacagataatctgaagctaattatattcagactatttcaagtgcactgtttcagttgcccgggtggtccttacctcttgtccttgaaatccatgccatgctgaagcaaggcaatactgtgataaagtattttttttaatatttcaatggaatgctccaaatgatttataaaaatttcaaaataaaagatggcttgtagtaaattgtaaaatatgagtagaactgaaataacctgtttcattcttattctagattaaacaaacatatacatataaccatataaatgttatttttattgtctgagagtactcttaaatattagtataaagtgtcaaaagaattgactgaatataagtactgttaaaataatttgaaccctatgatattttaaaccaagaggcaaagatatcacctaaacttggtatttcttgataggttaggtgcaattaggcagtgacaatctgtattcaacaacatataagaggaaagagtaatatcagaattttgacacaaattaatgtgtcaacatattttacaatgattgtcaaaggaatttaagaattgtatttttaaagatttatttattatttttgtgggctaagacattgccattctattgatactaatgtctaacattaatgtttcttgttttcttttatttttaatattaataactataaaagcatttttcaaaggctatttgatccagcacacttcatatggatcttagtctttgaattaaatatttatataaatagattttattaatcaaattatttatttgtgtgccaacaattaattgtaactttatgatcatatctttgtttatgcttcttattttaaataattaagatgtatctgtgccttttaattagcatgacagtctgctttattaaaagaaaaaaactacaattaacatcattactagtatattttgcttagatttgagataatcaaatgatgctgtcttatttacagtcagtaattaagttcaattcaaactattttaccttgaatataaaatctaaatataataaactatactgtataatttactttaattcatgtcaaaacaattctttttatacacacacatgaaatattcttaatctgttctgtattgtttttctaaacaataaatacattctagatattgttgaaattaaattttgccagttgtaagacaaagacaacagataacttttgaaaatcaagcaaattactatggggtttcttgggtcttcattattccatttatatatattttttatttcgaataataaatcaacctttatttttggcaataagattatcactgacgaaaatatgtacagttcaagaagtagaaataatattttccattagttaatttaggaaatattggaatagcatattataattatttatgaggttcccaatgttgtttttcacagaaaataaggtaaacattcaacttaaatcccccatgaagttttttcatgctcatactcataatcattatcacataatgtgcttattcaacaaactttgtatctgggatatatttttaacaataagtttgttagcattatttatttatctttagagagaaaatatttgcatctgtttatttaccctttggaagcattaatacttagtcactcacattgaaattgcatatggatgtatcaacataggctaaaattaaattatggatgtcgcagaaatga

SEQ ID NO: 404990 - DNA, 1540 bp, Homo sapiens
agcgggctgccgccgcggcggccgctgctgctgctgcttctgccgccgctgccgccgccgctgcctggatatagtgcggcaagagcggagcttgcagcggactttgcgaggaggagcgcgcgggctgcgggcggctggggcaccgcgggagcggcggcggcggctctagcagaggcggccggggcagcgaaaggttctctctccagggctggacttaataactttgaaactgtccaccggtgtcacgtcctgaacatgagcctcctcctctccttctacctgctggggttgcttgtcagtagcgggcaagctcttcttcaagtgacaatttcacttagcaaagtagagcttagtgttggagaatctaaattcttcacatgtacagcgattggtgaacctgaaagtatagattggtataatcctcaaggagagaagataatttcaacacagagggtagtagtgcaaaaggaaggtgttaggtcacggttaaccatctacaatgcaaatatagaagatgcagggatatatcgttgtcaagcaacagatgccaaaggacaaacacaagaagctacagtagttttggaaatttaccaaaaactcactttcagagaagtggtatctccacaagaattcaaacaaggagaagatgcagaagtggtttgccgagttagcagttcacctgcacctgctgtcagctggttgtatcataatgaggaagtcaccactatttccgacaatcggttcgctatgttagcaaacaataacctgcagattctcaacatcaataaaagtgatgaaggtatatacagatgtgaaggaagagtggaggccaggggagaaattgacttccgtgatatcattgttattgttaatgtgccgccagcaatctcaatgcctcagaaatcttttaatgccacagcagagagaggagaagaaatgacattttcctgcagggcctcaggctctccagaacccgccatctcctggttcaggaatggcaagctcattgaagaaaatgagaagtacatattgaaagggagcaatacagaactcactgtcaggaacataatcaatagtgatggtggtccttatgtctgcagggccacaaataaggcaggagaagatgaaaagcaagctttcctccaagtctttgtacagcctcacataatacagcttaaaaatgaaactacatatgagaatggtcaagtcacactcgtatgtgatgcggaaggggagcctattccagaaatcacttggaaaagagctgtggatggcttcacgttcactgaaggcgataagagcctggacggccgtatcgaagtcaaagggcagcatggaagctcatcactgcatattaaagatgtgaagttgtcagattcagggagatatgactgtgaagctgcaagcagaattggagggcatcaaaagagcatgtaccttgatattgaatgtaagttactttcctttgtattttcattaaaataactttgcatgctttgaaacatatgatttttcaataaagaccaaaatatatatgtag

SEQ ID NO: 404991 - DNA, 699 bp, Homo sapiens
ttcattttgaaccctgtatatcttagtgttccttcattaccacattttaactacttttgatataacagatatctttactgctttagggaagcaaatttaatttttatgttactgttctgagcatgttgttccttacatgcccactttcctaagtagaaatatattaacagctagaagaaatcttttggctttctgttttgtaagttagagtataccgtactgtatgcagaggattaggatgttaaaatatttatttccctgttaaatggcttaaatcatgaacaaactgaatatatagcattgctttttttaaaaagtgagtatcccagttaagtgacctaaggattataggactaaatgtagaaaaaaattcagctttagattagatgttttttcccttgtcacagataatgctgtatctaggtgaacagtcaaggaaatgagagggcattgttcttgtcttgccagattcatcctttgcaatcaaataaagtttgttttgtttttaaaattgtggtacaatatagataacataaaatttactctgttgaccttttttaaaaatatttttattatggtaaaatacagtcatttgttgcttaatgacaggaatatgttctgggaaatgcatcattaggtaattttgtcaagcaaacatcatagagtatacttacactaacctggacagtatagcctact

SEQ ID NO: 404992 - DNA, 317 bp, Homo sapiens
cattgagaccagcctgagcaacattgtgaaactccgtctctacaaagaatacaaaaattagccagatgtggtggcacatgcctgcagttccatctacttgggaggctgaggtgaaagtctcctttgagtttgggttgcagaagttgtagtgagctgagatcatacaactgcacttcagcctgagcaacaaagcaagaacctgtctcaaaaaaaaaaagaaaagaaatataattcatttttatatgttgatcttgtatcccgcaaccttactgaacccttttactggttttactgtttcttctaccactctttttact

SEQ ID NO: 404993 - DNA, 359 bp, Homo sapiens
taattttcctttctcccttcttctttccttccttcagactcttcctccatcttacccatgatttattatgtatctagatttttaaaaatcccactcagtatattcgcttagctttaaaaatgcgttcaaccttgactggcgtagataaggccagcaacatgcccagatgttttctggaatcagagggctgagggtcttctgaatgtttcaggaagggcaactgtagagaagcaaagagcccttaaatacttcagagaagtttgggtaatacacttccccacagcctgtatctcacagctgatagcactaatgtccttagcattcaggccctaagattcccaagagtgtcactttttact

SEQ ID NO: 404994 - DNA, 345 bp, Homo sapiens
agtgtttataaacatatatatgaatagataaatatatgactatacacatacatatatgtatatatgtaactttttgcaacatatatttagtttattcagttcaaaatacaatagaatattagtaaatatatttgtgcttttagtattttatttaagttctgttattttattttttatgactttaatgttgtataataaaagtatcaaatatagtcatattaaacaaacaaaaacccaggaaactatggtataagttggggttaatcaaaacgccatagtcactggtgaatattagctatttttctccctaaactaaaatatcatgaagaaccatctattactatt

SEQ ID NO: 404995 - DNA, 419 bp, Homo sapiens
aaaatgtgtagtatccacctggcaggactatttaaatgttaaatgaaataataatattctatattatgttatatataaaattatatatattctatattatattatataaaagttggttgtccaacataagcatctcctgctttaggaaaagaggaatataatattcatctaataaaatggaaagtcctaaataaagtatgtttactttgttagcttctctaataaaatctcaaatccagaataatatcttggtccatacatcaagtcggtgaaataataccatagaatcagaaaatagaaaatggtaaccagtgctccattagggaagaattctacatttgcgatcacagagtcgcttctaattaattggttttgactttagacatattgtttcactcttctggcctcagattctacat

SEQ ID NO: 404996 - DNA, 510 bp, Homo sapiens
aatctaatttcataaaattttaagtctgcagcaggctccagtttagtctccaaaagcacactccccctgcaaagaggaaactcaaagaagaaaagagagttgtctttctgcacaaggaacatgttgtctatacccaaaggtgttcaaggaacaccctgaatctacccaggtgctgaagctcctgctagagggatttggcttttaaaaatgtcataaccacctcatatggtttggctctgtgttcccacccaaatttcatctagaattgtaatccccatgtgttgagggaggacctgatgggaggtgattggatcaaggcagcagtttccctcatgctgttctcgtgatagtgagggagttctcatgagatctgatggttttaaaagcaggggttttccctgtgtgctctctctctcctgccaccatgtatgccgtactttgcttccccttcgccttctgccatgagtgtaagtttcctgaggcctccccagccatgcacaactgtgagtc

SEQ ID NO: 404997 - DNA, 442 bp, Homo sapiens
tttgggaggaggtagcctataagagtaaaggattttgtttaccacccactggagtccagtgagcagcacaacagagtgtgggagagaggtggccaccgtgggaagatgagtcactggggcctgggggtggagggaatgcagagcagtagcggaaactttactatgttccagacagcaggctagacgtggaggatacagagatgaataagacgaagataagccacccatttaggattcgtctacaccaaatcctggtggctgattggctggtttggctggtctgatccatgtacatcttgagagcttccgagagccagaggcaattgcagtaagacaggcacagggtatcactacagatttcggggtgtgtgggggagctaaaaaatgcactttttagctttattttctttcctctgattccttctgcaaagcaaaaaatgaa

SEQ ID NO: 404998 - DNA, 459 bp, Homo sapiens
tggccagccctttccctacaggaaaccccaacaccctggtgcatcctgtgaactccctgtttctatctccctcagcactgaacagtctgctttcccctggccatcagcttcttactgcctaggagctcactctggtctacgccaagggcaaatgtgtctgctaaagttaagggcgatttccaagcttcttcggcagagaccccagaattctagtaatgagggagacaggttatgccaagcctgcttctcccaggatgcactgggagcctgggaaccaggagggagggaggaggctcagctgaggagctcaggatttaattctatgcatcattaagtagtcctctgaaagtggtgtccccctatacatcatccatgcttagtaaacagcacgctgacattacattagtggctggaaatgaattttcttttttatagggaaattgagaatccgccaagaag

SEQ ID NO: 404999 - DNA, 442 bp, Homo sapiens
gatgtatacctggaaatggaattgctggtttatatggtaattatgtttaattttttaacttgcaactttttaaatgtgagagatataaaggaagagcagtgggtagagggaacatgagtggtagtagttattactatggtggtagtatggctgaaaagttctggtcgggcgcggtggctcacgcctgtaatcccagcactttggaaggccgaggcgggcagatcacgaggtcaggagatcgagaccatcctggctaacacggtgaaaccccgtctctactaaaaatacaaaaaattagccgggcgaggtggcgggcgcctgtagtcccagctactcgggaggctaaggcaggagaatggcgtgaaccccagggggcggagcctgcagtgagccgagattgcgccactgcactccagcctgggcgacagcgagactctgtctc

SEQ ID NO: 405000 - DNA, 466 bp, Homo sapiens
agttacatgagactaaatgaactcatgacattttatttgaatcattgctggttttgttttccagatttaaggaaaattttcttttttctcttagactacctattgcttacagcagcttggtagattactcctttataaacaaaatacaattactttttctccctacttgacccgtccagaattcagaagctattagtgactatccttttttcatggcaataaagttatttatgtaagttcaataagaatctgttctcttcgtaacagaacataattggaagcattggttttataaccaaggttttgactggaacgtcgtacttgagaatgtgtatagatcagatatgaccaagcgatgcagaatttttgttccttagttaagctaaatctggattcttctgccacgaccaggaaaaattaggcatgtggacactctgaagggtgaggacagtggaatttattgggc

SEQ ID NO: 405001 - DNA, 415 bp, Homo sapiens
gttacatagaaggtgtttctgtggaacgctgatagacatacacacatatttccatatgcttactttttgccatttaaataaaacaataaatttttgaaactcttcggtttggaagaagtttatttaaatcacccaaatggttgttggatttactaacccatatgcaattaagaaagaataagaagagaaaatggtgaatcaatttgagtcagtaaaatatatactacatatattttcattttcattaactatataaagcccaaatacttcaaatttgtttttacattaaaatagaattcttctgttcatcctgttttaaaatcagtcccattcaacagtatttgccagcatattaattagaggtttagtagaaagagaatgaattttagggaaaaacaaaacacggttttctggt

SEQ ID NO: 405002 - DNA, 256 bp, Homo sapiens
caagcacacaagataagctgacaagaggagcaagctaaagttcaagggcctgtgtgaaagagagatgcctgactaatgttttgtcaagataaagcagagggttggtgacagacaatagaggccaggacacttaagtaagaaggtctacctttcctgttttaaagtcatggttgcatctactttcataagaacttattgtgtaatgtttctgtcagtaacctgggaataaagagtggagattctcctgcactacaga

SEQ ID NO: 405003 - DNA, 298 bp, Homo sapiens
tacatgacatgcttttctgtcttctagtttctactgattcatcagaacggggcattgttctgtgatccttcctgcagtttcaaaacagatctacattccatagcttcctcatttcaaatggccaatttatcgctaacttcaaaaacgtgctctgtgtcactttttaaaacaaatcagcaagtcacatcttacatggatggcggcaggcaaaaagagagctcctccttgccttccgccatgattgtgaggcctccccagccatgtggaactgtataagtccattaaacctcttttgaaa

SEQ ID NO: 405004 - DNA, 798 bp, Homo sapiens
tttcactggcagctaatcagtagtcagttcccttgaacttataaagccttagttttacactttgttaggacgagtctttcagatttttcccttgatcttaggcagatccctcagtcctgggacacagtctctactcctagcatgaactgtttgtcaaagctcatgtcactgccctgtactggcaatgaagaataatcaaattctattccaaactgtaggcaaagacaacaactattaatctctactgatcaacttgactctcagccacaggtggaaaaccagtaataaaaaagggttgtctaaaggctttgagatctacccattctcctaaatatttcaaattttatttctggccagattggaccagaaggctgaatccttaggtggtatggctttgcccctatagacttccttgtattgagttgcatgttggcatctgccctcatcatatagtaaaggatgtgataagaagtcgtcagtggaaccatcctaatctcagttttatttttcataagaatgccagtgagcattccatcctacagggtcccctgtaggagaaggagccactggaagaatttctctcagattttagtgccagaaaaagctctgcttctcctgagcaactgataagtttctatctcattaatgtttggctgctgctaagctcagaagcaaagtcagtgtttaggaactcttgtaattttgagggctatcttttgctttaattccctttgtttatttaattatgtcatatttatttccatcagacccttaactgctttttctatagcaaagcca

SEQ ID NO: 405005 - DNA, 398 bp, Homo sapiens
gcagttccctgtttgcacagaaaggcatggaccagatctgtttgtatctatatagtcgctttctcaacagcagtctatgccaggggattccatcccattttctgtcaagctaaattagattttgattgttaagagtaaacatattttctctgcctagaatttacccctgagcatcttctgtataaagctaggtctctaagctctgagatataggggaacagaaaaaaattctgtctgaaacatccaagtgttaatatttattttttatttttgtttaaatcatgcacttagtttgcaagataacattttagatgctgacagtaccaaaagccaagtttctagtctcttaacagtctatggaaccttgttttttgattaaaagaatgttctacatggct

SEQ ID NO: 405006 - DNA, 181 bp, Homo sapiens
ggcctgcactgttagtcccagctacttgggaggctgagatgggaggatcgcttgagcccagttcaaggttgcagtgagctgtgaacagataaccagaacccacggtagacgtgtatgagtgtggcctggagtgtgcagagccgcggaggcagtgccgaggcaggcccttcctgtaaggcca

SEQ ID NO: 405007 - DNA, 887 bp, Homo sapiens
ggcacgaggccttttcacgcgcgtcgcgagctaacggactcggcggcggcggcggcggcggcctgcgccccacccgcaccccatctggaccgcatcgctgaatgtgcccggacctgcgccttctgggtctctgaaagaagatgaatttggctgagatttgtgataatgcaaagaaaggaagagaatatgcccttcttggaaattacgactcatcaatggtatattaccagggggtgatgcagcagattcagagacattgccagtcagtcagagatccagctatcaaaggcaaatggcaacaggttcggcaggaattattggaggaatatgaacaagttaaaagtattgtcagcactttagaaagttttaaaattgacaagcctccagatttccctgtgtcctgtcaagatgaaccatttagagatcctgctgtttggccaccccctgttcctgcagaacacagagctccacctcagatcaggcgtcccaatcgagaagtaagacctctgaggaaagaaatggcaggagtaggagcccggggacctgtaggccgagcacatcctatatcaaagagtgaaaagccttctacaagtagggacaaggactatagagcaagagggagagatgacaaggcaagatgctgtctttctgtaattcactcacttgaagcccaggacttttggtggatgttatgatttttgttggcttttcaagataccctggttttgacgtggaagagttagaaaaaagtctcattcaaagcctaagtagtctttgtattttgaaggccatgctgcaatgcaaatcacctcagaggcgtagtaaatatctatatacacatacatgtataaaaatatttagtgaaatggatcccttgtaagaaaaaa

SEQ ID NO: 405008 - DNA, 1680 bp, Homo sapiens
ggcacgaggccttttcacgcgcgtcgcgagctaacggactcggcggcggcggcggcggcggcctgcgccccacccgcaccccatctggaccgcatcgctgaatgtgcccggacctgcgccttctgggtctctgaaagaagatgaatttggctgagatttgtgataatgcaaagaaaggaagagaatatgcccttcttggaaattacgactcatcaatggtatattaccagggggtgatgcagcagattcagagacattgccagtcagtcagagatccagctatcaaaggcaaatggcaacaggttcggcaggaattattggaggaatatgaacaagttaaaagtattgtcagcactttagaaagttttaaaattgacaagcctccagatttccctgtgtcctgtcaagatgaaccatttagagatcctgctgtttggccaccccctgttcctgcagaacacagagctccacctcagatcaggcgtcccaatcgagaagtaagacctctgaggaaagaaatggcaggagtaggagcccggggacctgtaggccgagcacatcctatatcaaagagtgaaaagccttctacaagtagggacaaggactatagagcaagagggagagatgacaagggaaggaagaatatgcaagatggtgcaagtgatggtgaaatgccaaaatttgatggtgctggttatgataaggatctggtggaagcccttgaaagagacattgtatccaggaatcctagcattcattgggatgacatagcagatctggaagaagctaagaagttgctaagggaagctgttgttcttccaatgtggatgcctgactttttcaaagggattagaaggccatggaagggtgtactgatggttggacccccaggcactggtaaaactatgctagctaaagctgttgccactgaatgtggtacaacattcttcaacgtttcgtcttctacactgacatctaaatacagaggtgaatctgagaagttagttcgtctgttgtttgagatggctagattttatgcccctaccacgatcttcattgatgagatagattctatctgcagtcgaagaggaacctctgatgaacatgaggcaagtcgcagggtcaagtctgaactgctcattcagatggatggagttggaggagctttagaaaatgatgatccttccaaaatggttatggtattggctgctactaatttcccgtgggacattgatgaagctttgcgaagaaggttagaaaaaaggatatatatacctctcccaacagcaaaaggaagagctgagcttctgaagatcaaccttcgtgaggtcgaattagatcctgatattcaactggaagatatagccgagaagattgagggctattctggtgctgacatcactaatgtttgcagggatgcctctttaatggcaatgagacggcgtatcaatggcttaagtccagaagaaatccgtgcactttctaaagaggaacttcagatgcctgttaccaaaggagactttgaattggccctaaagaaaattgctaagtctgtctctgctgcagacttggagaagtatgaaaaatggatggttgaatttggatctgcttgaatttctgtcagctctttaatttctggtatttttgttgataaaatacgaagaaattcctgcaattttt

SEQ ID NO: 405009 - DNA, 2117 bp, Homo sapiens
ggcacgaggccttttcacgcgcgtcgcgagctaacggactcggcggcggcggcggcggcggcctgcgccccacccgcaccccatctggaccgcatcgctgaatgtgcccggacctgcgccttctgggtctctgaaagaagatgaatttggctgagatttgtgataatgcaaagaaaggaagagaatatgcccttcttggaaattacgactcatcaatggtatattaccagggggtgatgcagcagattcagagacattgccagtcagtcagagatccagctatcaaaggcaaatggcaacaggttcggcaggaattattggaggaatatgaacaagttaaaagtattgtcagcactttagaaagttttaaaattgacaagcctccagatttccctgtgtcctgtcaagatgaaccatttagagatcctgctgtttggccaccccctgttcctgcagaacacagagctccacctcagatcaggcgtcccaatcgagaagtaagacctctgaggaaagaaatggcaggagtaggagcccggggacctgtaggccgagcacatcctatatcaaagagtgaaaagccttctacaagtagggacaaggactatagagcaagagggagagatgacaagggaaggaagaatatgcaagatggtgcaagtgatggtgaaatgccaaaatttgatggtgctggttatgataaggatctggtggaagcccttgaaagagacattgtatccaggaatcctagcattcattgggatgacatagcagatctggaagaagctaagaagttgctaagggaagctgttgttcttccaatgtggatgcctgactttttcaaagggattagaaggccatggaagggtgtactgatggttggacccccaggcactggtaaaactatgctagctaaagctgttgccactgaatgtggtacaacattcttcaacgtttcgtcttctacactgacatctaaatacagaggtgaatctgagaagttagttcgtctgttgtttgagatggctagattttatgcccctaccacgatcttcattgatgagatagattctatctgcagtcgaagaggaacctctgatgaacatgaggcaagtcgcagggtcaagtctgaactgctcattcagatggatggagttggaggagctttagaaaatgatgatccttccaaaatggttatggtattggctgctactaatttcccgtgggacattgatgaagctttgcgaagaaggttagaaaaaaggatatatatacctctcccaacagcaaaaggaagagctgagcttctgaagatcaaccttcgtgaggtcgaattagatcctgatattcaactggaagatatagccgagaagattgagggctattctggtgctgacatcactaatgtttgcagggatgcctctttaatggcaatgagacggcgtatcaatggcttaagtccagaagaaatccgtgcactttctaaagaggaacttcagatgcctgttaccaaaggagactttgaattggccctaaagaaaattgctaagtctgtctctgctgcagacttggagaagtatgaaaaatggatggttgaatttggatctgcttgaatttctgtcagctctttaatttctggtatttttgttgataaaatacgaagaaattcctgcaatttttaaaaaacaagtttggaatttttttcagtggagtggttttcgcttaaaggaaaaaaaaatctaaaactgcgaagaatactaaatgtagttgagaaataattgatggcgagagtttgctagtctccctccccggctttgtgctggtattccacgtattcctgcattaatattgcacacccaaaccagtctatcagggaggctgaagcaagggcgcagtgtgatattttaggaatacagaagatttagaaatacccctatttctcatttgcagtttttttttccaattctgtgctctgtcaacatgagggacctatctatgtatgttgacttttaacatcaaaattggatttgtgtcaaacattcattgttaagagaagaatgacagtatattttggaggaaataatgaatttactaattaaacctttagaatttatgac

SEQ ID NO: 405010 - DNA, 2323 bp, Homo sapiens
aaactttgagcggaccgggacagaaaaaaaaatctctctttgtcttgagggggctgttgagtggtcgcggacctgggctctgtgcgttgggaaagggaagtggaggtgagcctcgggcttcccgccctgtagctgggcccgccccagttgcagcgctcagccccaccccggctgggccaccgccctgcacagtctcagggatgagcagccgcccaagctgcagggcctcgggtcttcggcgcctctgaccctcgcaggttgctgcctttcggtgcagaaccgtatgtatgtcacacattggatgtgagacctgagaaaccgtgttttaacaggtctctgaaagaagatgaatttggctgagatttgtgataatgcaaagaaaggaagagaatatgcccttcttggaaattacgactcatcaatggtatattaccagggggtgatgcagcagattcagagacattgccagtcagtcagagatccagctatcaaaggcaaatggcaacaggttcggcaggaattattggaggaatatgaacaagttaaaagtattgtcagcactttagaaagttttaaaattgacaagcctccagatttccctgtgtcctgtcaagatgaaccatttagagatcctgctgtttggccaccccctgttcctgcagaacacagagctccacctcagatcaggcgtcccaatcgagaagtaagacctctgaggaaagaaatggcaggagtaggagcccggggacctgtaggccgagcacatcctatatcaaagagtgaaaagccttctacaagtagggacaaggactatagagcaagagggagagatgacaagggaaggaagaatatgcaagatggtgcaagtgatggtgaaatgccaaaatttgatggtgctggttatgataaggatctggtggaagcccttgaaagagacattgtatccaggaatcctagcattcattgggatgacatagcagatctggaagaagctaagaagttgctaagggaagctgttgttcttccaatgtggatgcctgactttttcaaagggattagaaggccatggaagggtgtactgatggttggacccccaggcactggtaaaactatgctagctaaagctgttgccactgaatgtggtacaacattcttcaacgtttcgtcttctacactgacatctaaatacagaggtgaatctgagaagttagttcgtctgttgtttgagatggctagattttatgcccctaccacgatcttcattgatgagatagattctatctgcagtcgaagaggaacctctgatgaacatgaggcaagtcgcagggtcaagtctgaactgctcattcagatggatggagttggaggagctttagaaaatgatgatccttccaaaatggttatggtattggctgctactaatttcccgtgggacattgatgaagctttgcgaagaaggttagaaaaaaggatatatatacctctcccaacagcaaaaggaagagctgagcttctgaagatcaaccttcgtgaggtcgaattagatcctgatattcaactggaagatatagccgagaagattgagggctattctggtgctgacatcactaatgtttgcagggatgcctctttaatggcaatgagacggcgtatcaatggcttaagtccagaagaaatccgtgcactttctaaagaggaacttcagatgcctgttaccaaaggagactttgaattggccctaaagaaaattgctaagtctgtctctgctgcagacttggagaagtatgaaaaatggatggttgaatttggatctgcttgaatttctgtcagctctttaatttctggtatttttgttgataaaatacgaagaaattcctgcaatttttaaaaaacaagtttggaatttttttcagtggagtggttttcgcttaaaggaaaaaaaaatctaaaactgcgaagaatactaaatgtagttgagaaataattgatggcgagagtttgctagtctccctccccggctttgtgctggtattccacgtattcctgcattaatattgcacacccaaaccagtctatcagggaggctgaagcaagggcgcagtgtgatattttaggaatacagaagatttagaaatacccctatttctcatttgcagtttttttttccaattctgtgctctgtcaacatgagggacctatctatgtatgttgacttttaacatcaaaattggatttgtgtcaaacattcattgttaagagaagaatgacagtatattttggaggaaataatgaatttactaattaaacctttagaatttatgac

SEQ ID NO: 405011 - DNA, 652 bp, Homo sapiens
gcagtgtcctgtaagattcacattcagtgtgtccacttccctgcaacaccaggaatttctcattttccccacttttaaaataattttcacccctctttgaaaatttaatgtaagatagaaatggaaaaatgcctaagcagagttctttctgaattttctgtccatctagaaacagaaattgttcttagcatgtgaaagggaaaaataatctacatactttaatttcatggtattactttcagtcatagattgggaacccttgaacttcttattatgtcatcaaattgaacttctgaactttttgtgagagcctataaacctgaaagtgaaagctgcatgaaattgttttccgaggcctccctcagcgtctgcgtagtagtagcgggctcttgcttacagaacaacagtgcaatggcatgacaatatcatgtaaaatgtacagttctaaaagtgtttcccggggctttcagtaagatactgattattattagttttttatttttttattttttttttttttggttagcctcatttttctgtctttaaaagttagaatataatctatccttttgtaatttggcagaacacatttgggaattgcataaatcgattcagaatgaaatccataaagggctttgtgctcctcagagat

SEQ ID NO: 405012 - DNA, 1599 bp, Homo sapiens
tttcctccctgcaggtagtgccagcagggcaccaggataagcgttctggtggtgctttctgcccctgtctggggaaggctgctgggcagctcattctgtgactgtagctccagatgagtgctccctggcagcagccctgctccctgccttccctgcttctgatcgtcttttctttgggttggctcaggatgccgtgaggatggagagagtggacggatgtctcaaaagtcagctctaaagtcggagtcagaacaggggctgccgatgctctgtctcccagtctacctggagtgattcaacatagaaatcaataaaacaaatgccaccatggctgagtgagacctttcatttttcttcccaggtgttggagaaggcttctggtgaaggatttggcaaaaccgccgagggtccttcctggtgctgctcctgagggaatgcttccgagacctgagctggctggcactcatccatagcgtccgtggggaggcggggctgctggtgacgagtatcgtcccgaagaccccgtttttctgggccatgcacgtcactgaggctctgcaccagaacatgcaggctctgtttagcaccctggctcaggcggaggagcagcagccctacctggagggctccaccgttatgcgcgggactcgctgtctggcagagtaccacctgggggattatggacacgcctggaacaggtgttgggtgctggacagggtggacacctgggctgtggtcatgttcattgattttggacagttggccaccatccctgtgcagtctctgcgcagcctagacagcgacgacttctggaccatcccacccctgactcagccattcatgctggagaaagacattttgagttcgtatgaggttgtccatcgaatcctcaaagggaaaatcactggtgctttgaactcggcggtaactgctcctgcatctaacttggctgttgtccctccactcctgcccttggggtgtctgcagcaggctgctgcctagggcctggacacagtatttacctggcattcttttagatcaaacgaactggttatctgaggggttgggtgaactggctcgggtgggccttccttcccaccaaggctttgtctttctcttccagttgcacatcctaaagtttgaagagtctaaataacggggcttccctcagcatgttccctctcctgtttgccacggatccagaggccacctgccctgtcttctcgtacccctttcactcttgaggcctgggaggtgaaaaaggccagactgtgcccaggattgattcaattttgcttttactcccagcttccctctcaaaagagagtgaagtctcatttgtcatgtgtcttcagttccccaacttggcatgaacatttgaaccaaacataggaaactaccattaggttgaaagcctgaggcagctgggatggtctttcttgtgtctcttctttgcaccccagagcatgatataagtggtcctaacagattctggataatggagaagccctctgctggttttcctggcattccatgtagaataggtagagaatatttaaccaatgagcaaataaatgttggcatgtttcatgaaaaaaa

SEQ ID NO: 405013 - DNA, 1257 bp, Homo sapiens
tttcctccctgcaggtagtgccagcagggcaccaggataagcgttctggtggtgctttctgcccctgtctggggaaggctgctgggcagctcattctgtgactgtagctccagatgagtgctccctggcagcagccctgctccctgccttccctgcttctgatcgtcttttctttgggttggctcaggatgccgtgaggatggagagagtggacggatgtctcaaaagtcagctctaaagtcggagtcagaacaggggctgccgatgctctgtctcccagtctacctggagtgattcaacatagaaatcaataaaacaaatgccaccatggctgagtgagacctttcatttttcttcccaggtgttggagaaggcttctggtgaaggatttggcaaaaccgccgagggtccttcctggtgctgctcctgagggaatgcttccgagacctgagctggctggcactcatccatagcgtccgtggggaggcggggctgctggtgacgagtatcgtcccgaagaccccgtttttctgggccatgcacgtcactgaggctctgcaccagaacatgcaggctctgtttagcaccctggctcaggcggaggagcagcagccctacctggagggctccaccgttatgcgcgggactcgctgtctggcagagtaccacctgggggattatggacacgcctggaacaggtgttgggtgctggacagggtggacacctgggctgtggtcatgttcattgattttggacagttggccaccatccctgtgcagtctctgcgcagcctagacagcgacgacttctggaccatcccacccctgactcagccattcatgctggagaaagacattttgagttcgtatgaggttgtccatcgaatcctcaaagggaaaatcactggtgctttgaactcggcggtaactgctcctgcatctaacttggctgttgtccctccactcctgcccttggggtgtctgcagcaggctgctgcctagggcctggacacagtatttacttggcatgaacatttgaaccaaacataggaaactaccattaggttgaaagcctgaggcagctgggatggtctttcttgtgtctcttctttgcaccccagagcatgatataagtggtcctaacagattctggataatggagaagccctctgctggttttcctggcattccatgtagaataggtagagaatatttaaccaatgagcaaataaatgttggcatgtttcatgaaaaaaa

SEQ ID NO: 405014 - DNA, 1278 bp, Homo sapiens
tttcctccctgcaggtagtgccagcagggcaccaggataagcgttctggtggtgctttctgcccctgtctggggaaggctgctgggcagctcattctgtgactgtagctccagatgagtgctccctggcagcagccctgctccctgccttccctgcttctgatcgtcttttctttgggttggctcaggatgccgtgaggatggagagagtggacggatgtctcaaaagtcagctctaaagtcggagtcagaacaggggctgccgatgctctgtctcccagtctacctggagtgattcaacatagaaatcaataaaacaaatgccaccatggctgagtgagacctttcatttttcttcccaggtgttggagaaggcttctggtgaaggatttggcaaaaccgccgagggtccttcctggtgctgctcctgagggaatgcttccgagacctgagctggctggcactcatccatagcgtccgtggggaggcggggctgctggtgacgagtatcgtcccgaagaccccgtttttctgggccatgcacgtcactgaggctctgcaccagaacatgcaggctctgtttagcaccctggctcaggcggaggagcagcagccctacctggagggctccaccgttatgcgcgggactcgctgtctggcagagtaccacctgggggattatggacacgcctggaacaggtgttgggtgctggacagggtggacacctgggctgtggtcatgttcattgattttggacagttggccaccatccctgtgcagtctctgcgcagcctagacagcgacgacttctggaccatcccacccctgactcagccattcatgctggagaaagacattttgagttcgtatgaggttgtccatcgaatcctcaaagggaaaatcactggtgctttgaactcggcggcctgggaggtgaaaaaggccagactgtgcccaggattgattcaattttgcttttactcccagcttccctctcaaaagagagtgaagtctcatttgtcatgtgtcttcagttccccaacttggcatgaacatttgaaccaaacataggaaactaccattaggttgaaagcctgaggcagctgggatggtctttcttgtgtctcttctttgcaccccagagcatgatataagtggtcctaacagattctggataatggagaagccctctgctggttttcctggcattccatgtagaataggtagagaatatttaaccaatgagcaaataaatgttggcatgtttcatgaaaaaaa

SEQ ID NO: 405015 - DNA, 389 bp, Homo sapiens
atggggagtggggggaggaaagctttaatctgtggggagaagagcaaaaatgccatcacacttaggacatttgttaaagcccactgcggctggggagaagagaacaagaaataaacctggacccctaagggaagagcaggaatacgtgcagagttcagaatatcactgggggtagggtaggataactgataaggccacactcccaagatacagggacacagtgactgcctaagactgagatctgaacaaaacaacagagaaccccctgccccctcagtccccactacctggctaaacagcactgagtcacaagcagcatgcaagagacagacctctctgaggcacagaacaaagggaagacttgaggctgaggatagagcaatcattga

SEQ ID NO: 405016 - DNA, 755 bp, Homo sapiens
  misc_feature (740)..(741): n is a, c, g, or t
tgtctttccttctactgcacactgagctcctgaaggcactggggcttgctcccatttgtaccctggagcacacagtaggtgcttactaagtgactgtggagcagaacttctaatatttttgaaacacagatttggaaacatcttcccagaaaacagactacaacaaatcatttccctggtatgaaggaatgaagttttttgtttctttcatagtcctaaaaaaatcccccaagagctcaccagcatgaaagcactagctctgaatatgatatggaggaacaatgatttgaagaccttcgaaaggcaagcaacttgacacggggcatctttctagatcattgtttggaagagaaccatcaggacgatcccaggggtcctgtgaaacgctgttggcctgggcaaggagggaactggtgctcatcactggccctcttcagaaacaatctgctccgtccaagtgcaatatgagtatttccagctgaccatggggaaacttgttttctagtttatcccagctacattatcaagaaaatagtcaatggagtcaacaaatgcaaacctctggaaaacatttcagagactggcttgttgctacaacaagaacggtgatatcataatcaccattgtggagcaggtgccaggtagcattgctaacctcttcagaataattgacatttttctaacatgcagagtggccataacaaccacttcagctacacccccttctgtcgtcttgtcgnngcggccgcgaattt

SEQ ID NO: 405017 - DNA, 436 bp, Homo sapiens
agaaatggagtctccctatgttgcccaggctggtcttgaactcttggcctcaagtgattctcccacctcggcctcccaaagtgctgggattacaggtgtcagccacagtgcccagcctcttttggcttttttgaatgatatgacacatctccaaaacatagcacagggtggatccaagagctcctggggtaagagctgcctggacccacaggtccactctcatgggctctgattagagctgcactgccccattccctcccaataccaggagccctcatttcagcctcagctcccccaactttgacacagtattttactcaaggtctctgttatgaattgaattgcgccccccaagaagtccaaaaagttgtgttgaagtcctagccctggccccaacctatgaatatagcctcttgaaagtcgaatctttgcggat

SEQ ID NO: 405018 - DNA, 359 bp, Homo sapiens
ctcctcgggccacctcatcactccctgcccatgtgcctgtaacccccagcccagcccagggtagttgggggtttccacgacagacaggacgctgcccctgccgccagcctgcttcctccctggcccctgccagctgagggctggagcacagtccccccacccccgccagcaccccacaaggctcagatggggccgtgggccgtgcgacttgtcggtctgtttgccatggtcctgggtgggtggcagggatcaagttctaagcttgggagcagaggggaaggcaggtggtggcatagccctgggagcttcaattgtgtgtgtttgtacattaaataataacaacaaaaaacccatccttg

SEQ ID NO: 405019 - DNA, 380 bp, Homo sapiens
ggaaatttctgagacttgacatctaggttttttcttctgtggggtttgagctgtcttccttccttagcccaaagaatctttttcctgcactttcttaaagcagttttgggtcattccagaagggttcagagaaggtgtcttcctggtggaagacagttttacttcattcaaggtttttgcctggcaccacagctccaggacctttctgcctgatgatgatttttttttttttttttgagacagtcttgccctgtcgcccaggctggagtgcagtagtgtgatctcagctcactgcaacctccgcctcccaggagaatcgcttgaacccaggaggtggaggttgcagtgagtcgagatcgtgccactgcgctccagcctgg

SEQ ID NO: 405020 - DNA, 343 bp, Homo sapiens
ggaaatttctgagacttgacatctaggttttttcttctgtggggtttgagctgtcttccttccttagcccaaagaatctttttcctgcactttcttaaagcagttttgggtcattccagaagggttcagagaaggtgtcttcctggtggaagacagttttacttcattcaaggtttttgcctggcaccacagctccaggacctttctgcctgatgatgattttttttttttttttttttgaaacagcctgggtgacagagtgagtcttggtctctttaaaaaatagaagcttctcaggggcgggtgcggtggctcacgcctgtagtctcagcacttggggagg

SEQ ID NO: 405021 - DNA, 225 bp, Homo sapiens
tgcggccatcccttttgttccctgctgtgactgactggcaggaacctgggcttgtcaagtcagtctgtagtgcacgccgttagattggttgtcattggccaagccagctccgggcaccctgaggttccctcacagcgaatccaccgaagagcgctcccatccacagccggctctttgaatacttaaagaaatgtaggaaaagcaaaactcacaagacaatccttc

SEQ ID NO: 405022 - DNA, 429 bp, Homo sapiens
agtggtgtgatcttggctcattgcaagctccgcctcctggattcaagccattcttccacctcagcctcccaagtagctgggactacaggcatttgccaccatgcctggctaatttttgtgtgtgtgtgtatttttagtagagatggggtttcaccatattgaccaggctggtcttgaactcctgacctcaggtgatccacccacctcggcctcccaaagtgctgggattacaagtgtgagccaccatgcccggccagtttctaggtcctcctccatcctaggagtctacctttaaatccaggtcagtctattggagtcccttgaaaatggagaagtgaacaaaggttgatcttgactgacttcttccatggaacctccagcatcttgtgctctcttccttggtactcttgcttgcccttctgtgtcctc

SEQ ID NO: 405023 - DNA, 635 bp, Homo sapiens
tgggtcttttgtaacctgaatggtggtagattccaggacagttcagtaggagcccatcctcaaaaggaaaataacagaacttcctgctaatctggtattggggctgagcaattactgcacactaatgagattgaccataattgcatcctgagtttgaggaggaggtcatgctactaaaatgagataaaatcagctccaacgacaaacatcatctctgggggtttccagattctcacttttcatttaatccccagccttagtggaaagcaagagtcggagtcggcattctgggcagggaggcaggtgaggcaggtacacatctcctcttctccccaacgccccatgtttctatttctgaataaaatgaaccatcatggtgctaaggtaaagctaaactagctgagccacctcctgaagaggtcattgcttttgtttttatttaatgagatttctttcccttctgctaccagcatccctattcctttggaaaactgcttcttcataataacataaaggttttggattttttgttttgttttttgggtagcaaaatctgtataacatgaaattttctattttcaccattttaagtgtacaattcagtggcataaattacctttagagtgctgtgcaac

SEQ ID NO: 405024 - DNA, 637 bp, Homo sapiens
  misc_feature (104)..(104): n is a, c, g, or t
tgggaccacaatttaaaatggattaatgttttctcttatgagatggatggacagaaggatctataaacccatccggtttcacctcaaaggtctggaggaatttntgctatacgcgggcattattttaatgaaattggccagtatgacaaggatatggatttttggggaagagaaaatttggaactttcactaaggatctggatgtgtggaggccaactctttataatcccctgctctcgagtaggacatatcagtaagaaacaaactggaaaaccttctacaatcatcagtgctatgacacataactacctaagactggtgcacgtttggctggatgaatataaggagcagttttttcttcgaaagcctggtctgaaatatgtcacctacggaaatattcgcgagcgtgttgagttaaggaaacgactgggttgcaagtcatttcagtggtatttggataatgtcttcccagagttggaggcatctgtgaacagcctgtgaaaggaaaacaaatcactttcattaataaagggttaaaagtctcctagtcattcaacatagtgtcacaagagtgtaagtttggaacatcgtggaattacgtgaaatgcaattaaaaaaatatgaccagacgtgagtg

SEQ ID NO: 405025 - DNA, 345 bp, Homo sapiens
gggaaggctttccagatattgaaggagacttgggtgttgtgatctaaatttttggttactgcaaccatatctgcattagaggtaccacctttgcggttttggataagatccagaagaattctctgtattaccagagaattcttgttcttttccattactttctcccctaaaatggagtctctccaagttgcagtccttgtgatctagactgcatcaaatctgtgctgagctgcctggagctggagaaggggtggaacacaagcaccactgtggtcaccagctctgggaatgtagtaggtcagacctgaagccagcacagcactgggtcttgtccaaggcccactg

SEQ ID NO: 405026 - DNA, 460 bp, Homo sapiens
cggcagagtcgttctccccccaccatccctccttgcctccactcccctcggccttctggatccccgtgggtttggagaggccgatgcttgtggctcttaccaacatcaatttgcagtctccaggatgcaacttcaccctatgctgcgttcataaattaatctcctgggattagattctgtgttttagtaacactcctgaggcattgtatttacacattaataataaaagaaaaaaagtgagacaagttctgacaactttcaataacattcagaaataaagtgcgaggcacggaagtgtccaaagttaattaaaagcatttggtgctgacgggggctgggggtgttgcctgcctagctctgacaggtgctgtttctgaaatgcaattttcctgtctataatgtacctgatgcctgcagaaaaggagaaaccgaaataaactgaactggcagcatgagcttg

SEQ ID NO: 405027 - DNA, 402 bp, Homo sapiens
gtcagattgcttggttgggattgtcacagaccatgtgataatgggattatattgcatatcacagatgcgctggaccctcaagtgtgctggggaactctggttaaagaatagaagtgatccctttgttcatattcactatgctggatgcccttttgagatccctgcaggacgctaaccctctgactgcggcagccttgccctttgatctgaagcttttatcatacattgtcctgctcaggggatttgggtggggcgttactcctatatatcatcacaagaaagggattctctggagactaaatgcaaactggaatatcccctggaggctgtccccctgattgggaaatatgaagagactaggggtgctcagtgtttaaaataaaacttcagagagtagagtct

SEQ ID NO: 405028 - DNA, 289 bp, Homo sapiens
ggctgggactatctcttggctattacccagcactctactttcaaaacatggctctcttatgtcccatttcctctaacttactttcataatgaatagcaacttaatcccctaacactttactcatacatcaattatccaggaatatcttcattttaaacaagaatccccctacttctcctacatctccacatcctcagcaaaggaaccaaagtcgtaatccagaagaagagtttgaaaatggggacgatcttgatttctttcccattgatttccttgaaggcaaatccca

SEQ ID NO: 405029 - DNA, 279 bp, Homo sapiens
agcacatgctacaggcatagctctggctgaggtgcaggccagcagcaacagctccgatgcttcaacccctagcccagggaacttccatatcccgagggtgcacgcctaaaataaaaaacaggcacagggtgacaacagtcacaaaagaaacacacagaagaggagcttcctcttagcccagcgatgaccagctagaaaataaaatgggggaaaatatcccactctcggtagtggccacagagcaccggattcctagacactgaatgagtcatctgcagg

SEQ ID NO: 405030 - DNA, 321 bp, Homo sapiens
atcctcgatcgggaccgaaaaggccctgaacttgtgcagtgacttgccattgagtccgggaggttctggagacctgggtgacggaagaacgcccaaggccgactgctgccctcagttatcggggctccacatggaccaaacccagctggcagtcagagggcaagagcatctcgatgcagcgcatacaggccaattccagggtgcagtgcagcatggaaaaggagaaatgtacctgaagaggcaaatgaaagatatacagcgtcacaggcaatcttgcttctactaccataaaaatagtttacgtttcttagacacttagtc

SEQ ID NO: 405031 - DNA, 342 bp, Homo sapiens
gtgtcaaactcctgacctcaaatgatccacctgcctcagcctcccaaagtgctgggattacatatatgacccaccacacccagccaagagagggttttagaggtaggaacagcagctgcatgatcttcagcagattcagtagagagggaagtgagctgtgggagaggaaggaggatggggggaatggcaagaaaaggagcaccctgcttagaaagggaacggagctgggtgtggtggctcacgcctgtaatccagcactttgggaggccgaggcagtaggatcacttgagcccaggagtttgagaccagccacataacaagactgcatctctatttaaaaaa

SEQ ID NO: 405032 - DNA, 1194 bp, Homo sapiens
cagtttggtgttcgggaggtcacagctgcccaggttgcaagggttttgggaatgatggctcgaactcattcaggattaacagatggcattccattacagagtatttctgctccgggcagtgggatctggagtgatgggaaagataaaagtgatggagcacaggcacacacatggaatgtagaagtcttgattgacgttcttaaagaactgaatccaagtttgaatttcaaggaagtaacttatgaactggaccatcctggatttcaaattcgtgacagtaaaggacttcataatgtggtttatggcattcagaggggtttgggtatggaagtgttcccagtagacctcatatatagaccttggaaacatgctgaaggccagctctccttcattcaacattcccttataaatccagagatcttctgttttgctgactatccctgtcatactgttgccactgatattctgaaagcaccaccagaggatgacaatcgagaaattgccacatggaagagcttggatttgattgaatctctgctgaggcttgcagaggttgggcagtatgagcaagtcaaacagctcttcagcttccctatcaaacactgtccagacatgctggtattggccttactacaaattaacacctcttggcataccttgcgccatgaacttatctccactctgatgccaattttccttggaaaccatcctaactcagctattattttgcactatgcatggcatgggcagggacagtctccctcaattcgccaacttatcatgcatgcaatggcagaatggtacatgagaggggagcagtatgatcaggccaaattgtctcgaatacttgatgtggcccaggacttgaaggccttgtcaatgctgctaaatggtactccatttgcctttgttattgaccttgctgcacttgcttcacgtcgtgaatacctcaaacttgataagtggctcacagataaaattcgagagcatggggagccttttatccaggcgtgtatgacttttttaaagagacggtgtccttctattttgggcggacttgccccagaaaaagaccagcccaaaagtgctcaacttcctccagaaactttggcgacaatgttggcctgtctgcaagcattaatgcaggagtgtttttcacggagctaacagaaaacatcttccactgtgtaagtc

SEQ ID NO: 405033 - DNA, 1046 bp, Homo sapiens
gttctgtcttttaaatttattttttgccattgatttgatagagaaatacagcatttgttctctagtctaccccatgttattttcttacctgttttctcatggtgtttacttcattctctatccccatggttttcatgggctgaggatagagttagatcttcaggctcagttaaagtcaaccagtttcaacctcttggggcaaaaataattcttaaagagagtgctgtggacttcaaacttctaatattaaaacatgacaccaacttggttttgtgcttacaagctggtatcacttattttgaaaattaatctgtatacttggattttcattgataaagcatgtttcttcctttctcgttaggaagagcttggatttgattgaatctctgctgaggcttgcagaggttgggcagtatgagcaagtcaaacagctcttcagcttccctatcaaacactgtccagacatgctggtattggccttactacaaattaacacctcttggcataccttgcgccatgaacttatctccactctgatgccaattttccttggaaaccatcctaactcagctattattttgcactatgcatggcatgggcagggacagtctccctcaattcgccaacttatcatgcatgcaatggcagaatggtacatgagaggggagcagtatgatcaggccaaattgtctcgaatacttgatgtggcccaggacttgaaggccttgtcaatgctgctaaatggtactccatttgcctttgttattgaccttgctgcacttgcttcacgtcgtgaatacctcaaacttgataagtggctcacagataaaattcgagagcatggggagccttttatccaggcgtgtatgacttttttaaagagacggtgtccttctattttgggcggacttgccccagaaaaagaccagcccaaaagtgctcaacttcctccagaaactttggcgacaatgttggcctgtctgcaagcattaatgcaggagtgtttttcacggagctaacagaaaacatcttccactgtgtaagtc

SEQ ID NO: 405034 - DNA, 436 bp, Homo sapiens
ggcaaaaataattcttaaagagagtgctgtggacttcaaacttctaatattaaaacatgacaccaacttggttttgtgcttacaagctggtatcacttattttgaaaattaatctgtatacttggattttcattgataaagcatgtttcttcctttctcgttaggaagagcttggatttgattgaatctctgctgaggcttgcagaggttgggcagtatgagcaagtcaaacagctcttcagcttccctatcaaacactgtccagacatgctggtattggccttactacaaattaacacctcttggcataccttgcgccatgaacttatctccactctgatgccaattttccttggaaaccatcctaactcagctattattttgcactatgcatggcatgggcaggtaagatgtgaccgtgtgcttaccatttttt

SEQ ID NO: 405035 - DNA, 752 bp, Homo sapiens
ttcttttatagtcacactgcatgtggactaaaataattttttttaaagagaccggggtctcgccatgttgcccaggctggtctcaaactcccgagctcaagtgatctaccagccttggcctcccaaagtgctgggattataggtgtgagccgctgcgcttggctaaaataaatattttaaaatttaacacgattattattttgaaattggaactctaaaagacttttcaaaattcaaaatgatcaggaatgttaaaaacaatgaaaaaaagcacccctaaacctgccctagattccccaggggagagtcaaagatgttttgctttgtatcagcactattgaaataaacatattgtcacctaaaaggaactatttgaagaggactgcacttcactggatgtgtatatcctggtgagttttttattaatgtttattgttttttaaaaaatgtgttaaaatggctgggtgcagtggcttacacctgtaatcctaacacttcgggaggccaaggcaggcggattacttgaggtcaggagttggaaaccatggtcaggagttggccaacatggtgaaaccccatctctactaaaaatacagaaaagttagccgggcatggtggtgcacgcctgtgaccccagctactcaggaggctgaggcaggagaatcgcttgaacctgggaggcagaggttgtggtgagtcaagatcgcaccactgcactccagccttgggctacagagcaagactccaccctc

SEQ ID NO: 405036 - DNA, 899 bp, Homo sapiens
atcatcgcagccattagagggaaaagttgcggcgccgcgagcccggcgaagtcctcagcccgccccgcttgcccactccccacttcccgagccggctccgtgtttagggagggcagtgatcacgcaagccggagcggcgggctgacgttggacgagctgccaggtagctgaaagcaggcagccaggcagccgagacacttcccagcgattccagcctgggctccgcaggaagcctcgctgaatcccagccagctggttctaaccttccagaatcgcaatcccttctccccacagccagccctcgccgagcaagcagcaggatgtttgcagtgtcgcgcccagggctctgagactgagcctgccatccactcgcacgcctttctttcagggcttttcggctgttggctacactgatgtgacccccctccctttttggaatgatggggatctttttggtgtatgttggatttgttttcttttccgttttatatgtacaacaagggctttcttctcaagcaaaatttaccgagtttccgcggaacgtgacggcgaccgaggggcagaatgtggagatgtcctgcgccttccagagcggctccgcctcggtgtatctggagatccaatggtggttcctgcgggggccggaggacctggatcccggggccgagggggccggcgcgcaggtggagctcttgcccgacagagacccggacagcgacgggaccaagatcagcgtgagtgcggggcgcgccaagggccgcgggcccaggctcgggacgcacagcccttccctgtccccgagaaggcggcttgccagcgctgcaggacagccggacagccgggtgccccttgcttgcctcattagatacatacaaatggaagcacatttagagtcccta

SEQ ID NO: 405037 - DNA, 3031 bp, Homo sapiens
atcatcgcagccattagagggaaaagttgcggcgccgcgagcccggcgaagtcctcagcccgccccgcttgcccactccccacttcccgagccggctccgtgtttagggagggcagtgatcacgcaagccggagcggcgggctgacgttggacgagctgccaggtagctgaaagcaggcagccaggcagccgagacacttcccagcgattccagcctgggctccgcaggaagcctcgctgaatcccagccagctggttctaaccttccagaatcgcaatcccttctccccacagccagccctcgccgagcaagcagcaggatgtttgcagtgtcgcgcccagggctctgagactgagcctgccatccactcgcacgcctttctttcagggcttttcggctgttggctacactgatgtgacccccctccctttttggaatgatggggatctttttggtgtatgttggatttgttttcttttccgttttatatgtacaacaagggctttcttctcaagcaaaatttaccgagtttccgcggaacgtgacggcgaccgaggggcagaatgtggagatgtcctgcgccttccagagcggctccgcctcggtgtatctggagatccaatggtggttcctgcgggggccggaggacctggatcccggggccgagggggccggcgcgcaggtggagctcttgcccgacagagacccggacagcgacgggaccaagatcagcacagtgaaagtccaaggcaatgacatctcccacaagcttcagatttccaaagtgaggaaaaaggatgaaggcttatatgagtgcagggtgactgatgccaactacggggagcttcaggaacacaaggcccaggcctatctgaaagtcaatgccaacagccatgcccgcagaatgcaggccttcgaagcctcgcccatgtggctgcaggatatgaagccccgcaagaacgtctccgcagccatccccagcagcatccatggctctgccaaccaacgaacgcactccacctccagccctcaagtggtagccaaaatccccaaacaaagtccacaatcagcaaagagcaaatcgcctgtaaaatctacggagcggacagcaaagttgaccctaaactccaagcaccaccctgcacccactgtactctaattcactacacaaggagcgcctgcttccggaagcataaatgaagaggctatcacatgctttgttgatcatattttctttggcaaaacactgatcttttattttaagagaattaacgtgaagtgatagaacgttttctaatagcaagatctattttttcccttttctttcggcgactaaaatcatctcactgactgctcaagggttggcctgaatgtcatcaggatagggaatatttactatggataccactaatttcctactaaaggacccagcatcttcaggaagcaaacagagatcaaaaggctacagaacagaagctatcatcagacaaaaccccctttttaggggaagaacaaaactatcaacactgcaagtcaacaaggaggacattactttaaggaataacatgagaaagaaatttttttattttcccctttttttcttggatttttcttctttttcttgattacagttcttgttcaatggtggcaagtgctggttatggccaatctccgtcaatcctaggaggtttatagaactacattttgagtgttctatatttcagtgtattttaattcattttgcaattcctgtgtatgcaaacctgataaattctgtaaattgcttatagtatgtgtgctataacttcaaagtagatgtactgcgaccctcatgcaagctgatttttatcattatatatataaatatatacttaagaatatctgtgtgttgggccaatgaccaactttttttgacgaagcatttgtttttcgttgataattcatacactgcgtgaattttgtaattcattgtttcacttccacaggtttgacagctgcagatggtctctattgtcctctgcttcattctggaaagtgcatattcaaaattgtatcagtctctgatcgatgaattaattttgttatgtctgtgctaagttggaatttactatgttcctttatacatggtgtttattgaggtttgagagtctcttgactgtgaagaatgtacactgtctggttttgacagctatttctgtattattatcattataatcttgtcaaatagaaatgttgcttctagaaaatttgcctaggaggcgaatgtggggaaggtgaagcactcaccataattccctaaattcatgttagaacatttcttgctatggttaaaaatgctgcttcctttgacctttatgaatttctgtacctttgtcattctgttacctttgtcattctgttatttgcgctaattatattttaatgtctcctaattaaaaattaaaatttggttgttggctaaatacaatatgcaaaagatgatggcaggtccccgactaaagaagattaatgtgttcagttttcactggttaagtgaattataattttaaatattccattcttatttatgtctttatgataattcagactattttattttgaacctgttttctactctggcaaagaaagataggcagaactattagtgttccatatacattatggaatagataaagcttgagagataaatgacctaagttttccttccagagagactcttccattttctctcattacaaaaccagaagatcagctatgtggggccatcagctcccagcctaaggtcctataacccgaagcttgaaggcaatcagtacctctgcttttcaaaggtaaatgcattcattttctttgattcagttataagcaagtatatattttcataatattcttgacattacctgagaaataatacttcatgctaaatcttttactgccacttttctcattcatttggtttatcatttcagtttaatgagaaaaattaataaaggttttgattgcactattttattaacctaaaaaaaaaat

SEQ ID NO: 405038 - DNA, 1832 bp, Homo sapiens
ctctgccgaattcggcacgaggttgatcatattttctttggcaaaacactgatcttttattttaagagaattaacgtgaagtgatagaacgttttctaatagcaagatctattttttcccttttctttcggcgactaaaatcatctcactgactgctcaagggttggcctgaatgtcatcaggatagggaatatttactatggataccactaatttcctactaaaggacccagcatcttcaggaagcaaacagagatcaaaaggctacagaacagaagctatcatcagacaaaaccccctttttaggggaagaacaaaactatcaacactgcaagtcaacaaggaggacattactttaaggaataacatgagaaagaaatttttttattttcccctttttttcttggatttttcttctttttcttgattacagttcttgttcaatggtggcaagtgctggttatggccaatctccgtcaatcctaggaggtttatagaactacattttgagtgttctatatttcagtgtattttaattcattttgcaattcctgtgtatgcaaacctgataaattctgtaaattgcttatagtatgtgtgctataacttcaaagtagatgtactgcgaccctcatgcaagctgatttttatcattatatatataaatatatacttaagaatatctgtgtgttgggccaatgaccaactttttttgacgaagcatttgtttttcgttgataattcatacactgcgtgaattttgtaattcattgtttcacttccacaggtttgacagctgcagatggtctctattgtcctctgcttcattctggaaagtgcatattcaaaattgtatcagtctctgatcgatgaattaattttgttatgtctgtgctaagttggaatttactatgttcctttatacatggtgtttattgaggtttgagagtctcttgactgtgaagaatgtacactgtctggttttgacagctatttctgtattattatcattataatcttgtcaaatagaaatgttgcttctagaaaatttgcctaggaggcgaatgtggggaaggtgaagcactcaccataattccctaaattcatgttagaacatttcttgctatggttaaaaatgctgcttcctttgacctttatgaatttctgtacctttgtcattctgttacctttgtcattctgttatttgcgctaattatattttaatgtctcctaattaaaaattaaaatttggttgttggctaaatacaatatgcaaaagatgatggcaggtccccgactaaagaagattaatgtgttcagttttcactggttaagtgaattataattttaaatattccattcttatttatgtctttatgataattcagactattttattttgaacctgttttctactctggcaaagaaagataggcagaactattagtgttccatatacattatggaatagataaagcttgagagataaatgacctaagttttccttccagagagactcttccattttctctcattacaaaaccagaagatcagctatgtggggccatcagctcccagcctaaggtcctataacccgaagcttgaaggcaatcagtacctctgcttttcaaaggtaaatgcattcattttctttgattcagttataagcaagtatatattttcataatattcttgacattacctgagaaataatacttcatgctaaatcttttactgccacttttctcattcatttggtttatcatttcagtttaatgagaaaaattaataaaggttttgattgcactattttattaacctaaaaaaaaaat

SEQ ID NO: 405039 - DNA, 2408 bp, Homo sapiens
agaaggagagtggagaagggaaggaaaaggagagaagagaggaagcgaggagagaaggaagtggagctcttgcccgacagagacccggacagcgacgggaccaagatcagcacagtgaaagtccaaggcaatgacatctcccacaagcttcagatttccaaagtgaggaaaaaggatgaaggcttatatgagtgcagggtgactgatgccaactacggggagcttcaggaacacaaggcccaggcctatctgaaagtcaatgccaacagccatgcccgcagaatgcaggccttcgaagcctcgcccatgtggctgcaggatatgaagccccgcaagaacgtctccgcagccatccccagcagcatccatggctctgccaaccaacgaacgcactccacctccagccctcaagtggtagccaaaatccccaaacaaagtccacaatcagcaaagagcaaatcgcctgtaaaatctacggagcggacagcaaagttgaccctaaactccaagcaccaccctgcacccactgtactctaattcactacacaaggagcgcctgcttccggaagcataaatgaagaggctatcacatgctttgttgatcatattttctttggcaaaacactgatcttttattttaagagaattaacgtgaagtgatagaacgttttctaatagcaagatctattttttcccttttctttcggcgactaaaatcatctcactgactgctcaagggttggcctgaatgtcatcaggatagggaatatttactatggataccactaatttcctactaaaggacccagcatcttcaggaagcaaacagagatcaaaaggctacagaacagaagctatcatcagacaaaaccccctttttaggggaagaacaaaactatcaacactgcaagtcaacaaggaggacattactttaaggaataacatgagaaagaaatttttttattttcccctttttttcttggatttttcttctttttcttgattacagttcttgttcaatggtggcaagtgctggttatggccaatctccgtcaatcctaggaggtttatagaactacattttgagtgttctatatttcagtgtattttaattcattttgcaattcctgtgtatgcaaacctgataaattctgtaaattgcttatagtatgtgtgctataacttcaaagtagatgtactgcgaccctcatgcaagctgatttttatcattatatatataaatatatacttaagaatatctgtgtgttgggccaatgaccaactttttttgacgaagcatttgtttttcgttgataattcatacactgcgtgaattttgtaattcattgtttcacttccacaggtttgacagctgcagatggtctctattgtcctctgcttcattctggaaagtgcatattcaaaattgtatcagtctctgatcgatgaattaattttgttatgtctgtgctaagttggaatttactatgttcctttatacatggtgtttattgaggtttgagagtctcttgactgtgaagaatgtacactgtctggttttgacagctatttctgtattattatcattataatcttgtcaaatagaaatgttgcttctagaaaatttgcctaggaggcgaatgtggggaaggtgaagcactcaccataattccctaaattcatgttagaacatttcttgctatggttaaaaatgctgcttcctttgacctttatgaatttctgtacctttgtcattctgttacctttgtcattctgttatttgcgctaattatattttaatgtctcctaattaaaaattaaaatttggttgttggctaaatacaatatgcaaaagatgatggcaggtccccgactaaagaagattaatgtgttcagttttcactggttaagtgaattataattttaaatattccattcttatttatgtctttatgataattcagactattttattttgaacctgttttctactctggcaaagaaagataggcagaactattagtgttccatatacattatggaatagataaagcttgagagataaatgacctaagttttccttccagagagactcttccattttctctcattacaaaaccagaagatcagctatgtggggccatcagctcccagcctaaggtcctataacccgaagcttgaaggcaatcagtacctctgcttttcaaaggtaaatgcattcattttctttgattcagttataagcaagtatatattttcataatattcttgacattacctgagaaataatacttcatgctaaatcttttactgccacttttctcattcatttggtttatcatttcagtttaatgagaaaaattaataaaggttttgattgcactattttattaacctaaaaaaaaaat

SEQ ID NO: 405040 - DNA, 2538 bp, Homo sapiens
ggacagcgccgggacagcgccgggacagccccgggacagccccggggaaagcgcggggacggcgtggggtggagctcttgcccgacagagacccggacagcgacgggaccaagatcagcacagtgaaagtccaaggcaatgacatctcccacaagcttcagatttccaaagtgaggaaaaaggatgaaggcttatatgagtgcagggtgactgatgccaactacggggagcttcaggaacacaaggcccaggcctatctgaaagtcaatgccaacagccatgcccgcagaatgcaggccttcgaagcctcgcccatgtggctgcaggatatgaagccccgcaagaacgtctccgcagccatccccagcagcatccatggctctgccaaccaacgaacgcactccacctccagccctcaagtggtagccaaaatccccaaacaaagtccacaatcaggtgcgaggatagctacaagccatggactttctgtcctgcttcttgtttgtggctttgtgaagggtgctttgctttaatctaaagtgctgacttttttccaatatcactttctcttcttaaagcaaagagcaaatcgcctgtaaaatctacggagcggacagcaaagttgaccctaaactccaagcaccaccctgcacccactgtactctaattcactacacaaggagcgcctgcttccggaagcataaatgaagaggctatcacatgctttgttgatcatattttctttggcaaaacactgatcttttattttaagagaattaacgtgaagtgatagaacgttttctaatagcaagatctattttttcccttttctttcggcgactaaaatcatctcactgactgctcaagggttggcctgaatgtcatcaggatagggaatatttactatggataccactaatttcctactaaaggacccagcatcttcaggaagcaaacagagatcaaaaggctacagaacagaagctatcatcagacaaaaccccctttttaggggaagaacaaaactatcaacactgcaagtcaacaaggaggacattactttaaggaataacatgagaaagaaatttttttattttcccctttttttcttggatttttcttctttttcttgattacagttcttgttcaatggtggcaagtgctggttatggccaatctccgtcaatcctaggaggtttatagaactacattttgagtgttctatatttcagtgtattttaattcattttgcaattcctgtgtatgcaaacctgataaattctgtaaattgcttatagtatgtgtgctataacttcaaagtagatgtactgcgaccctcatgcaagctgatttttatcattatatatataaatatatacttaagaatatctgtgtgttgggccaatgaccaactttttttgacgaagcatttgtttttcgttgataattcatacactgcgtgaattttgtaattcattgtttcacttccacaggtttgacagctgcagatggtctctattgtcctctgcttcattctggaaagtgcatattcaaaattgtatcagtctctgatcgatgaattaattttgttatgtctgtgctaagttggaatttactatgttcctttatacatggtgtttattgaggtttgagagtctcttgactgtgaagaatgtacactgtctggttttgacagctatttctgtattattatcattataatcttgtcaaatagaaatgttgcttctagaaaatttgcctaggaggcgaatgtggggaaggtgaagcactcaccataattccctaaattcatgttagaacatttcttgctatggttaaaaatgctgcttcctttgacctttatgaatttctgtacctttgtcattctgttacctttgtcattctgttatttgcgctaattatattttaatgtctcctaattaaaaattaaaatttggttgttggctaaatacaatatgcaaaagatgatggcaggtccccgactaaagaagattaatgtgttcagttttcactggttaagtgaattataattttaaatattccattcttatttatgtctttatgataattcagactattttattttgaacctgttttctactctggcaaagaaagataggcagaactattagtgttccatatacattatggaatagataaagcttgagagataaatgacctaagttttccttccagagagactcttccattttctctcattacaaaaccagaagatcagctatgtggggccatcagctcccagcctaaggtcctataacccgaagcttgaaggcaatcagtacctctgcttttcaaaggtaaatgcattcattttctttgattcagttataagcaagtatatattttcataatattcttgacattacctgagaaataatacttcatgctaaatcttttactgccacttttctcattcatttggtttatcatttcagtttaatgagaaaaattaataaaggttttgattgcactattttattaacctaaaaaaaaaat

SEQ ID NO: 405041 - DNA, 1153 bp, Homo sapiens
atcatcgcagccattagagggaaaagttgcggcgccgcgagcccggcgaagtcctcagcccgccccgcttgcccactccccacttcccgagccggctccgtgtttagggagggcagtgatcacgcaagccggagcggcgggctgacgttggacgagctgccaggtagctgaaagcaggcagccaggcagccgagacacttcccagcgattccagcctgggctccgcaggaagcctcgctgaatcccagccagctggttctaaccttccagaatcgcaatcccttctcccaaaatttaccgagtttccgcggaacgtgacggcgaccgaggggcagaatgtggagatgtcctgcgccttccagagcggctccgcctcggtgtatctggagatccaatggtggttcctgcgggggccggaggacctggatcccggggccgagggggccggcgcgcaggtggagctcttgcccgacagagacccggacagcgacgggaccaagatcagcacagtgaaagtccaaggcaatgacatctcccacaagcttcagatttccaaagtgaggaaaaaggatgaaggcttatatgagtgcagggtgactgatgccaactacggggagcttcaggaacacaaggcccaggcctatctgaaagtcaatgccaacagccatgcccgcagaatgcaggccttcgaagcctcgcccatgtggctgcaggatatgaagccccgcaagaacgtctccgcagccatccccagcagcatccatggctctgccaaccaacgaacgcactccacctccagccctcaagtggtagccaaaatccccaaacaaagtccacaatcaggtatggaaacccatttcgagccttttattttaccactcacaaacgctccacagaaaggtcagtcgtatagagtagacagatttatgaatggtgatttttaaaatcggagacctagttcagtgcaagtgattatgagaggtgagcaccgagcctgcaccaattcactcagagctcaaagcatgtgggtgcaccccgtcagtcccctagtggtgcttcatttccagggcatctgagagctggactctggtttttatcctttctgtatttacacattataagaacaataaatcatgtaatgttggttacatta

SEQ ID NO: 405042 - DNA, 578 bp, Homo sapiens
cgaaggagaagatgggagaagggagagagtgagctctgccgacagaactcggacagcggacgggacagatcagcacagtgaaagtccaaggcaatgacatctcccacaagcttcagatttccaaagtgaggaaaaaggatgaaggcttatatgagtgcagggtgactgatgccaactacggggagcttcaggaacacaaggcccaggcctatctgaaagtcaatgccaacagccatgcccgcagaatgcaggccttcgaagcctcgcccatgtggctgcaggatatgaagccccgcaagaacgtctccgcagccatccccagcagcatccatggctctgccaaccaacgaacgcactccacctccagccctcaagtggtagccaaaatccccaaacaaagtccacaatcaggccaatttagaagcttagtcacaggattctgaaggcagctgtgcaagttaaagctgttctgaatggcattaatgtatgcagtcattcagccaatggaaatgcgtggaagttttaaccttgatgtgggataaaggcttcgtggaatgagcagtaccctgcacaacccc

SEQ ID NO: 405043 - DNA, 3153 bp, Homo sapiens
atcatcgcagccattagagggaaaagttgcggcgccgcgagcccggcgaagtcctcagcccgccccgcttgcccactccccacttcccgagccggctccgtgtttagggagggcagtgatcacgcaagccggagcggcgggctgacgttggacgagctgccaggtagctgaaagcaggcagccaggcagccgagacacttcccagcgattccagcctgggctccgcaggaagcctcgctgaatcccagccagctggttctaaccttccagaatcgcaatcccttctccccacagccagccctcgccgagcaagcagcaggatgtttgcagtgtcgcgcccagggctctgagactgagcctgccatccactcgcacgcctttctttcagggcttttcggctgttggctacactgatgtgacccccctccctttttggaatgatggggatctttttggtgtatgttggatttgttttcttttccgttttatatgtacaacaagggctttcttctcaagcaaaatttaccgagtttccgcggaacgtgacggcgaccgaggggcagaatgtggagatgtcctgcgccttccagagcggctccgcctcggtgtatctggagatccaatggtggttcctgcgggggccggaggacctggatcccggggccgagggggccggcgcgcaggtggagctcttgcccgacagagacccggacagcgacgggaccaagatcagcacagtgaaagtccaaggcaatgacatctcccacaagcttcagatttccaaagtgaggaaaaaggatgaaggcttatatgagtgcagggtgactgatgccaactacggggagcttcaggaacacaaggcccaggcctatctgaaagtcaatgccaacagccatgcccgcagaatgcaggccttcgaagcctcgcccatgtggctgcaggatatgaagccccgcaagaacgtctccgcagccatccccagcagcatccatggctctgccaaccaacgaacgcactccacctccagccctcaagtggtagccaaaatccccaaacaaagtccacaatcaggtgcgaggatagctacaagccatggactttctgtcctgcttcttgtttgtggctttgtgaagggtgctttgctttaatctaaagtgctgacttttttccaatatcactttctcttcttaaagcaaagagcaaatcgcctgtaaaatctacggagcggacagcaaagttgaccctaaactccaagcaccaccctgcacccactgtactctaattcactacacaaggagcgcctgcttccggaagcataaatgaagaggctatcacatgctttgttgatcatattttctttggcaaaacactgatcttttattttaagagaattaacgtgaagtgatagaacgttttctaatagcaagatctattttttcccttttctttcggcgactaaaatcatctcactgactgctcaagggttggcctgaatgtcatcaggatagggaatatttactatggataccactaatttcctactaaaggacccagcatcttcaggaagcaaacagagatcaaaaggctacagaacagaagctatcatcagacaaaaccccctttttaggggaagaacaaaactatcaacactgcaagtcaacaaggaggacattactttaaggaataacatgagaaagaaatttttttattttcccctttttttcttggatttttcttctttttcttgattacagttcttgttcaatggtggcaagtgctggttatggccaatctccgtcaatcctaggaggtttatagaactacattttgagtgttctatatttcagtgtattttaattcattttgcaattcctgtgtatgcaaacctgataaattctgtaaattgcttatagtatgtgtgctataacttcaaagtagatgtactgcgaccctcatgcaagctgatttttatcattatatatataaatatatacttaagaatatctgtgtgttgggccaatgaccaactttttttgacgaagcatttgtttttcgttgataattcatacactgcgtgaattttgtaattcattgtttcacttccacaggtttgacagctgcagatggtctctattgtcctctgcttcattctggaaagtgcatattcaaaattgtatcagtctctgatcgatgaattaattttgttatgtctgtgctaagttggaatttactatgttcctttatacatggtgtttattgaggtttgagagtctcttgactgtgaagaatgtacactgtctggttttgacagctatttctgtattattatcattataatcttgtcaaatagaaatgttgcttctagaaaatttgcctaggaggcgaatgtggggaaggtgaagcactcaccataattccctaaattcatgttagaacatttcttgctatggttaaaaatgctgcttcctttgacctttatgaatttctgtacctttgtcattctgttacctttgtcattctgttatttgcgctaattatattttaatgtctcctaattaaaaattaaaatttggttgttggctaaatacaatatgcaaaagatgatggcaggtccccgactaaagaagattaatgtgttcagttttcactggttaagtgaattataattttaaatattccattcttatttatgtctttatgataattcagactattttattttgaacctgttttctactctggcaaagaaagataggcagaactattagtgttccatatacattatggaatagataaagcttgagagataaatgacctaagttttccttccagagagactcttccattttctctcattacaaaaccagaagatcagctatgtggggccatcagctcccagcctaaggtcctataacccgaagcttgaaggcaatcagtacctctgcttttcaaaggtaaatgcattcattttctttgattcagttataagcaagtatatattttcataatattcttgacattacctgagaaataatacttcatgctaaatcttttactgccacttttctcattcatttggtttatcatttcagtttaatgagaaaaattaataaaggttttgattgcactattttattaacctaaaaaaaaaat

SEQ ID NO: 405044 - DNA, 1381 bp, Homo sapiens
atcatcgcagccattagagggaaaagttgcggcgccgcgagcccggcgaagtcctcagcccgccccgcttgcccactccccacttcccgagccggctccgtgtttagggagggcagtgatcacgcaagccggagcggcgggctgacgttggacgagctgccaggtagctgaaagcaggcagccaggcagccgagacacttcccagcgattccagcctgggctccgcaggaagcctcgctgaatcccagccagctggttctaaccttccagaatcgcaatcccttctccccacagccagccctcgccgagcaagcagcaggatgtttgcagtgtcgcgcccagggctctgagactgagcctgccatccactcgcacgcctttctttcagggcttttcggctgttggctacactgatgtgacccccctccctttttggaatgatggggatctttttggtgtatgttggatttgttttcttttccgttttatatgtacaacaagggctttcttctcaagcaaaatttaccgagtttccgcggaacgtgacggcgaccgaggggcagaatgtggagatgtcctgcgccttccagagcggctccgcctcggtgtatctggagatccaatggtggttcctgcgggggccggaggacctggatcccggggccgagggggccggcgcgcaggtggagctcttgcccgacagagacccggacagcgacgggaccaagatcagcacagtgaaagtccaaggcaatgacatctcccacaagcttcagatttccaaagtgaggaaaaaggatgaaggcttatatgagtgcagggtgactgatgccaactacggggagcttcaggaacacaaggcccaggcctatctgaaagtcaatgccaacagccatgcccgcagaatgcaggccttcgaagcctcgcccatgtggctgcaggatatgaagccccgcaagaacgtctccgcagccatccccagcagcatccatggctctgccaaccaacgaacgcactccacctccagccctcaagtggtagccaaaatccccaaacaaagtccacaatcaggtatggaaacccatttcgagccttttattttaccactcacaaacgctccacagaaaggtcagtcgtatagagtagacagatttatgaatggtgatttttaaaatcggagacctagttcagtgcaagtgattatgagaggtgagcaccgagcctgcaccaattcactcagagctcaaagcatgtgggtgcaccccgtcagtcccctagtggtgcttcatttccagggcatctgagagctggactctggtttttatcctttctgtatttacacattataagaacaataaatcatgtaatgttggttacatta

SEQ ID NO: 405045 - DNA, 215 bp, Homo sapiens
agtgtcattcactggtaacttttattaaacaagtcatccttttccctcactggaattgtcactatttttctacatattttcaaagattgttatttgtttctggattctattctgttcccgtgatctgtcaatcctccttccagtgctatatgggaattggtttattttgatatctgataatgaagatctccaaggaggatttattgtttgacgat

SEQ ID NO: 405046 - DNA, 442 bp, Homo sapiens
caacaccccatctgcccagctatgaattaacatttttaagcttcctttgagattattgcagactttagggaaggagaaaacaagtgtagtcaagacaccatatttaaccagaggtttgtgaatcagactacttctcactgtagattccctttagaaattgcagctgcctttcttttcctcgacaatttctcattcaatatattgtataggcaaccttgataattctcttgaacattttagtgtgttttatctcacttagtcctcataaaatccttttggaatcaacatgtcatatatctttttgtagagtttcccaaaaatggtaagctctggattttaaatgcatagtaaaacagatatttaatatatatgagaatacattctgttcattcagttttacttccatttttttactgtgttgcaaaataaagaggttattgat

SEQ ID NO: 405047 - DNA, 337 bp, Homo sapiens
tcccatctctagcatcacatgagaagatctgtcaccaaacttgaggtgacttccctagtcccatctctagcatcacatgagaagatctgtcaccaaacttgaggtgacttccctagtcccatctctagcatcacatgagaagatctgtcaccaaacttgaggtgacttctccagtcccatctctagcatcacatgagaagatctgtcaccaaacttgaggtgacttctccagtcccatctctagcatcacatgagaagatctgtcaccaaacttgaggtgacttctccagtcccatctctagcatcacatgagaagatctgtcatcaaacttgaggt

SEQ ID NO: 405048 - DNA, 627 bp, Homo sapiens
ccgtcagacactcagacacaccagcggggagagctgcagccactccagctttagctgggttgtgctaagagctttaagtgcattatatcattcaaagctcccaaggagccgctttggggagtcccgtcaacacccgcattctgcagatgaagggactgggacctcaagggcagctgctagggctaaggtgtggttcttctaccggagatgattttgccccaggggacatctggccatatctggaaacacttgtggttgccacaactgggagggggtgttactagcatccagtgggcgaggggaagtagctaaacatccaccctgccacgcacagggaagtcccccacagaaaagaattattgagcccaaacgtcagcaccaaggtcgagaaactctggattaaatcagatgatagtgaatatctcaggcacagtgccgggtgcatagtgcttgctcaataaacattagctaggcaacagctgattcctaattaggcctcaatgtgaagacagaagcagggactgaaaccacacacaaccggtttgaagaataacaacaacttagtctaaaaacatctgctttgaaagcaaacgcttaggaaagggcagttgttcatttcacacttgg

SEQ ID NO: 405049 - DNA, 434 bp, Homo sapiens
tccagcgaggaccaggcgatgctgcaggcgatgctgaggcggttgttccagagcgtgaaggagaaaatcacgggtgccccttccctggagtgtgccgaagagattcttttacatctggaggaaactgatgaaaattttcacaactatgaatttgtgaaatacctcaggcagcatataggcaacactttgggttctatgattgaagaagaaatggaaaaatgcacatctgatcggaatcagggtgaagaatgcggctatgatacagttgtacagcaggtcactaaaagaactcaagaatctaaagagtacaaagaaatgatgcattacctgaagaacattatgatagctgtggtcgagtctatgattaacaagtttgaagaagatgagacacgaaatcaagaaaggcagaaaaaaatccaaaaggagaaaagcca

SEQ ID NO: 405050 - DNA, 208 bp, Homo sapiens
tgccctgcctccctatgatgaaagaaagatagccaagctcactggttcaagacattatctcctactgcaaatgtcaaactgggtcttgttttaaatttggaacttagaagtaaactagaaagaagagaatctgagttttatttctttgataaagaattccaagtactttgaaggaacaccccccaccccaatccaacctccacaggtc

SEQ ID NO: 405051 - DNA, 107 bp, Homo sapiens
cagtctttctgaattttacttatagatgaggcagaggatactaaacatcatataactggattatgctgattctctctagcaactttcaagttacattaaatattagt

SEQ ID NO: 405052 - DNA, 278 bp, Homo sapiens
acaaacaacaacaaaaaacgacacaaaggaagaatccagtggagaagggcaggtgggtggggaaaggttatggatgaaactacaagacaaggatataggattctcactagttctgctggtacagggagctgtggatggggactctgataagctaaatgcacaaaactgggagggcacgatgcagagtttaataaatgcttatgatctacattgccactactgctgttttctggaacataactttctctacaaagatcttcattgtactgtatgtggtt

SEQ ID NO: 405053 - DNA, 328 bp, Homo sapiens
tgggggccagccacagggattggctcctgcttctgggaggtgcctctagactcctggagggaaggccaggggctgcctgagactttcggtaacagcctcagagtggtcgaggattcgacccaagttccactacctttcattagggatgttttgtaaactgtcaagtgctgtacaaatgtccatttgtttctcttttctccttaatgaacttcagagaccagaacagaaaatcctgctgccacaaataccagaaatgctcgataaagaaaacaaatttccttttagacacatagcaaagctcatcaggctgggagtagtggctcatgcc

SEQ ID NO: 405054 - DNA, 216 bp, Homo sapiens
tggactgattactgtaatctaacaggtgagactggaaatcagatagtgcaaggcctccacctttattcttttttttcagaatcatttgggtgattataggtcctttacatttctacccctgaaaaacatactgggattttgattgtgattgcatcgaatatatagatcagtctgggcacaaaccactgtgacagctcagaattgttagtctttttt

SEQ ID NO: 405055 - DNA, 528 bp, Homo sapiens
cataatgaaaaggcaaaattagatcttgttgcatcagtgtggatagatcataggcacagtcaattggatgaagcaagctgcactacagttcatgcaggatgatggctttttttaaatgcacacaacaaaaccatataaaactcttctgaaaatgtctggaatgatgtctacctagtttatcatggtggcaacctctgaagagagatgagatagaatagagtgggagagaaagaagacttcagccttttctgtagtgttctaacaagggtgaatgagcttatatgttattctgtaattgttaaaaaccagtacgagtcacgatgaacatcaagatgagtaagacaggacccctgccttcagagaattcagattatgcagggagcaggaaggaagagaaatagggggagagcggagaaacaaaaggcatgtgctatctcctttcaagttgatttcagcaagcttcacattttgggggcaggcaggggaagaattctagaagagaaacagggtattctagtgagacaagcc

SEQ ID NO: 405056 - DNA, 105 bp, Homo sapiens
ctgcggcgtccagggtggaacggggttgcccctgcacgcattctttttgttctgagcctgcttgtgtgcaccagcttccaaaaataaagcattttccttgtgtga

SEQ ID NO: 405057 - DNA, 637 bp, Homo sapiens
atttgaaaagaagtgatcaggccgggcgcggtggctcacgcctgtaataccagcactttgggaggccaaggcgggcggatcacgaggtcaggagatgaagaccaccctggctaacacggtgaaaccctgtctctactaaaaatacaaaaaaattagccgggcctagtggcgggcgcctgtacccccagctattcgggagcctgaggcaggagaatggcgtgaacccaaagtggagcttgcagtgagccgagatcctgccactgcacttcagcctgggcaacagagtgagactccgtctcaaaaaagaaaaaagaaataagtgaacaaagaattagctcctttcatttttaaggatgtgaagacattaaggaagatttaaatgaagaaaggcatatgaaaatacccagctccgtatcaacttataattaaaaagcagtaactaccattttttgagctcattgtactgtgcaatgtgctaaacacattccagtatttgatttaattctcttaataaccctgcagagcaggtaataggaattccattcaacacatgaggaatttcagagaagccaagtagcaggcctaaggtcacacagcttccaaatggtgatgttgggatttgaattcgatctgtgtg

SEQ ID NO: 405058 - DNA, 1947 bp, Homo sapiens
gcaagaccctcagagtcttgacaccgggcctacactcaagtaacatggtcaacaggagggcgggatggtgtcaagaccctcagagtctttgaggaaagagccaagcagagaagaccgctgcgtggagtgtgacaccacatggcatttctcaagcccagcggaccctgtgtcagcaaataccagtaatttaacatctgctcctggcctcctcttcacctgcctgggttcggaactgaggaggaaggatgagaagagactgcaatgcagcaggcaccctctgcagagtgaggccgcccgtccatcactgccagccctgggctgctcaggaggggacgtgaaccactcaaaggaatgtcttaaagaggatctggagtttcccccatgcaaattagggaagaattaggcaagaaaagacatacattacagggaaatccttctgaacaaaatggctgtcttcacctactcttcttgcaagaaaagacatacattacagggaaatccttctgaacaaaatggctatcttcacctactcttcagcaaaaaccgtctccagactttttagtgtcaaaaatgtaaccaactgtctcctgattttttccaatgtgtttggcaagtgctgtggccctgttgtaggtacttctcctgactcttgggggagaagtggttttagggattgatttgggggagcgggtttttgtcccatcccacctcctctcttctttctctgcttgtcgatattgtctgtgtgattcagagaattggggcagttacattgtgtctgttgttgagattattaaaagattaaaacgtagttgtagaaatgaaaaattaaacagctgtgttttaaaaatgcaaaccaatatcttgttaataaaggaattcaagctatggggcagccacactcccctcctcccaggctggcataggtggccctgggctggcggcttaggaagcatggagcacacttagggtagtgcctgcctgggcaagagacacctgccgagcaaaaggaacgagaatctggggctcagagcctcgcagttgtgccaggattttcctatacatgttcaggacctctgggtagaggtttcacagtttgtgaccccataaccaccctcacccgacgtgggttctagctcagtgtgcctaatactgcatggtaacctgggcttgaccctgaagcccctgcctggcaggccacaggacctctcctgcccacttggtgctatctcttccagtgaccacccagcacgggtgagcactggccagcctggagcctgcaatccaggtggaacagactgtcctccatgtcagttccttctggcttcaggccctcaattatttccctttgagcttttttagaccctagatctcctaggcccaggctctctcttgaccccagagaagccactgtcaggaaaggaagtgaaccctactgaagccagagaattcaccccggccaaagcaggccctctgggtccagcccctcattccacaccacgccagtattgcatccatctactgcagctacacatcctgagggcagcaccacccactctggcctgctggcccatcgcaggactagcccaggcacctgccgggcattgcaggatatccagtggggcctgtgactgctccctgatgcgtcagaagagaagtgttgcactttagtggaggagctgaggagcacctgcccccttgtagcttgagttccttttggtaacagtagcagcctccatggtggtgtctgggatgcacgtgcacccgctgccttcagctgtatgtgtgtgttcctgctggagttgtgttactgacaggataatgacattacaaagaaattgtgttatattcaactttgccttgataattattgtaaacactttgttcattttttcttttttattcacaaactaaatccaccaggaaattataaagttatttaaaaac

SEQ ID NO: 405059 - DNA, 505 bp, Homo sapiens
gcaagaccctcagagtcttgacaccgggcctacactcaagtaacatggtcaacaggagggcgggatggtgtcaagaccctcagagtctttgaggaaagagccaagcagagaagaccgctgcgtggagtgtgacaccacatggcatttctcaagcccagcggaccctgtgtcagcaaataccagtaatttaacatctgctcctggcctcctcttcacctgcctgggttcggaactgaggaggaaggatgagaagagactgcaatgcagcaggcaccctctgcagagtgaggccgcccgtccatcactgccccagtaacagatgcccgttgctcttgggctggtctcccctgaacacctccaagaggctgcctgccttgccagcacccgtgtcctgagctcctgcagcccagtggctgctgaagttgtgatccctcactcaccctgctagctttgcccttgactcgtcttctctgaacctcagcctcgtgcattgcctggaaccttc

SEQ ID NO: 405060 - DNA, 391 bp, Homo sapiens
atccactggcatttggatttgctgccagagtcctgttcctcccagaaccatcccgccctcctgttgaccatgttacttgagtgtaggcccggtgtcaagaccctcagagtctttgaggaaagagccaagcagagaagaccgctgcgtggagtgtgacaccacatggcatttctcaagcccagcggaccctgtgtcagcaaataccagtaatttaacatctgctcctggcctcctcttcacctgcctgggttcggaactgaggaggaaggatgagaagagactgcaatgcagcaggcaccctctgcagagtgaggccgcccgtccatcactgccagccctgggctgctcaggaggggacgtgaaccactcaaaggaatgtcttaaagaggat

SEQ ID NO: 405061 - DNA, 1851 bp, Homo sapiens
gcaagaccctcagagtcttgacaccgggcctacactcaagtaacatggtcaacaggagggcgggatggtgtcaagaccctcagagtctttgaggaaagagccaagcagagaagaccgctgcgtggagtgtgacaccacatggcatttctcaagcccagcggaccctgtgtcagcaaataccagtaatttaacatctgctcctggcctcctcttcacctgcctgggttcggaactgaggaggaaggatgagaagagactgcaatgcagcaggcaccctctgcagagtgaggccgcccgtccatcactgccagccctgggctgctcaggaggggacgtgaaccactcaaaggaatgtcttaaagaggatctggagtttcccccatgcaaattagggaagaattaggcaagaaaagacatacattacagggaaatccttctgaacaaaatggctgtcttcacctactcttcttgcaagaaaagacatacattacagggaaatccttctgaacaaaatggctatcttcacctactcttcagcaaaaaccgtctccagactttttagtgtcaaaaatgtaaccaactgtctcctgattttttccaatgtgtttggcaagtgctgtggccctgttgtaggtacttctcctgactcttgggggagaagtggttttagggattgatttgggggagcgggtttttgtcccatcccacctcctctcttctttctctgcttgtcgatattgtctgtgtgattcagagaattggggcagttacattgtgtctgttgttgagattattaaaagattaaaacgtagttgtagaaatgaaaaattaaacagctgtgttttaaaaatgcaaaccaatatcttgttaataaaggaattcaagctatggggcagccacactcccctcctcccaggctggcataggtggccctgggctggcggcttaggaagcatggagcacacttagggtagtgcctgcctgggcaagagacacctgccgagcaaaaggaacgagaatctggggctcagagcctcgcagttgtgccaggattttcctatacatgttcaggacctctgggtagaggtttcacagtttgtgaccccataaccaccctcacccgacgtgggttctagctcagtgtgcctaatactgcatggtaacctgggcttgaccctgaagcccctgcctggcaggccacaggacctctcctgcccacttggtgctatctcttccagtgaccacccagcacgggtgagcactggccagcctggagcctgcaatccaggtggaacagactgtcctccatgtcagttccttctggcttcaggccctcaattatttccctttgagcttttttagaccctagatctcctaggcccaggctctctcttgaccccagagaagccactgtcaggaaaggaagtgaaccctactgaagccagagaattcaccccggccaaagcaggccctctgggtccagcccctcattccacacctgccgggcattgcaggatatccagtggggcctgtgactgctccctgatgcgtcagaagagaagtgttgcactttagtggaggagctgaggagcacctgcccccttgtagcttgagttccttttggtaacagtagcagcctccatggtggtgtctgggatgcacgtgcacccgctgccttcagctgtatgtgtgtgttcctgctggagttgtgttactgacaggataatgacattacaaagaaattgtgttatattcaactttgccttgataattattgtaaacactttgttcattttttcttttttattcacaaactaaatccaccaggaaattataaagttatttaaaaac

SEQ ID NO: 405062 - DNA, 2015 bp, Homo sapiens
  misc_feature (3)..(4): n is a, c, g, or t
ggnncaggaaaggctcctggtggaaggtgagacagagagagtcactgagagaacagggcaagaaggtggctggctgtgtgagggaacgaaaagtgcagtcgtacccttgtgaagctgagtggggccccatgggcctggccccacctgttgtccagagcatgcccctgcccccaggtgatggaggactccatgagctcggccaccaccctgaccacgccgcaggagcaggtggacagcctcatcatgcagatcgccgaggagaatggcctggaggtgctggaccagctcagccagctgcccgagggcgcctctgccgtgggcgagagctctgtgcgcagccaggaggaccagctgtcacggaggttggccgccttgaggaactagccgtgccccgccggtgtgcaccgcctctgccccgtgatgtgctggaaggctcctgtcctctccccaccgcgtcttgcctttgtgctgaccccgcggggctgcggccggcagccactctgcgtctctcacctgccaggcctgcgtggccttagggttgttcctgttcttttaggttgggcggtgggtctgtgtcctggtgttgagtttctgcaaatttctgggggtgatttctgtgactctgggcccacagcggggaggccaagaggggccctgtggactttcacccagcactgtgggggccttcagactctggggcagcagacatgctgcttcccatcagccagagggggtcagggctgccctgttgccaaacaactccctgaggcctctccgcaccacctcagcgggcaggaggtcccaccatgtggacagacatagcccaaggaggcaccacaggtctatgtgtgctgggggatgtcaggtgccacccaacgctgtcctggtggtatttacaatgacatcctcctcctccatcactccaggggtggtgtctcggccgcccctaccagctggctgagccccctggcctcctgcgctccctcacttccctcagttcccaaagctgcccagtccatggggacagaaccgtcactcagatccacattcaagtgtgcccaccctgcagtcttcatcctcactcagctgctgcctctggaggtgcctttggccacatgtgctgtgctgtttgtctcctcgacagggagcctgtccaccagcaggctgcggtcccagcgggtgcgtctgcagctcctccccttgggcagcctggttctcccggaggacctttccttggggccctgcttcatgacgatgctgcctgtgtcaccctctaccatctgtaaacaactgggtgccttccccgaccacaccccaatgccttcccagcttggaagccaaggcagctgatgaagggagctcaggagagccgtcttcagctgggctggggttggggctgctgtgaggaaaacctgccattgtggccctggagagtcaccagcagctcttgggaaggacttgctgggaggctgagagaggctttgggcacagcctgctgtcttttccatttcctaaagtttacttcattgtcttgaggcttccaggttttgtttttgtttttgccaaagtagaaaaggcaggtggtgggcggctggcagggagtgcgggtccccgcccctcttcagtcctgccctcccctcctcagtcctgcccaccccgtgcagcccatgctgaggctgcagtggtgtcgtgggtgttacgtgcaggaacgtggagaccctgacgtgggctcactgcgtttggttttcttttcagaacttgggagcccccagggaggggctagtgttggtaggtcctagacgtggttccctccagcctccccaaaatcaaccctggtgttgagagaacgtccttctgtccatcgtgggtaacagccttggggagggtgcagagctctgcagagccatgggccaggtggggctgcctcagtcctgtccccttgggcactgaggagaggggcccattcacctttctcctagaatgctgttgtaaataaacaaatggatccctggaaa

SEQ ID NO: 405063 - DNA, 2456 bp, Homo sapiens
agcgactcacaaaaggtcctcggccacggcgtgcgtcaccatggcgaccgccgccggcagccgcgccccgcccctctggcgggaccggccaccatcctctcgcgaggagcatcccgtgcgaccggaagtggggcggcgaccccggaagtccccgccgggtgcagcttggtcggttcgatcgccgccgggacctgacaccgcccggagttggcgtcccttctccctctccgagtgctgctcctgtcattgtggccatggacgttcacggcgaagcagctggagaagctggccaagaaggcggagaaggactccaaggcggagcaggccaaagtgaagaaggcccttctgcagaaaaatgtagagtgtgcccgtgtgtatgccgagaacgccatccgcaagaagaacgaaggtgtgaactggcttcggatggcgtcccgcgtagacgcagtggcctccaaggtgcagacagctgtgactatgaagggggtgaccaagaatatggcccaggtgaccaaagccctggacaaggccctgagcaccatggacctgcagaaggtctcctcagtgatggacaggttcgagcagcaggtgcagaacctggacgtccatacatcggtgatggaggactccatgagctcggccaccaccctgaccacgccgcaggagcaggtggacagcctcatcatgcagatcgccgaggagaatggcctggaggtgctggaccagctcagccagctgcccgagggcgcctctgccgtgggcgagagctctgtgcgcagccaggaggaccagctgtcacggaggttggccgccttgaggaactagccgtgccccgccggtgtgcaccgcctctgccccgtgatgtgctggaaggctcctgtcctctccccaccgcgtcttgcctttgtgctgaccccgcggggctgcggccggcagccactctgcgtctctcacctgccaggcctgcgtggccttagggttgttcctgttcttttaggttgggcggtgggtctgtgtcctggtgttgagtttctgcaaatttctgggggtgatttctgtgactctgggcccacagcggggaggccaagaggggccctgtggactttcacccagcactgtgggggccttcagactctggggcagcagacatgctgcttcccatcagccagagggggtcagggctgccctgttgccaaacaactccctgaggcctctccgcaccacctcagcgggcaggaggtcccaccatgtggacagacatagcccaaggaggcaccacaggtctatgtgtgctgggggatgtcaggtgccacccaacgctgtcctggtggtatttacaatgacatcctcctcctccatcactccaggggtggtgtctcggccgcccctaccagctggctgagccccctggcctcctgcgctccctcacttccctcagttcccaaagctgcccagtccatggggacagaaccgtcactcagatccacattcaagtgtgcccaccctgcagtcttcatcctcactcagctgctgcctctggaggtgcctttggccacatgtgctgtgctgtttgtctcctcgacagggagcctgtccaccagcaggctgcggtcccagcgggtgcgtctgcagctcctccccttgggcagcctggttctcccggaggacctttccttggggccctgcttcatgacgatgctgcctgtgtcaccctctaccatctgtaaacaactgggtgccttccccgaccacaccccaatgccttcccagcttggaagccaaggcagctgatgaagggagctcaggagagccgtcttcagctgggctggggttggggctgctgtgaggaaaacctgccattgtggccctggagagtcaccagcagctcttgggaaggacttgctgggaggctgagagaggctttgggcacagcctgctgtcttttccatttcctaaagtttacttcattgtcttgaggcttccaggttttgtttttgtttttgccaaagtagaaaaggcaggtggtgggcggctggcagggagtgcgggtccccgcccctcttcagtcctgccctcccctcctcagtcctgcccaccccgtgcagcccatgctgaggctgcagtggtgtcgtgggtgttacgtgcaggaacgtggagaccctgacgtgggctcactgcgtttggttttcttttcagaacttgggagcccccagggaggggctagtgttggtaggtcctagacgtggttccctccagcctccccaaaatcaaccctggtgttgagagaacgtccttctgtccatcgtgggtaacagccttggggagggtgcagagctctgcagagccatgggccaggtggggctgcctcagtcctgtccccttgggcactgaggagaggggcccattcacctttctcctagaatgctgttgtaaataaacaaatggatccctggaaa

SEQ ID NO: 405064 - DNA, 2669 bp, Homo sapiens
agcgactcacaaaaggtcctcggccacggcgtgcgtcaccatggcgaccgccgccggcagccgcgccccgcccctctggcgggaccggccaccatcctctcgcgaggagcatcccgtgcgaccggaagtggggcggcgaccccggaagtccccgccgggtgcagcttggtcggttcgatcgccgccgggacctgacaccgcccggagttggcgtcccttctccctctccgagtgctgctcctgtcattgtggccatggacgataccctgttccagttgaagttcacggcgaagcagctggagaagctggccaagaaggcggagaaggactccaaggcggagcaggccaaagtgaagaaggcccttctgcagaaaaatgtagagtgtgcccgtgtgtatgccgagaacgccatccgcaagaagaacgaaggtgtgaactggcttcggatggcgtcccgcgtagacgcagtggcctccaaggtgcagacagctgtgactatgaagggggtgaccaagaatatggcccaggtgaccaaagccctggacaaggccctgagcaccatggacctgcagaaggtctcctcagtgatggacaggttcgagcagcaggtgcagaacctggacgtccatacatcggtgatggaggactccatgagctcggccaccaccctgaccacgccgcaggagcaggtggacagcctcatcatgcagatcgccgaggagaatggcctggaggtgctggaccagctcagccagctgcccgagggcgcctctgccgtgggcgagagctctgtgcgcagccaggaggaccagctgtcacggaggttggccgccttgaggaactagccgtgccccgccggtgtgcaccgcctctgccccgtgatgtgctggaaggctcctgtcctctccccaccgcgtcttgcctttgtgctgaccccgcggggctgcggccggcagccactctgcgtctctcacctgccaggcctgcgtggccttagggttgttcctgttcttttaggttgggcggtgggtctgtgtcctggtgttgagtttctgcaaatttctgggggtgatttctgtgactctgggcccacagcggggaggccaagaggggccctgtggactttcacccagcactgtgggggccttcagactctggggcagcagacatgctgcttcccatcagccagagggggtcagggctgccctgttgccaaacaactccctgaggcctctccgcaccacctcagcgggcaggaggtcccaccatgtggacagacatagcccaaggaggcaccacaggtctatgtgtgctgggggatgtcaggtgccacccaacgctgtcctggtggtatttacaatgacatcctcctcctccatcactccaggggtggtgtctcggccgcccctaccagctggctgagccccctggcctcctgcgctccctcacttccctcagttcccaaagctgcccagtccatggggacagaaccgtcactcagatccacattcaagtgtgcccaccctgcagtcttcatcctcactcagctgctgcctctggaggtgcctttggccacatgtgctgtgctgtttgtctcctcgacagggagcctgtccaccagcaggctgcggtcccagcgggtgcgtctgcagctcctccccttgggcagcctggttctcccggaggacctttccttggggccctgcttcatgacgatgctgcctgtgtcaccctctaccatctgtaaacaactgggtgccttccccgaccacaccccaatgccttcccagcttggaagccaaggcagctgatgaagggagctcaggagagccgtcttcagctgggctggggttggggctgctgtgaggaaaacctgccattgtggccctggagagtcaccagcagctcttgggaaggacttgctgggaggctgagagaggctttgggcacagcctgctgtcttttccatttcctaaagtttacttcattgtcttgaggcttccaggttttgtttttgtttttgccaaagtagaaaaggcaggtggtgggcggctggcagggagtgcgggtccccgcccctcttcagtcctgccctcccctcctcagtcctgcccaccccgtgcagcccatgctgaggctgcagtggtgtcgtgggtgttacgtgcaggaacgtggagaccctgacgtgggctcactgcgtttggttttcttttcagaacttgggagcccccagggaggggctagtgttggtaggtcctagacgtggttccctccagcctccccaaaatcaaccctggtgttgagagaacgtccttctgtccatcgtgggtaacagccttggggagggtgcagagctctgcagagccatgggccaggtggggctgcctcagtcctgtccccttgggcactgaggagaggggcccattcacctttctcctagaatgctgttgtaaataaacaaatggatccctggaaactttctcaagctttgctttggagccttgggtgagcccctggatgtggccatctcccccaagctgaggaggggttcctggagtgttcactgctaggggctgggcagatggctatgctcattctcgggccccatccaaaccgacaatctcccatgttcagttctctgcttactttgaaataatttaaaacttgcc

SEQ ID NO: 405065 - DNA, 2853 bp, Homo sapiens
agcgactcacaaaaggtcctcggccacggcgtgcgtcaccatggcgaccgccgccggcagccgcgccccgcccctctggcgggaccggccaccatcctctcgcgaggagcatcccgtgcgaccggaagtggggcggcgaccccggaagtccccgccgggtgcagcttggtcggttcgatcgccgccgggacctgacaccgcccggagttggcgtcccttctccctctccgagtgctgctcctgtcattgtggccatggacgataccctgttccagttgaagttcacggcgaagcagctggagaagctggccaagaaggcggagaaggactccaaggcggagcaggccaaagtgaagaaggcccttctgcagaaaaatgtagagtgtgcccgtgtgtatgccgagaacgccatccgcaagaagaacgaaggtgtgaactggcttcggatggcgtcccgcgtagacgcagtggcctccaaggtgcagacagctgtgactatgaagggggtgaccaagaatatggcccaggtgaccaaagccctggacaaggccctgagcaccatggacctgcagaaggtctcctcagtgatggacaggttcgagcagcaggtgcagaacctggacgtccatacatcggtgatggaggactccatgagctcggccaccaccctgaccacgccgcaggagcaggtggacagcctcatcatgcagatcgccgaggagaatggcctggaggtgctggaccagctcagccagctgcccgagggcgcctctgccgtgggcgagagctctgtgcgcagccaggaggaccagctgtcacggaggttggccgccttgaggaactagccgtgccccgccggtgtgcaccgcctctgccccgtgatgtgctggaaggctcctgtcctctccccaccgcgtcttgcctttgtgctgaccccgcggggctgcggccggcagccactctgcgtctctcacctgccaggcctgcgtggccttagggttgttcctgttcttttaggttgggcggtgggtctgtgtcctggtgttgagtttctgcaaatttctgggggtgatttctgtgactctgggcccacagcggggaggccaagaggggccctgtggactttcacccagcactgtgggggccttcagactctggggcagcagacatgctgcttcccatcagccagagggggtcagggctgccctgttgccaaacaactccctgaggcctctccgcaccacctcagcgggcaggaggtcccaccatgtggacagacatagcccaaggaggcaccacaggtctatgtgtgctgggggatgtcaggtgccacccaacgctgtcctggtggtatttacaatgacatcctcctcctccatcactccaggggtggtgtctcggccgcccctaccagctggctgagccccctggcctcctgcgctccctcacttccctcagttcccaaagctgcccagtccatggggacagaaccgtcactcagatccacattcaagtgtgcccaccctgcagtcttcatcctcactcagctgctgcctctggaggtgcctttggccacatgtgctgtgctgtttgtctcctcgacagggagcctgtccaccagcaggctgcggtcccagcgggtgcgtctgcagctcctccccttgggcagcctggttctcccggaggacctttccttggggccctgcttcatgacgatgctgcctgtgtcaccctctaccatctgtaaacaactgggtgccttccccgaccacaccccaatgccttcccagcttggaagccaaggcagctgatgaagggagctcaggagagccgtcttcagctgggctggggttggggctgctgtgaggaaaacctgccattgtggccctggagagtcaccagcagctcttgggaaggacttgctgggaggctgagagaggctttgggcacagcctgctgtcttttccatttcctaaagtttacttcattgtcttgaggcttccaggttttgtttttgtttttgccaaagtagaaaaggcaggtggtgggcggctggcagggagtgcgggtccccgcccctcttcagtcctgccctcccctcctcagtcctgcccaccccgtgcagcccatgctgaggctgcagtggtgtcgtgggtgttacgtgcaggaacgtggagaccctgacgtgggctcactgcgtttggttttcttttcagaacttgggagcccccagggaggggctagtgttggtaggtcctagacgtggttccctccagcctccccaaaatcaaccctggtgttgagagaacgtccttctgtccatcgtgggtaacagccttggggagggtgcagagctctgcagagccatgggccaggtggggctgcctcagtcctgtccccttgggcactgaggagaggggcccattcacctttctcctagaatgctgttgtaaataaacaaatggatccctggaaaaaaaaaaaaaaaaaaaaaaaaaaaaaaaaaaaaaaaaaaaaaaaaaaaaaaaaaaaaaaaaaaaaaaaaaaaaaaaaggggggggcaaattcccgggggggagcccaaaatactagcccaggccgcatgtttgatttttaaaaagggggcccccatataaggaggcatatattaatatcagagcggggcgggcgggcgcgcggtataaaaaaacaggtggtggagaggaaaaactgcgatgactgcggtcgaatctttgtgaggagaaaccacacccattcttggggggaggggagaaaataatgggagcaacaacacacctcagaggaaatataaaacagctggggagaaaaatataactcaagacgggattaaac

SEQ ID NO: 405066 - DNA, 1725 bp, Homo sapiens
agcgactcacaaaaggtcctcggccacggcgtgcgtcaccatggcgaccgccgccggcagccgcgccccgcccctctggcgggaccggccaccatcctctcgcgaggagcatcccgtgcgaccggaagtggggcggcgaccccggaagtccccgccgggtgcagcttggtcggttcgatcgccgccgggacctgacaccgcccggagttggcgtcccttctccctctccgagtgctgctcctgtcattgtggccatggacgataccctgttccagttgaagttcacggcgaagcagctggagaagctggccaagaaggcggagaaggactccaaggcggagcaggccaaagtgaagaaggcccttctgcagaaaaatgtagagtgtgcccgtgtgtatgccgagaacgccatccgcaagaagaacgaaggtgtgaactggcttcggatggcgtcccgcgtagacgcagtggcctccaaggtgcagacagctgtgactatgaagggggtgaccaagaatatggcccaggtgaccaaagccctggacaaggccctgagcaccatggacctgcagaaggtctcctcagtgatggacaggttcgagcagcaggtgcagaacctggacgtccatacatcggtgatggaggactccatgagctcggccaccaccctgaccacgccgcaggagcaggtggacagcctcatcatgcagatcgccgaggagaatggcctggaggtgctggaccagctcagccagctgcccgagggcgcctctgccgtgggcgagagctctgtgcgcagccaggaggaccagctgtcacggaggttggccgccttgaggaactagccgtgccccgccggtgtgcaccgcctctgccccgtgatgtgctggaaggctcctgtcctctccccaccgcgtcttgcctttgtgctgaccccgcggggctgcggccggcagccactctgcgtctctcacctgccaggcctgcgtggccttagggttgttcctgttcttttaggttgggcggtgggtctgtgtcctggtgttgagtttctgcaaatttctgggggtgatttctgtgactctgggcccacagcggggaggccaagaggggccctgtggactttcacccagcactgtgggggccttcagactctggggcagcagacatgctgcttcccatcagccagagggggtcagggctgccctgttgccaaacaactccctgaggcctctccgcaccacctcagcgggcaggaggtcccaccatgtggacagacatagcccaaggaggcaccacaggtctatgtgtgctgggggatgtcaggtgccacccaacgctgtcctggtggtatttacaatgacatcctcctcctccatcactccaggggtggtgtctcggccgcccctaccagctggctgagccccctggcctcctgcgctccctcacttccctcagttcccaaagctgcccagtccatggggacagaaccgtcactcagatccacattcaagtgtgcccaccctgcagtcttcatcctcactcagctgctgcctctggaggtgcctttggccacatgtgctgtgctgtttgtctcctcgacagggagcctgtccaccagcaggctgcggtcccagcgggtgcgtctgcagctcctccccttgggcatgacgatgctgcctgtgtcaccctctaccatctgaggtatcgtcggggatcctcagg

SEQ ID NO: 405067 - DNA, 1900 bp, Homo sapiens
agcgactcacaaaaggtcctcggccacggcgtgcgtcaccatggcgaccgccgccggcagccgcgccccgcccctctggcgggaccggccaccatcctctcgcgaggagcatcccgtgcgaccggaagtggggcggcgaccccggaagtccccgccgggtgcagcttggtcggttcgatcgccgccgggacctgacaccgcccggagttggcgtcccttctccctctccgagtgctgctcctgtcattgtggccatggacgataccctgttccagttgaagttcacggcgaagcagctggagaagctggccaagaaggcggagaaggactccaaggcggagcaggccaaagtgaagaaggcccttctgcagaaaaatgtagagtgtgcccgtgtgtatgccgagaacgccatccgcaagaagaacgaaggtgtgaactggcttcggatggcgtcccgcgtagacgcagtggcctccaaggtgcagacagctgtgactatgaagggggtgaccaagaatatggcccaggtgaccaaagccctggacaaggccctgagcaccatggacctgcagaaggtctcctcagtgatggacaggttcgagcagcaggtgcagaacctggacgtccatacatcggtgatggaggactccatgagctcggccaccaccctgaccacgccgcaggagcaggtggacagcctcatcatgcagatcgccgaggagaatggcctggaggtgctggaccagctcagccagctgcccgagggcgcctctgccgtgggcgagagctctgtgcgcagccaggaggaccagctgtcacggaggttggccgccttgaggaactagccgtgccccgccggtgtgcaccgcctctgccccgtgatgtgctggaaggctcctgtcctctccccaccgcgtcttgcctttgtgctgaccccgcggggctgcggccggcagccactctgcgtctctcacctgccaggcctgcgtggccttagggttgttcctgttcttttaggttgggcggtgggtctgtgtcctggtgttgagtttctgcaaatttctgggggtgatttctgtgactctgggcccacagcggggaggccaagaggggccctgtggactttcacccagcactgtgggggccttcagactctggggcagcagacatgctgcttcccatcagccagagggggtcagggctgccctgttgccaaacaactccctgaggcctctccgcaccacctcagcgggcaggaggtcccaccatgtggacagacatagcccaaggaggcaccacaggtctatgtgtgctgggggatgtcaggtgccacccaacgctgtcctggtggtatttacaatgacatcctcctcctccatcactccaggggtggtgtctcggccgcccctaccagctggctgagccccctggcctcctgcgctccctcacttccctcagttcccaaagctgcccagtccatggggacagaaccgtcactcagatccacattcaagtgtgcccaccctgcagtcttcatcctcactcagctgctgcctctggaggtgcctttggccacatgtgctgtgctgtttgtctcctcgacagggagcctgtccaccagcaggctgcggtcccagcggaacttgggagcccccagggaggggctagtgttggtaggtcctagacgtggttccctccagcctccccaaaatcaaccctggtgttgagagaacgtccttctgtccatcgtgggtaacagccttggggagggtgcagagctctgcagagccatgggccaggtggggctgcctcagtcctgtccccttgggcactgaggagaggggcccattcacctttctcctagaatgctgttgtaaataaacaaatggatccctggaaa

SEQ ID NO: 405068 - DNA, 1962 bp, Homo sapiens
agcgactcacaaaaggtcctcggccacggcgtgcgtcaccatggcgaccgccgccggcagccgcgccccgcccctctggcgggaccggccaccatcctctcgcgaggagcatcccgtgcgaccggaagtggggcggcgaccccggaagtccccgccgggtgcagcttggtcggttcgatcgccgccgggacctgacaccgcccggagttggcgtcccttctccctctccgagtgctgctcctgtcattgtggccatggacgataccctgttccagttgaagttcacggcgaagcagctggagaagctggccaagaaggcggagaaggactccaaggcggagcaggccaaagtgaagaaggcccttctgcagaaaaatgtagagtgtgcccgtgtgtatgccgagaacgccatccgcaagaagaacgaaggtgtgaactggcttcggatggcgtcccgcgtagacgcagtggcctccaaggtgcagacagctgtgactatgaagggggtgaccaagaatatggcccaggtgaccaaagccctggacaaggccctgagcaccatggacctgcagaaggtctcctcagtgatggacaggttcgagcagcaggtgcagaacctggacgtccatacatcggtgatggaggactccatgagctcggccaccaccctgaccacgccgcaggagcaggtggacagcctcatcatgcagatcgccgaggagaatggcctggaggtgctggaccagctcagccagctgcccgagggcgcctctgccgtgggcgagagctctgtgcgcagccaggaggaccagctgtcacggaggttggccgccttgaggaactagccgtgccccgccggtgtgcaccgcctctgccccgtgatgtgctggaaggctcctgtcctctccccaccgcgtcttgcctttgtgctgaccccgcggggctgcggccggcagccactctgcgtctctcacctgccaggcctgcgtggccttagggttgttcctgttcttttaggttgggcggtgggtctgtgtcctggtgttgagtttctgcaaatttctgggggtgatttctgtgactctgggcccacagcggggaggccaagaggggccctgtggactttcacccagcactgtgggggccttcagactctggggcagcagacatgctgcttcccatcagccagagggggtcagggctgccctgttgccaaacaactccctgaggcctctccgcaccacctcagcgggcaggaggtcccaccatgtggacagacatagcccaaggaggcaccacaggtctatgtgtgctgggggatgtcaggtgccacccaacgctgtcctggtggtatttacaatgacatcctcctcctccatcactccaggggtggtgtctcggccgcccctaccagctggctgagccccctggcctcctgcgctccctcacttccctcagttcccaaagctgcccagtccatggggacagaaccgtcactcagagccatgggccaggtggggctgcctcagtcctgtccccttgggcactgaggagaggggcccattcacctttctcctagaatgctgttgtaaataaacaaatggatccctggaaaaaaaaaaaaaaaaaaaaaaaaaaaaaaaaaaaaaaaaaaaaaaaaaaggggggggcaaattcccgggggggagcccaaaatactagcccaggccgcatgtttgatttttaaaaagggggcccccatataaggaggcatatattaatatcagagcggggcgggcgggcgcgcggtataaaaaaacaggtggtggagaggaaaaactgcgatgactgcggtcgaatctttgtgaggagaaaccacacccattcttggggggaggggagaaaataatgggagcaacaacacacctcagaggaaatataaaacagctggggagaaaaatataactcaagacgggattaaac

SEQ ID NO: 405069 - DNA, 1266 bp, Homo sapiens
agcgactcacaaaaggtcctcggccacggcgtgcgtcaccatggcgaccgccgccggcagccgcgccccgcccctctggcgggaccggccaccatcctctcgcgaggagcatcccgtgcgaccggaagtggggcggcgaccccggaagtccccgccgggtgcagcttggtcggttcgatcgccgccgggacctgacaccgcccggagttggcgtcccttctccctctccgagtgctgctcctgtcattgtggccatggacgataccctgttccagttgaagttcacggcgaagcagctggagaagctggccaagaaggcggagaaggactccaaggcggagcaggccaaagtgaagaaggcccttctgcagaaaaatgtagagtgtgcccgtgtgtatgccgagaacgccatccgcaagaagaacgaaggtgtgaactggcttcggatggcgtcccgcgtagacgcagtggcctccaaggtgcagacagctgtgactatgaagggggtgaccaagaatatggcccaggtgaccaaagccctggacaaggccctgagcaccatggacctgcagaaggtctcctcagtgatggacaggttcgagcagcaggtgcagaacctggacgtccatacatcggtgatggaggactccatgagctcggccaccaccctgaccacgccgcaggagcaggtggacagcctcatcatgcagatcgccgaggagaatggcctggaggtgctggaccagctcagccagctgcccgagggcgcctctgccgtgggcgagagctctgtgcgcagccaggaggaccagctgtcacggaggttggccgccttgaggaactagccgtgccccgccggtgtgcaccgcctctgccccgtgatgtgctggaaggctcctgtcctctccccaccgcgtcttgcctttgtgctgaccccgcggggctgcggccggcagccactctgcgtctctcacctgccaggcctgcgtggccttagggttgttcctgttcttttaggttgggcggtgggtctgtgtcctggtgttgagtttctgcaaatttctgggggtgatttctgtgactctgggcccacagcggggaggccaagaggggccctgtggactttcacccagcactgtgggggccttcagactctggggcagcagacatgctgcttcccatcagcccccttgggcactgaggagaggggcccattcacctttctcctagaatgctgttgtaaataaacaaatggatccctggaaa

SEQ ID NO: 405070 - DNA, 506 bp, Homo sapiens
tttggcaaaaacaaaaacaaacctggaagcctcaagacaatgaagtaaactttaggaagtggaaaaggcaggtggtgggcggctggcagggagtgcgggtccccgcccctcttcagtcctgccctcccctcctcagtcctgcccaccccgtgcagcccatgctgaggctgcagtggtgtcgtgggtgttacgtgcaggaacgtggagaccctgacgtgggctcactgcgtttggttttcttttcagaacttgggagcccccagggaggggctagtgttggtaggtcctagacgtggttccctccagcctccccaaaatcaaccctggtgttgagagaacgtccttctgtccatcgtgggtaacagccttggggagggtgcagagctctgcagagccatgggccaggtggggctgcctcagtcctgtccccttgggcactgaggagaggggcccattcacctttctcctagaatgctgttgtaaataaacaaatggatccctggaaa

SEQ ID NO: 405071 - DNA, 2476 bp, Homo sapiens
agcgactcacaaaaggtcctcggccacggcgtgcgtcaccatggcgaccgccgccggcagccgcgccccgcccctctggcgggaccggccaccatcctctcgcgaggagcatcccgtgcgaccggaagtggggcggcgaccccggaagtccccgccgggtgcagcttggtcggttcgatcgccgccgggacctgacaccgcccggagttggcgtcccttctccctctccgagtgctgctcctgtcattgtggccatggacgataccctgttccagttgaagttcacggcgaagcagctggagaagctggccaagaaggcggagaaggactccaaggcggagcaggccaaagtgaagaaggcccttctgcagaaaaatgtagagtgtgcccgtgtgtatgccgagaacgccatccgcaagaagaacgaaggtgtgaactggcttcggatggcgtcccgcgtagacgcagtggcctccaaggtgcagacagctgtgactatgaagggggtgaccaagaatatggcccaggtgaccaaagccctggacaaggccctgagcaccatggacctgcagaaggtctcctcagtgatggacaggttcgagcagcaggtgcagaacctggacgtccatacatcggtgatggaggactccatgagctcggccaccaccctgaccacgccgcaggagcaggtggacagcctcatcatgcagatcgccgaggagaatggcctggaggtgctggaccagctcagccagctgcccgagggcgcctctgccgtgggcgagagctctgtgcgcagccaggaggaccagctgtcacggaggttggccgccttgaggaactagccgtgccccgccggtgtgcaccgcctctgccccgtgatgtgctggaaggctcctgtcctctccccaccgcgtcttgcctttgtgctgaccccgcggggctgcggccggcagccactctgcgtctctcacctgccaggcctgcgtggccttagggttgttcctgttcttttaggttgggcggtgggtctgtgtcctggtgttgagtttctgcaaatttctgggggtgatttctgtgactctgggcccacagcggggaggccaagaggggccctgtggactttcacccagcactgtgggggccttcagactctggggcagcagacatgctgcttcccatcagccagagggggtcagggctgccctgttgccaaacaactccctgaggcctctccgcaccacctcagcgggcaggaggtcccaccatgtggacagacatagcccaaggaggcaccacaggtctatgtgtgctgggggatgtcaggtgccacccaacgctgtcctggtggtatttacaatgacatcctcctcctccatcactccaggggtggtgtctcggccgcccctaccagctggctgagccccctggcctcctgcgctccctcacttccctcagttcccaaagctgcccagtccatggggacagaaccgtcactcagatccacattcaagtgtgcccaccctgcagtcttcatcctcactcagctgctgcctctggaggtgcctttggccacatgtgctgtgctgtttgtctcctcgacagggagcctgtccaccagcaggctgcggtcccagcgggtgcgtctgcagctcctccccttgggcagcctggttctcccggaggacctttccttggggccctgcttcatgacgatgctgcctgtgtcaccctctaccatctgtaaacaactgggtgccttccccgaccacaccccaatgccttcccagcttggaagccaaggcagctgatgaagggagctcaggagagccgtcttcagctgggctggggttggggctgctgtgaggaaaacctgccattgtggccctggagagtcaccagcagctcttgggaaggacttgctgggaggctgagagaggctttgggcacagcctgctgtcttttccatttcctaaagtttacttcattgtcttgaggcttccaggttttgtttttgtttttgccaaagtagaaaaggcaggtggtgggcggctggcagggagtgcgggtccccgcccctcttcagtcctgccctcccctcctcagtcctgcccaccccgtgcagcccatgctgaggctgcagtggtgtcgtgggtgttacgtgcaggaacgtggagaccctgacgtgggctcactgcgtttggttttcttttcagaacttgggagcccccagggaggggctagtgttggtaggtcctagacgtggttccctccagcctccccaaaatcaaccctggtgttgagagaacgtccttctgtccatcgtgggtaacagccttggggagggtgcagagctctgcagagccatgggccaggtggggctgcctcagtcctgtccccttgggcactgaggagaggggcccattcacctttctcctagaatgctgttgtaaataaacaaatggatccctggaaa

SEQ ID NO: 405072 - DNA, 777 bp, Homo sapiens
agcgactcacaaaaggtcctcggccacggcgtgcgtcaccatggcgaccgccgccggcagccgcgccccgcccctctggcgggaccggccaccatcctctcgcgaggagcatcccgtgcgaccggaagtggggcggcgaccccggaagtccccgccgggtgcagcttggtcggttcgatcgccgccgggacctgacaccgcccggagttggcgtcccttctccctctccgagtgctgctcctgtcattgtggccatggacgttcacggcgaagcagctggagaagctggccaagaaggcggagaaggactccaaggcggagcaggccaaagtgaagaaggcccttctgcagaaaaatgtagagtgtgcccgtgtgtatgccgagaacgccatccgcaagaagaacgaaggtgtgaactggcttcggatggcgtcccgcgtagacgcagtggcctccaaggtgcagacagctgtgactatgaagggggtgaccaagaatatggcccaggtgaccaaagccctggacaaggccctgagcaccatggacctgcagaaggtctcctcagtgatggacaggttcgagcagcaggtgcagaacctggacgtccatacatcggtatgtggcccctacccttggggctgtggcctggggacaaggagcgtgtgtgggcagctcatcgggaggggtggctcacaggctgacgtgctgtctctgcatacctgtggttgctccctgacgtcaccaagcatcctctgtgctgggtccctgccaggaccc

SEQ ID NO: 405073 - DNA, 2650 bp, Homo sapiens
agcgactcacaaaaggtcctcggccacggcgtgcgtcaccatggcgaccgccgccggcagccgcgccccgcccctctggcgggaccggccaccatcctctcgcgaggagcatcccgtgcgaccggaagtggggcggcgaccccggaagtccccgccgggtgcagcttggtcggttcgatcgccgccgggacctgacaccgcccggagttggcgtcccttctccctctccgagtgctgctcctgtcattgtggccatggacgataccctgttccagttgaagttcacggcgaagcagctggagaagctggccaagaaggcggagaaggactccaaggcggagcaggccaaagtgaagaaggcccttctgcagaaaaatgtagagtgtgcccgtgtgtatgccgagaacgccatccgcaagaagaacgaaggtgtgaactggcttcggatggcgtcccgcgtagacgcagtggcctccaaggtgcagacagctgtgactatgaagggggtgaccaagaatatggcccaggtgaccaaagccctggacaaggccctgagcaccatggacctgcagaaggtctcctcagtgatggacaggttcgagcagcaggtgcagaacctggacgtccatacatcggtgatggaggactccatgagctcggccaccaccctgaccacgccgcaggagcaggtggacagcctcatcatgcagatcgccgaggagaatggcctggaggtgctggaccagctcagccagctgcccgagggcgcctctgccgtgggcgagagctctgtgcgcagccaggaggaccagctgtcacggaggttggccgccttgaggaactagccgtgccccgccggtgtgcaccgcctctgccccgtgatgtgctggaaggctcctgtcctctccccaccgcgtcttgcctttgtgctgaccccgcggggctgcggccggcagccactctgcgtctctcacctgccaggcctgcgtggccttagggttgttcctgttcttttaggttgggcggtgggtctgtgtcctggtgttgagtttctgcaaatttctgggggtgatttctgtgactctgggcccacagcggggaggccaagaggggccctgtggactttcacccagcactgtgggggccttcagactctggggcagcagacatgctgcttcccatcagccagagggggtcagggctgccctgttgccaaacaactccctgaggcctctccgcaccacctcagcgggcaggaggtcccaccatgtggacagacatagcccaaggaggcaccacaggtctatgtgtgctgggggatgtcaggtgccacccaacgctgtcctggtggtatttacaatgacatcctcctcctccatcactccaggggtggtgtctcggccgcccctaccagctggctgagccccctggcctcctgcgctccctcacttccctcagttcccaaagctgcccagtccatggggacagaaccgtcactcagatccacattcaagtgtgcccaccctgcagtcttcatcctcactcagctgctgcctctggaggtgcctttggccacatgtgctgtgctgtttgtctcctcgacagggagcctgtccaccagcaggctgcggtcccagcgggtgcgtctgcagctcctccccttgggcagcctggttctcccggaggacctttccttggggccctgcttcatgacgatgctgcctgtgtcaccctctaccatctgtaaacaactgggtgccttccccgaccacaccccaatgccttcccagcttggaagccaaggcagctgatgaagggagctcaggagagccgtcttcagctgggctggggttggggctgctgtgaggaaaacctgccattgtggccctggagagtcaccagcagctcttgggaaggacttgctgggaggctgagagaggctttgggcacagcctgctgtcttttccatttcctaaagtttacttcattgtcttgaggcttccaggttttgtttttgtttttgccaaagtagaaaaggcaggtggtgggcggctggcagggagtgcgggtccccgcccctcttcagtcctgccctcccctcctcagtcctgcccaccccgtgcagcccatgctgaggctgcagtggtgtcgtgggtgttacgtgcaggaacgtggagaccctgacgtgggctcactgcgtttggttttcttttcagaacttgggagcccccagggaggggctagtgttggtaggtcctagacgtggttccctccagcctccccaaaatcaaccctggtgttgagagaacgtccttctgtccatcgtgggtaacagccttggggagggtgcagagctctgcagagccatgggccaggtggggctgcctcagtcctgtccccttgggcactgaggagaggggcccattcacctttctcctagaatgctgttgtaaataaacaaatggatccctggaaaaaaaaaacacaaaacataacagcaagaaacacacaaagaacagcatcaaagagacaaagagaagggggcgcgcgcgcaacagaaacaccacgagagggggcaccaaatacaggaagagatccaccgatttttgcggaaaaacaggggggccacaatagagagcgcgcgataaca

SEQ ID NO: 405074 - DNA, 1677 bp, Homo sapiens
atcgctgctgctctcggtccagtggcttctccagcaccagctcagcgaatcggttgccatccccctgggtctgcacgtcaggcagaacgtagctgttgggggtgatctcgtactcgcgcaggactttgtgctgaccccgcggggctgcggccggcagccactctgcgtctctcacctgccaggcctgcgtggccttagggttgttcctgttcttttaggttgggcggtgggtctgtgtcctggtgttgagtttctgcaaatttctgggggtgatttctgtgactctgggcccacagcggggaggccaagaggggccctgtggactttcacccagcactgtgggggccttcagactctggggcagcagacatgctgcttcccatcagccagagggggtcagggctgccctgttgccaaacaactccctgaggcctctccgcaccacctcagcgggcaggaggtcccaccatgtggacagacatagcccaaggaggcaccacaggtctatgtgtgctgggggatgtcaggtgccacccaacgctgtcctggtggtatttacaatgacatcctcctcctccatcactccaggggtggtgtctcggccgcccctaccagctggctgagccccctggcctcctgcgctccctcacttccctcagttcccaaagctgcccagtccatggggacagaaccgtcactcagatccacattcaagtgtgcccaccctgcagtcttcatcctcactcagctgctgcctctggaggtgcctttggccacatgtgctgtgctgtttgtctcctcgacagggagcctgtccaccagcaggctgcggtcccagcgggtgcgtctgcagctcctccccttgggcagcctggttctcccggaggacctttccttggggccctgcttcatgacgatgctgcctgtgtcaccctctaccatctgtaaacaactgggtgccttccccgaccacaccccaatgccttcccagcttggaagccaaggcagctgatgaagggagctcaggagagccgtcttcagctgggctggggttggggctgctgtgaggaaaacctgccattgtggccctggagagtcaccagcagctcttgggaaggacttgctgggaggctgagagaggctttgggcacagcctgctgtcttttccatttcctaaagtttacttcattgtcttgaggcttccaggttttgtttttgtttttgccaaagtagaaaaggcaggtggtgggcggctggcagggagtgcgggtccccgcccctcttcagtcctgccctcccctcctcagtcctgcccaccccgtgcagcccatgctgaggctgcagtggtgtcgtgggtgttacgtgcaggaacgtggagaccctgacgtgggctcactgcgtttggttttcttttcagaacttgggagcccccagggaggggctagtgttggtaggtcctagacgtggttccctccagcctccccaaaatcaaccctggtgttgagagaacgtccttctgtccatcgtgggtaacagccttggggagggtgcagagctctgcagagccatgggccaggtggggctgcctcagtcctgtccccttgggcactgaggagaggggcccattcacctttctcctagaatgctgttgtaaataaacaaatggatccctggaaa

SEQ ID NO: 405075 - DNA, 2220 bp, Homo sapiens
agcgactcacaaaaggtcctcggccacggcgtgcgtcaccatggcgaccgccgccggcagccgcgccccgcccctctggcgggaccggccaccatcctctcgcgaggagcatcccgtgcgaccggaagtggggcggcgaccccggaagtccccgccgggtgcagcttggtcggttcgatcgccgccgggacctgacaccgcccggagttggcgtcccttctccctctccgagtgctgctcctgtcattgtggccatggacgataccctgttccagttgaagttcacggcgaagcagctggagaagctggccaagaaggcggagaaggactccaaggcggagcaggccaaagtgaagaaggcccttctgcagaaaaatgtagagtgtgcccgtgtgtatgccgagaacgccatccgcaagaagaacgaaggtgtgaactggcttcggatggcgtcccgcgtagacgcagtggcctccaaggtgcagacagctgtgactatgaagggggtgaccaagaatatggcccaggtgaccaaagccctggacaaggccctgagcaccatggacctgcagaaggtctcctcagtgatggacaggttcgagcagcaggtgcagaacctggacgtccatacatcggtgatggaggactccatgagctcggccaccaccctgaccacgccgcaggagcaggtggacagcctcatcatgcagatcgccgaggagaatggcctggaggtgctggaccagctcagccagctgcccgagggcgcctctgccgtgggcgagagctctgtgcgcagccaggaggaccagctgtcacggaggttggccgccttgaggaactagccgtgccccgccggtgtgcaccgcctctgccccgtgatgtgctggaaggctcctgtcctctccccaccgcgtcttgcctttgtgctgaccccgcggggctgcggccggcagccactctgcgtctctcacctgccaggcctgcgtggccttagggttgttcctgttcttttaggttgggcggtgggtctgtgtcctggtgttgagtttctgcaaatttctgggggtgatttctgtgactctgggcccacagcggggaggccaagaggggccctgtggactttcacccagcactgtgggggccttcagactctggggcagcagacatgctgcttcccatcagccagagggggtcagggctgccctgttgccaaacaactccctgaggcctctccgcaccacctcagcgggcaggaggtcccaccatgtggacagacatagcccaaggaggcaccacaggtctatgtgtgctgggggatgtcaggtgccacccaacgctgtcctggtggtatttacaatgacatcctcctcctccatcactccaggggtggtgtctcggccgcccctaccagctggctgagccccctggcctcctgcgctccctcacttccctcagttcccaaagctgcccagtccatggggacagaaccgtcactcagatccacattcaagtgtgcccaccctgcagtcttcatcctcactcagctgctgcctctggaggtgcctttggccacatgtgctgtgctgtttgtctcctcgacagggagcctgtccaccagcaggctgcggtcccagcgggtgcgtctgcagctcctccccttgggcggaagaaactggacagggtgctccgggaggatgccgagaaggggatccgcaagaagaacaaagggtgcgagacgtggacttctgcgtaacgcgatgtcgccagctgctaaccacggcgaggcggtcctcccagaagctgcaagaccagatgtcgacccataggactgggggagtgcacccaaagcaagtcattggtccaaggggacccaaggacgcatgcgacaagggccgctgaggcagcgatggtacgcgtggctggcaagggacgtgcccatacaagttgaatgagtacgagggtctcccgtaggcagagatgggtcgccagcaagccttcggtagcggtaccaggaactattgcgcgggggaaagggcatgggaagtaccagagggtaagcgtcgggaacaacccaatcgcctggacccaactgcccagcaagcgctgccagagtgggaacaagccatcgtcctatgcagggatccggccaggatggagaagatgtgcgtgggagggcgccagagtcccaaaaataacagcccaagcgggcgcgagggg

SEQ ID NO: 405076 - DNA, 1615 bp, Homo sapiens
agcgactcacaaaaggtcctcggccacggcgtgcgtcaccatggcgaccgccgccggcagccgcgccccgcccctctggcgggaccggccaccatcctctcgcgaggagcatcccgtgcgaccggaagtggggcggcgaccccggaagtccccgccgggtgcagcttggtcggttcgatcgccgccgggacctgacaccgcccggagttggcgtcccttctccctctccgagtgctgctcctgtcattgtggccatggacgataccctgttccagttgaagttcacggcgaagcagctggagaagctggccaagaaggcggagaaggactccaaggcggagcaggccaaagtgaagaaggcccttctgcagaaaaatgtagagtgtgcccgtgtgtatgccgagaacgccatccgcaagaagaacgaaggtgtgaactggcttcggatggcgtcccgcgtagacgcagtggcctccaaggtgcagacagctgtgactatgaagggggtgaccaagaatatggcccaggtgaccaaagccctggacaaggccctgagcaccatggacctgcagaaggtctcctcagtgatggacaggttcgagcagcaggtgcagaacctggacgtccatacatcggtgatggaggactccatgagctcggccaccaccctgaccacgccgcaggagcaggtggacagcctcatcatgcagatcgccgaggagaatggcctggaggtgctggaccagctcagccagctgcccgagggcgcctctgccgtgggcgagagctctgtgcgcagccaggaggaccagctgtcacggaggttggccgccttgaggaactagccgtgccccgccggtgtgcaccgcctctgccccgtgatgtgctggaaggctcctgtcctctccccaccgcgtcttgcctttgtgctgaccccgcggggctgcggccggcagccactctgcgtctctcacctgccaggcctgcgtggccttagggttgttcctgttcttttaggttgggcggtgggtctgtgtcctggtgttgagtttctgcaaatttctgggggtgatttctgtgactctgggcccacagcggggaggccaagaggggccctgtggactttcacccagcactgtgggggccttcagactctggggcagcagacatgctgcttcccatcagccagagggggtcagggctgccctgttgccaaacaactccctgaggcctctccgcaccacctcagcgggcaggaggtcccaccatgtggacagacatagcccaaggaggcaccacaggtctatgtgtgctgggggatgtcaggtgccacccaacgctgtcctggtggtatttacaatgacatcctcctcctccatcactccaggggtggtgtctcggccgcccctaccagctggctgagccccctggcctcctgcgctccctcacttccctcagttcccaaagctgcccagtccatggggacagaaccgtcactcagagccatgggccaggtggggctgcctcagtcctgtccccttgggcactgaggagaggggcccattcacctttctcctagaatgctgttgtaaataaacaaatggatccctggaaa

SEQ ID NO: 405077 - DNA, 240 bp, Homo sapiens
atccgccaatcctgggaaatgtgtaaaatcctgttcctgaaaaccggccgggttctcaaagtgtcccggctggcgtgttttgctagtcacgaaacatgatccatacgctgtattttaggactccccatctgtcggcatcggggagcgttttcccttgaggaagctcaaagcgtgtcagctcactgggaggggaggcagcagaagggtctgtgataacagagtggatccagagggctgggg

SEQ ID NO: 405078 - DNA, 321 bp, Homo sapiens
actccttcgacggtgtactgagcttaggtagggctcagctctaaccctgagtaaacatgacccagtttttttgttttttttgttgtttttttcctgaatacagaaacctgggttgacaggttttttttccctgttgggcactttataagatgttactctactgccttttaaacatctgtggtttctagtaagaagtaagctctaattataattgtcatttccctgtgtcattcttctctagctactttcttttcttttttctttttttttttttttttggaaagggtttcatccatttttccccccggggggcatagcatg

SEQ ID NO: 405079 - DNA, 206 bp, Homo sapiens
cctactgaaaggacagacatataaacaaataattaaaatatcatgtggggggggtttctgcttcccgtatatttgagaacagcatcaaacattcccatgaccattaaaaatctagataaggggcctggcatggtggttcatgcctgtaatcccagcattttgggaggccgaggcaggggatcacgaggtcaggagttcgagaccag

SEQ ID NO: 405080 - DNA, 376 bp, Homo sapiens
cacagccccctggttctgctggttttaacacactgtaaccaggtgcacctctgccatagattatctacattgataatggtctttccagaaagataactgaggaactcatatttagtcgttctgattcacatgtatcaacttgaactaaaggaggaccacatcattagaactaatggacagatcgaagatgaaaggaagaataaaggtctaggagctggtggacagtgtggctggagtatgtgtccagaatgggtttgccaggctccggccattctggactgtggagggacttgaaccccaaaggtgatggcaccccatggagagagctcatcctgcttggagaatgctatgaaagtaacgttccgggatcctctag

SEQ ID NO: 405081 - DNA, 210 bp, Homo sapiens
cagcattcagacacttgtaaattattttttgtgtgattttaaaacagcaaaatgacatttgagtgggaatgtttttcagttttaagggtgctcttccagaagagagactccatggttaacttcctcttgaagccatatgaaatgttcatggagtgctttgactctgcatttgtagccacatgaatgcaacagtgatactgccagtttaat

SEQ ID NO: 405082 - DNA, 428 bp, Homo sapiens
caccctgaccacatgggctccatgctgaaggctgctttacttctggacaggccttcacctgcatagaatggaagagacctggtggcacttgtcatggtgagacagtggctctcttctgagggagctccacagccaccatggatttaggtggacaaacagtggtatcctggtctgtggctagcatgggccccagagctgtgtgtgatgcatgtgttcctgatagcacaggggttctcagtgagggtggttctgcccctagggtatatttggtagtggctgaaaacagttttggttgtcactacttgggatggggttgctactggcatctcgtgggtggaggctgggatgctgctagctgtcctacactgcacaagacgaccccccatagaagacagtatctagccccagcatgaggggtaatgaggttg

SEQ ID NO: 405083 - DNA, 582 bp, Homo sapiens
atgttgctcaggacactatgtatgttgaacgttactgatgaagcaaagggtggcaaaaatatgctgctttttaagaagccaatgagcacctctgattgagaaacaggcttgcagaacacgtgggtgtcaccatagaaacaaatccttcaagatgatcagagcctttgagatagagtacccagtggatgggttttggaggaaagtgagagagagatcctcgctataggtggagtaaagatctaatttacacacccaactggatcatacaagcattccaaggctccttcagctgtgggttctttgtgtccttccattagcaatacaaatgagaagaaaatatttttgcaaagaagtgggaaagaatcctaggtcatgacagaggaaggtcacagagttcagacctggcaaaaccttccattcctactaagctatttcactgttattattcctcaaaactaagtgcaccgggcacagtggctcatgcctgtaatcccagcactttgggaggccaaggcaggtggatcacttgaggttaggagttcgagaccagcctggccaacaaggtgaaaccccatctccact

SEQ ID NO: 405084 - DNA, 413 bp, Homo sapiens
agcttgtgactatactgtaaagcaggcgtacggtcggaattccggatcgggagggagcgtcaaaaccaagggcaaacacggaaacggatcacactgtgaattaaccttggagagaaagtgttttaaaaagaagaatggaataactgagcagatgctaatcctagaatacataccgctttaattattccaggaagtttcacagaaaagccagttttatttaaaatgtactgctaattaccagggaatcatcaccctcctaccggctgaggttagcaccggaacatgaaatgtttctacttggacctaaagtgaggcagcccttgcctgtcctgtctgaggaaaacttcactctgccaattgcttttgtgtcctgaatctcctctcctctttaataaaccatattttttccccta

SEQ ID NO: 405085 - DNA, 321 bp, Homo sapiens
ttggttgttgtagaaatattcaaacatatacaaaagtagcaagagtaatgtaatgaatccccatttacctactacccagcctcaataatgattagtacatctctgtcccctttttaattggactattttaaagtaaatctcagatatactataatttcacctgtaagtacattggtacatatttcctttttttccttctcattttctcctttgaatttcaatatgtatttctaaagataaggactctttaaaaaaaaaagtcattattacaacctaaaaaaagaacagtattttttatgtcaccaaatatccagtcagtgt

SEQ ID NO: 405086 - DNA, 220 bp, Homo sapiens
ggggatgagaaataaatctattcctatcatatcatactgattatgttatactgactagcacagttctgggcacacattaatcacttcacagaaaacgtgctgactttaatatcatagtaggggatttgggttgtaacggagatggagaactttgtatatatgacttttccatctttacaatcttctttcactttgtagatgcattaaaaattgcctggct

SEQ ID NO: 405087 - DNA, 608 bp, Homo sapiens
ttgttagtgagctactggatatccatagtcactatcaaagagtaggcctctataaatagaagcagagatcaacaagtagatgaatggtaaagtatgaacagaaagtggaagaaccatttaaacatgtatttgtcccatagtaaatgctttatgtgtatttccttaccagctaatccttataacataaaaataaaaaattaatgctcatggaagttaagaaaactcagatcacacaggtagtaagtggcagattttacattcaaatcctggactgtctgattcctaagctcataatccacaaactcttcacctttcactacagcacaggaaaaatgtaagaaaagaaaaaaaaaaaaaaaaaaagggaagaaaagctagggagggagaaagttagaagaaaaaagatgatattgtcagagaaattaatctgtacccccatggttacaagtttggctgggtgtaaataatcttttaaaattataatttctacaggaaaaataaattgggttcccaaacaattcactttcccaaagaaacttgaacccaagaaattaagttgggaacttcgtatatatataacactttggatattttaaagtacttctata

SEQ ID NO: 405088 - DNA, 386 bp, Homo sapiens
gaaaaaaagcaaagccaaaatggaaaattggcatataatctgttatttggtggtgatgtgtgtccctaaattaccaaacatgtgataaagaaaacaacaaagaagaaaacctttagccttagctcagagaagcagctagaatatttcatcaactctccctttccctgccaacaaagaaaaatccaatttgggatgtaaccaaacttaaaaattgtatcataaaatttacttttaaaattcttttttgggatagagtgtcaaaaataaaaaagcaactgaaaagatgtggctgaaaagatgagtttgtaataaaagtaaatgcatgtcttcatgaaggacctgaatagcatttttctatcaaagaaaataaatatattaatactcag

SEQ ID NO: 405089 - DNA, 379 bp, Homo sapiens
ctaataaaatgcttcactcacacccagttgttttactcaagcgagtagttttatggtaactgcatttggggtaacagtcttacagaagagttaacacaatgggcagattccaggtgtgctgtcatttggaggaggcaaatccatacagacaagaagtagattagtggttgcctagagctggaggagggtagggataaggaatggattactactgggactgggtttctttttggggtgatgaaaattttctaaaattgattgtggtgatggttgcctaactctgtgaatagcaatgaattgtgctattgtacactttaggtaaatggtatggtatatgagttatatccccaataaagctgttaaaaaagaatgagaaaga

SEQ ID NO: 405090 - DNA, 860 bp, Homo sapiens
tccagtcacttcctggacctccaacctcagaccagacctgactcctctgtaacatgctctacaggtagctggtcctcttccttgcacttctcatggcatgtgagtgaagtctcctccaacttcaacactgggttcccagcgttggccatgtgggagatgcttgatgaatactggttggatgaatgaatgatttcaaccaagactcaatggcccagttattcttttctaagtgctcagatgaatccctcaggagaataaatatggcaccaagtattttagaaacatacatggtgctattctgtaatgaataattttacttcaatagactgtcagacctcttaactcatcttcctgactctaggctaacttcatgctgatctgactcaccctctcctaaactccccattgccccaggatagagtgagtcccagatcctgcagcctcttttccagcatgaccctccccggtggtgcagtggtgccccagcataccacatgtgcatgcttctgtggatctgaacctgactggaaggcccacacccctttctatcgagaaaattcctctttctgcagtcccagttctggagctagccatcaaggaggccttccttgcccattgctcagcttgcactcttggcctggcctctgactcttgtaccttttgtgtccttccattactacttacatcttcagtctgtcttagttgatggtgaacctgaggacggaagccatcgtggagtcgcctggcaggtcaacactcacacagcatctggaacacaggggccttcagcctggatgtgcttccattccataaggagttcctgcaaagcagggggtgtaagggcactatgatagtaaaaa

SEQ ID NO: 405091 - DNA, 1301 bp, Homo sapiens
tctgggatgatgcccaggctggtctcacagatcgaggggcactggctggtgatgggtgcccccaaaagacagagcagcgtcagaggagaggagagcacaggatgaggctgggagctcctgggtgactgggaaggggaggcaagaagaccatagggtccgtgcaccattcccagtccaggacgagtccttggatggatttaggtagattgattatcagagtcagatttgtgtttttggaaaaatcagcaccggattggaggctgatgcgacgcccgattagaggagggaggagagggggtgatggccaagtccagggtaggtggggatcctggaggaagccgtgccttggggatggggaggacactcagattcagagcacccaggggcccagtttcctatgaaatgggagcatgaagttgaagtgagggctgagcagaggggagcagacacgctcggggactgtctatgggcattaaaaatgtataaccattttagcaacaggcggcgagtcaaaaaacaaagtgtgtttatctaaactgggcaattccacttctaggaatttatcctaagggttggttgggggaataatcaaagctgtaaccaaatctttataacaagggtggttagctcagcattattagtgatgggagaaaactggaaaaaatccaaatatctaccagaaagggtgtgaaaaaacacaattgtatttgggggactgttgttgtttttgttttgaaacagtcttgatctgttgctcaggctggagtacagtggcgtggccacagctcactgcagcctcaacctccagggctcaaaagatcctccagcctcagcctcctgagtagctaggactacagatgcaggccactacacctggctaattttgattaggattattattagtttagagacagagcctcgctatattgctcaggcctgtctcaaattcctaagctcaagcaatctttctgcctcagtttcccacgtgctggaattacaggcgtgagccactgcacctgacccaactgtgtttttaaagtatatatgcattttcaaaaacctgtcagaaaatatagaaaaatgtcaatggtgtgtctggctggctgatgggatttcacctaattttaatgtggctttataattttctggttttgtgaagttgttcacaaaaagagacatttcttctaatataatttttaatacaacagtaatgtactcatgtgcattactctttttgtaatgagtatattacaaaatgtaatgacttttgtacattactcttttttcttgccaaaaaaaaa

SEQ ID NO: 405092 - DNA, 448 bp, Homo sapiens
aaagatttagactcccacacaataatagtgtgagattttaacaccccactcacaatactagacagatcatggaggcagaaaattaataaagttattcaggacctgaaccgagcactgaatcaaatagacctgatagacatctgcagaactctccaatgcaaaacaacataatacacattcttctcatcatcacatggcacatactctaaaatcagtcacataattggaagtaaaacactcctcagcattattagtgatgggagaaaactggaaaaaatccaaatatctaccagaaagggtgtgaaaaaacacaattgtatttgggggactgttgttgtttttgttttgaaacagtcttgatctgttgctcaggctggagtgagccatgattgtaccacttcactccagcctgggtaacagaggaagaccctgtctcaaaaaaaaaaaa

SEQ ID NO: 405093 - DNA, 147 bp, Homo sapiens
ctcatgtaactagagaaataagaagaatccaaacccacggcgaggaggagaaaagaaataaagaccagagcagaacaaaatagaattgaaataagcaaacaaacaaaatacaaaagataaatgaaacgaaaagctggttctttgaaa

SEQ ID NO: 405094 - DNA, 226 bp, Homo sapiens
ccaagatccttgggtgtgttttggggttgtccatacatcctctgaaagtgtcaacagcatttggggcatttgtctgagagtccatagagttcatcaaattctctctgatgctgaacagtaagaacagcagctttcaaataagtggtccaaagtcctactgtgcaacagtcacctgcagccatgcccacctaatggggactccttttattgggttctggggtttgcg

SEQ ID NO: 405095 - DNA, 183 bp, Homo sapiens
aaaaactttgccacagaaaaacaaaatattttttcccagttttgttttgtatttgaactaggagaaaatgtttcccttagggaaaaaattaggcaagtttcaaacaaaactagaaactgaatagatctaaagtatcagagtcttttgtgatctagatctcacagctgggatacatttgcagaa

SEQ ID NO: 405096 - DNA, 433 bp, Homo sapiens
aaaaattagctgggcatggtggtgcacgtgtgtagtcccagctactcaggaggctgaggcaggagaatcacttgaacccaggagacagaggctgcagtgagtcgagatcatgccactgcactgtagcctgggcgacagagtgagactccttcttgaaaaaaaaaaaaaaaaggaaaagaaaggagcctggcaaagaaagtaaagaaagtcagccctctcgatgaagggctgtgcacaggtgctgaatctggtaaatccctcgccctggtcccacagcaaccaaggcctccccttggtggcctgagtgccgccttctctcggggacgcctcttagccttcactggtgctgttctgcatgcctgaaacatccttctcctcttctcccatctccactctaagcgctccccacccttttctattcagccaggatccc

SEQ ID NO: 405097 - DNA, 514 bp, Homo sapiens
tcctggcttagccgggcacggtggcactccctgtagtcctggctactcaggaggctgaggcgggtggattgcttgagctcaggagttcaaggctacagtgagctgtgattatggcacgcactccagccagagcaacgaagtgagaatttatctctaaaagcaaaacaaaacaaaaaccctggaatatatcctaaaagaaaataaatgcagcgtatgggagaaagacacaccaggcggagagcatgagccaagactcaaaagtccggaaaacacgcagcatggtgagtgaatcacaagtagcacacacagctagaagacgctttcaaaccccgggatgatcggccccggtggggatgatttcagcagccaagagactattaacaggacttctacttctggccaagaagagtaacagtgatcagattgaccctcccatctaaaatacattttcttttaaacacaaaatatgtagaacagtggttttcaagacagtggacttcaggcaacaaaggag

SEQ ID NO: 405098 - DNA, 216 bp, Homo sapiens
gtgtggtgatacagcagtggatgagacagagaggtacatctatagagtctccatttatcagggaaaataaataaagacacacataaggtcatttctgataatgacaggtactcccatcacaggatgatgggcagtgggtcagggaacagacagtatctttagatcgggctgggaagatgagatgatgggcaagcttcatctgcaggatgaaaatgg

SEQ ID NO: 405099 - DNA, 270 bp, Homo sapiens
  misc_feature (197)..(197): n is a, c, g, or t
  misc_feature (206)..(206): n is a, c, g, or t
gttctaatagaagtaggaaatgaacacttcgtgggatgggtaaacagtgggagtcatggccaaaaatagtttagaatggatcatttactgcaatggttttcaagcacttttctttctttctttttttacagaatcagggtatcactcttgcccaggctggtaattttttatttttttagagacagagtcttgctatngtttcccanggctagccttgagactccatggaattcaagtgatccttccgtgcctcggacctcccaatagtac

SEQ ID NO: 405100 - DNA, 374 bp, Homo sapiens
aaccatcccatagtcctaaaataattactgcttctaatatagactgcacatgatttaattacttcacattgattttaaaacaaaacctacatgcaatagttgctgacagaagtttagacccgatgccttttcagccaggataggtacaagcactggcgcgtgtgacagcaggcttcaaacctcattcagcagacgggatagtaggctagataataaacagcaattagaactcactgtgataaaggccatggtaatattgttagagagtgctacagaaatgcacagtagtagttctctactcagaccaagagatcaggcagggcttcataaacatctccatgtaatttgccttacccgggctgttgcctaccctg

SEQ ID NO: 405101 - DNA, 299 bp, Homo sapiens
tcaggatacctagatgctcctccataacagggtcagtgagctggaatgttgaggactttcagcattgcaaggatcctccggtcacttaaggccattcagcctgatattgtcagtcttgcaatttcaggagcaaaaagtaaattccgtctttatctgttccaagaatgacacgagggccatggtcggtgattcagtagctgagacactactagtctcttccaggcccagagtaggaatttccttccgagcagcaacttgaatttgcataggattttccatgtcaccaccctgcaccttcc

SEQ ID NO: 405102 - DNA, 180 bp, Homo sapiens
tgaagaatgccaatatccttgtcacattccaggagaaattattgaataatttaatcaaaataacagataagcagaattcaaagaaactaatggcaaccacaaggtcagacacagaatctgtatagttcaacacagcaaagtaatagcaaatccatgtagaaaaatctctcataccaacaa

SEQ ID NO: 405103 - DNA, 300 bp, Homo sapiens
agccatcatttatgaagttaaaagcctaagtagtcatttagaattctttcatcactatggaaaatgggatggtttcctttagtcttggaaattcagctctcaaaagattatttcctcgcaggcacctggcttacaatcaggatgagctgcctgtgggtgatgatttgattttctttgaaatatggggaaaaggaggaaggattcaacttttgcaatttgtacagcctatcatcaggtgaagaaaacatttagcatttcaagattaaatttttatttgacttttccagtaatttatcacag

SEQ ID NO: 405104 - DNA, 295 bp, Homo sapiens
gcacttaaggcccagttcaggcacctggcttctgccatcttgaggcttgggcacccctagtggagtcctcttctggttcctcggcctgtggtgggtagaggaggaagagagagagtgaggaagatcatgctgcatgggtggggctcagcagcacagccacacccaaccacagggtgccacatgccacacaagagaaggaaatgggtttggtgaacactgagcagtctccacactggaaagagatgactgacgatccatgcaggcaattccatgtgctgtgggggagagatccaaa

SEQ ID NO: 405105 - DNA, 1343 bp, Homo sapiens
atgaccttcaaaccctgaagttaactaaaggttcatattttaaacttctgttgtttatctacacttatactttagctgacctcatcctgtctcatggttttatgtacagtactttttaacttactctcaaatttatatcaagtataacctcttccctgaactccagagtcatgtctaattgtctaatatcttcactttaatgaataatggtcatctcaaacttactgtatccaaagctaaaatcctgattttctgtcccaaaatggctccttccatacacttcccatcatatggggaagaaaaccccatgctacttgttcaggccacaaaccttagagttatccttactctcctctttcaccctacatccaatcccgtagcaaatcatgattataccttctatatataatcagaatcaaaccacgttttgccactgtcactgctaccatccattagtttgcaagataaactcatctctctcattttgttgcaataatttttgaactgttttctttgcttatacccttccgattttctggcatctctaccctttccattatactctccacaccgcagctaaggtcatcctttttgatgatgatgctttttaagagcaattatgtcactcttctgcttaaagaccccagtgactccccatctcacttacagtaaaagccataggccttatggtggcctgcaagaccctgcataatcattttgcctgctgcctttcttgtaattattgtgtcattggaacacaataatgcccattcatttatctgttgtctgtgtttgctttctctaaaatgtcaaagttgaatagttgtgacagaaactatatggcttgcaacacctggactatttcctatttgtcccttttcaggaaaagtttgctgaccccctgatctagagcataagattcttggtgacagggactcattttaatcgcagttgatttcatatcatttcaactgtgatttggcatctagtagattttttaaaattcttgaagggtggacagatctagatatatatgaatagggtgctagtttcttttctacttctactcctttttttctactagtttctactgcaaacttgctcccaagtaaatgcatgatgttacaacttctcagaagatgttcatggagcctaccacgctgctgaactgcccaatctgtggtcattctagtcttcatagacttgaaagctaagctatttccagtgataagactacctgaccaccttatgacaatggcaggtgaaagttgtagaaaatattggaatgttcctcttacggtgtaccaggagagcagagtgctgattaaatgtttcttttccta

SEQ ID NO: 405106 - DNA, 907 bp, Homo sapiens
tggtgaaaccccatctctacgaaaaatacaaaaattagctgggcgtggtggcacatgcctgtaatcccagttatcgggtaggctgaggcagaagaattgctggaacccaggaggcgaaggctgcagtgagctgagatcgcgccactgcactacagcctagtgtgacacagtgagactccaaaaaaaattgggtaaaaatagaatgtataactttcagccactagaagggggagaacaatttaaaaaataaatttcttggccatggctcatccctgtagtctcagcgctttggcaggactatcgcgtgaagccaggagttcaagactagcctgggcaacatacatagcaagacttcgtctctactaaataaaaaatagctgggcctggtaacaagtacccgtagtcccagttactggaaaggctgaggagggaggattgcttgatcccaggagttgcagatttctgtgagctatgatttcgccatgcactccagcctgggcagtagagcaagaccctgtctagaaaaaaaacaaagaaaagaaaacttccccaaaaggtacagaggtatgaagggaataaagaagtatgaagcatagaaaaaggcagggcaaataaaagcacaacataaaatgatagaaacaaattcaaatatatcaatcacagttaaacataaaagaataattttagcagttaaaagatagggatgatcagttcagattttttttaaaaatgtggctatatagagagacatatctaaaatagaaaagttaaaaggcagttactaaccaaaaacaataaaaaacataccgctatagtagctgcatgaataaagacgttaagacccaaaccaaaacattattaaagagggctgggtgcgatctcagctcacaatcactagtgaattcgc

SEQ ID NO: 405107 - DNA, 186 bp, Homo sapiens
aaagcccgttgttatatattctcatatttaatatgtgtaagatataaaataaaatgagcatccctgaaactatcacacagcttaagaattagagtattaacaatatcattgcatccacctgtatttttcttcctatattattcctttcctttcctttcgagataatcactattctgaactttgaat

SEQ ID NO: 405108 - DNA, 446 bp, Homo sapiens
gcagtctgtgaggagtgggccctcaccagacactgaatctgctggttggatttctcagccttcagaactatgagcgataaacttctgttgtttatgtttctgaatgagcacaggggatgagggaacagaaagaaggacaactcttaggtctctggcttgcttgactgggtagttagtggtgtcactgagtgagagagagagagagagtacagcaaaagatttagagaaaagtgaatgagttttaggcttattgattttaaggttatctgtggggcagccaggtggagaggtctcagacagtgttaatatgggtcaggagatacagattggggagacttccttatataggtgccaatagagtgcttggatatgacatagatacctgtctgtggtgagttatctcaactgctcttaggggctagctgagtgataaatgaagccatatg

SEQ ID NO: 405109 - DNA, 600 bp, Homo sapiens
aatgagactttttaattattctttcatgccctccttcagttcatgtttacacctgtaactactgcagtcccattatttttcttgatggaataggagaactcagcccagattcttatccacccagactatctctaggagaactacttggtgtcagccttgcaaataccattctcagaggtttcgtgtcatggggggagtagccgcctcagatgcacccagatcccaccaggtgtcgtgcgtagcaccccatgaagggagagcagccagggtgtgtggagccatgtccaaccatgagagggaaggctgctttttctactgttcccaatccttttctccatcttttgactttctgccaccaactatagatagacagagattgagacccccaaaacaaagttgatttattgcaaaataaatgtgtgatactctctcacattgcctgtttccttacctggttggcagtaggtcctcagaagtttgcgccgtggctgggcacacacctgtaatctgagcactttggcaggctgaggtgggagaatcacttaaggccaggagtttgacactggcctgagaaacatagcgagaccctgtctttacaaa

SEQ ID NO: 405110 - DNA, 310 bp, Homo sapiens
gaggcagagtctcactctgttgcccaggctggagggcaatggcacaatcttggctcactgcaacctctgctgcctgagttcaagtgattctcctgcctcagcctcctgagtagctgggattacaggcgcccaccaccatgcccagctaatttttgtatttttagtagagacagggtttaaccatgttggccaggctggtcttgaactcctgacctctggtgatccacccgcctttgcctcccaaagtgctaggattacaggcatgagccactgccggctgccccaatttcttaatttgtaaggtctaaac

SEQ ID NO: 405111 - DNA, 303 bp, Homo sapiens
ggtggtgaatgggggccactgtgagtgctggaaacctaagccggtaggtgggtggtggaagtgcagagtctgccctcttctgcccttcagcagtaactgaaaggggtgtcatttggaatgtcagagttggaaggagcctcagaattgattgggatccatcaatctcttaaagatgagaaagaaagaggaggtcgggcacaatggctcacgtctatgataccagcattttggaaggctgaggtgggaggattgcttgagcccaggagttccaaaccagcctgggcaaccctgtctctacaaatg

SEQ ID NO: 405112 - DNA, 560 bp, Homo sapiens
ctaagtgaaagaagtgaaacacagaaagccacattccgtatgactccatttatgtgagatatccagaatgagcaaatccatagagatagaaagcagattaatagttgctaggggctagggggaggggtaaatgggaagtgactacttaatggtacagggttgccatttggagtggtgagaaagttctggaaccagatagtggtggtggttgtacaatattgtgaatgtatttaataccactgaattgtacactttaaaattgttaaaatggcaaattttatgtgtattttactacaataaaaatggaaaataaactttatacatatattctgttcataatagcaattttaacttatcaaagaagaaaattttttaaattaaaaacatataatgagagaaatgtgagtcatttataattacaccattctgagaataactactgttaacattttggaatatttctttccattatcttttatatattatactaagactttttaaaattttttttccattctttatctgtctttgtatcaataaatctgaatatttggttacat

SEQ ID NO: 405113 - DNA, 370 bp, Homo sapiens
tgcagcttagctcgttgtagttgctcaataaaaatgtggaatgaatgggcctatatgtcccattgtgtgactcagagccaatgactctggctgatcctcctgttttcattccgtggcccagcatctccctttggggtgtgtgaccttggaagcagtgactctctccatcccaccttgaatggtgtctgcgccgcagcaggggagcagctggggattgccagcgcctgttgctggtgggctgtgcgccagatcctgtcttggatgtgtgggtaattgtcagccacatgtgtgtgaagggctgtgcgtgtaggatttgtgcaaatgtgcccctccctgctgccagcccatgggaggctgtcaagattctgcc

SEQ ID NO: 405114 - DNA, 248 bp, Homo sapiens
gaggagatcaagaggtgaatgggagcccaggagctcagcacatagtaagtgctcaataaatatgtgatgaatgaatggacactcatctcccttagatgccccacataccatgttggcctctcttaccatgaacagcaacactcgtgactacagcatagagatattttttaaaccttacatttacactaactttcctgtgctttgttggggaagcatttttgaaccattcatatttattaattttcatg

SEQ ID NO: 405115 - DNA, 849 bp, Homo sapiens
caccaatgacgtaacaacaaaaaaaaagatgcttggaaactactgaaaaagtagaaagcttggtatctacagattcaaatctgggctccctgccctgctgtgaaaccctctgagcctcagtttcccacatgtcaagcagtataagaccctatggcagagagctgcagtgaggattaaggagacaagatcgtgggaagcacagggtaaaggctgcgtgcccctccccctctgccatcccccaacggaacagacacccagggtcccaggcggtacctgttatcacacagacaagagaaggaaagttgtgtccgtgaagattcagttgttcaaactctgtgtttaaaaaagaaacaattctacatggaatttctgatagattttttttttttctttctgacagactcttgctctgtcacctaggctggaatgcaatggtgtgatctcagctcactgcaacctctgcctcccgggttcaactaattctcgtgcatcagcctcccaagtagctgggattacaagcgcccaccaccatacctagctaatttttgtatttttagtaaagacagttttcaccatgttggccaggttggtctcgaactcctgacctcaggtgatctgcctgcctcagcctcccaaagttctaggattacaagtgtgagccaccatccccattcaaaaaaaaatttttgaataaacaatacccagagtcacctggtcaggtggagaaagtgcactgctctggcagggagtcccccagcctctgtgagatactctcctggagggggcatttcagcctgagagcctggtcactcaatgacccaaatggggattcagggaggcccaccttca

SEQ ID NO: 405116 - DNA, 242 bp, Homo sapiens
ccccttatatatcagtgccttatacaagctgggagaagagctctgaagctgcctacagttagcaggggctcaacaaaagacagtcaagtcatcctcatttacttttgatgtattgggtaggaatcctcaagccctggttttccaagcaaaaattttctttttttttttttttttaattagggaaactgtgctccgattctctcagaaggggtgcggggaccccgagcccgaaattcgataac

SEQ ID NO: 405117 - DNA, 404 bp, Homo sapiens
gaaaagggaggctaagcatggtggttcatgcctataatcccagcagtttcaggctggtctcaaactcttggcctaagtgatcctcctgcctccgaggtagcctgaggctagaaggatcacttgagcctaaggctaggaggatttttgagcctgagaggtcaaggctgcaggaggatcacttgatgccaagagtttgcgaccagcttaagcaacacattgagacccatctctacaaaaaataaaatataaaaaattagctgagtgtagtggtgtacacctttagtcccagctactcaggaggatgagacaggaggatcacttgagcccaggaggtcgaggccacagtgagccatcattgcaccgctgcactccagcctggtgacagtgagatccatctttaaaaa

SEQ ID NO: 405118 - DNA, 223 bp, Homo sapiens
gccactagtgtaggccactccttatttgtgttttccacaattttagaacactgctctgtatgtgataatcagtaaaggtttattgactcaaactgtttactgctttatgacaaatacttgtttcttcttcttcttttttttttttttttctttgaggtagggtctaagtctgctgcccagggtggagtgcagtggtgcagttgtagcttgctgcaacctcaaa

SEQ ID NO: 405119 - DNA, 1195 bp, Homo sapiens
  misc_feature (1160)..(1160): n is a, c, g, or t
  misc_feature (1168)..(1168): n is a, c, g, or t
  misc_feature (1170)..(1170): n is a, c, g, or t
caccagcactccggagaccccagaagacaggccacaccacacatgggccaggacaggaatctcctggtgccagggagagttatagggcagagatgcggcctggggtaggacaggagaccccagtgtgccttcctgagactgttatgtggtggccaccagtccccgagagatggaaaataggctgcttggcccagagatcggtcagctgcccactcgaaggctgtacctgctgcctttcctggcagggctggagggaggtggcttctgcagaggcgtgggggccacttctgcaccctctgggctgggaacccagcccccactagttcctcatatctgcggaagtgcctctaacactcttgcctgagtgagcggagcctggagaaggcccaggagggcagcagaccgaagaggccctatgcagaggtatcacctggtgactgggccggggagggggccaagggtggggtattgggctgtggggttgttgcacacagttgaattgctggtaggagctgtgtgtggtgggaaagggcagatctgaggtgtggccattgggtggggtggtaggtgtgtgtggccctgggagatgtgtggcccttgaggtagtgtgaggtgtgcatttgtaccgggccagtacggatgtggtttgtagacccaggcctggcagagctggctgtgtatgttcttggttcctgttggggagctccgaggagtttcctgaggtctggatgctggggtcgctgccctgcctgcctgtgctgggacagctgggcccagggtaggggatgaggctgtataagggaggtggtggtggacaagctgaggcctcagttaggacccctagcctgccttcctcccctccttgctccccatagggctaggtctttccttgaacccagggcagaggcctgtgcggaggggagctgaggatgcaatcaggggaggcggcctggccaagaggactccagagctgggtgtggaaagggttaggacctttaaggctgccctgatccagggctgactcatgcaaatcagaatgcaaaacaggctcagggaggcctcaagagagagccacacccacacggtcagcagactatgcaggtgacggagggccagccattgagcctttctctctaaacatcttctgttcccacccgtantggcccgnanatccgtactggcccgggggatcctc

SEQ ID NO: 405120 - DNA, 640 bp, Homo sapiens
tgagacagagtttctctttgtcgcctaggctggagtacagtggcatgatctcggctcactgcaacctccacttcccaggttcaagcaattctcatgcctcagcttcctgagtagctgggactacacgtacataccaccatgcctgactgattttttgtattttagtagagatggggtttcatcatgttgcctaggctggtctcaaactcctgagctcaggcagtctgcccacctcaacctcccaaagtgctaggattacaggtatgagccactgtgtctggccatatggaacacattctaatgtaactgtgaactaagagctagtagtccaacagatgttgagtattacggtttttccctaaaaaatttaaaatgtctcactacacccctttaaatttgctaggatgcctttgcacacagtttaggaaccacaatatgcatgcaattttgaattctgatttccttgcttgacatattataaattatcttctcttgtttttatatcgttataacaactgattttaatagctatataatattcactggagtcactgaatcataatcttaaccattcttcattttggacattttaggttatttgcaatctgatttttttaattaacaaataagaatcagtgaa

SEQ ID NO: 405121 - DNA, 1190 bp, Homo sapiens
ttgaaaatcactaaaaggggccgggcgcagtggctcacgcctgtaatcccagcactttgggaggctgaggtgggtggatcacaaggtcaggagttcaagaccagcctgaccaacatggtgaaaccccgtctctactaaaaatacaaaaattagccaggcttggtggcgtgcgcctgtaatcccagctattcagtaggctgaggcaggagaatctcttgaacccgggaggcggaggttgcagtgagctgaggtcgcgccactgcactccagtctgggtgacatagcgagactccatctcaaaaaaagaaagaaaattactaaaaggatgaaacgaatagaatctataatggaagaaaaagacgtaacaactaatgggtagatttaaaaacaactgagtaaaatttaaagcatggaaatagtcattgaaaggtattcatggattttttcaaatatttcagcatattgtcctgatttataattgtttataaaggaataagatggcttctactctgttgtctgcattagtaaggggagagcttcagtctagaaagtcttaatgacttcacactggatttgttttttacatttaatcataaataattgtacccttaagtccttgatcttatatgaagtcaatcaacaaagttcatttgactgaattctgcaagctactgtgtttgatatgtgattcatacaaaagcagtttgtcaacaaatatttattgaatatcaatatgagtcaggcacccacagtggcttaaaaaaaggaattctaaaatgatccttcgtacttatttattgtgaacttgtttatattctggaaaaattgaaagcaatttaaatatccatccataaaatatagtatattttgtatagtatatagatggataggctgatactaaagagagaatataagggccaggcacggtgcctcatgcctgtaatcccagcactttaggaggctgaggctggcggatcacttgaggtcaggagttggaaaccagctggccaatgcggtgaaaccccatctctactaaaatacaaaagttagtcgggcatggtggcagtgcctgtaatcccagctacttgggaggctgaggcaggagaattgcttgaacttgggagacagaggttgcagtgagccgagattgagccactacactccagtctgggtgacagagcaagactctg

SEQ ID NO: 405122 - DNA, 405 bp, Homo sapiens
cagtctctggctctccctgcctttcagcccagcctctctccacttccgtctctcctgtctaaggtcctcgttctgtttttccgtgtgcctcccactgtccttccatccccacgtcgcaccctcgctcctcggcttcccctgccgctctgcttcttccctaaagtcctcccgagaaagagtagggactctggagtttccgccgccgcgggcagaagggcaggaagagctccagggctgccccagctcctgagctcttggcggaagcttctgctccctcccggccctgctccgtgcgccggccgcccatcctccggcggcggctgcgaccccgacctcggcgggggaaaggaccgaaaagcaagagtgctggtgctctgctcgcccgcccaagcgtcaaggcgccca

SEQ ID NO: 405123 - DNA, 403 bp, Homo sapiens
tacaggcatgaaccaccatgcccaacctcatttacaatttttaaaaaaatcttaagatctgtattttttatagtttataaaagtttttttgtgatcacaaaaatacatgcttttggtagaaacacaaacatacaaagatgttctataaaactgactttttatcgtacattttaagatatttaaaaatattttctgtaatttcatgaagagtactaaagccacagtcactgacattgtaaacacctctgttcattctctaacctgttaggtggttaagctatttttaattctagggggctcaggctgaacttgaggttggggaggagaatttgcctctgcttttagttgcaattttcaagtgaggtgaaattaagtaaaatttgtaagagcttttttggctttt

SEQ ID NO: 405124 - DNA, 1677 bp, Homo sapiens
ccgggaagaagctcagcgcagaaggaggcaggacagcactgctgagagctgtgctcaggaagcttctggatcctaggctcatctccacagaggagaacacacagacagcagagaccatggggctcctctcagcccctccctgcacacagcgcatcacctggaaggggctcctgctcacagtggagactcccaagccctccatctccagcagcaaattaaaccccagggaggccatggaggctgtgagcttaacctgtgatcctgagactccggacgcaagctacctgtggtggatgaatggtcagagcctccctatgtctcacaggttgcagttgtctgaaaccaacaggaccctctttctattgggtgtcacaaagtacactgcaggaccctatgaatgtgaaatacggaacccagtgagtgccagccgcagtgacccagtcaccctgaatctcctcccgaagctgcccaagccctacatcaccatcaacaacttaaaccccagggagaataaggatgtcttaaacttcacctgtgaacctaagagtgagaactacacctacatttggtggctaaatggtcagagcctcccggtcagtcccagggtaaagcgacccattgaaaacaggatcctcattctacccagtgtcacgagaaatgaaacaggaccctatcaatgtgaaataagggaccaatatggtggcatccgcagtgacccagtcaccctgaatgtcctctatggtccagacctccccagaatttacccttcattcacctattaccgttcaggagaagtcctctacttgtcctgttctgcggactctaacccaccggcacagtattcttggacaattaatgggaagtttcagctatcaggacaaaagctctttatcccccaaattactacaaagcatagcgggctctatgcttgctctgttcgtaactcagccactggcaaggaaagctccaaatccatgacagtaaaagtctctgactggacattaccctgaattctactagttcctccaattccattttcttccatggaatcgctaagaaaaagacccactctgttccagaagccctataagctggaggtggacaactcaatgtaaatttcatgggaaaacccttgtacctgaagcgtgagccactcagaactcactaaaatgttcgacaccataacaacagatgctcaaactgtaaaccaggacaacaagtggatgacttcacactgtggacagtttttcccaagatgtcagaacaagactccccatcatgatgaggctctcacccctcttaactgtccttgctcatgcctgcctctttcacttggcaggataatgcagtcattagaatttcacatgtagtagcttctgagggtaacaatagagtgtcagatatgtcatctcaacccaaacttttacataacatctcagggggaaatgtggctctctccaccttgcatacaggactcccaatagaaatgaacacagagatattgcccgtgtgtttgcagataagatggtttctatgaagaggtaggaaagctgaaattataatagagtcccctttaaatgcacattctgtggatggtctcgccatttcctaagagatacattgtaaaatggacagtaatactgattctagcagaataaaacatgtaccacatttgca

SEQ ID NO: 405125 - DNA, 293 bp, Homo sapiens
  misc_feature (2)..(3): n is a, c, g, or t
  misc_feature (5)..(5): n is a, c, g, or t
gnntncgggctgaccctgcccatgagcttgagaattgctcctgccctgggaagaggctcagcacagaaagaggaaggacagcacagctgacagccgtgctcagagagtttctggatcctaggcttatctccacagaggagaacacacaagcagcagagaccatgggaaccctctcagcccctccctgcacacagcgcatcaaatggaaggggctcctgctcacagcatcactttaacatctgggaacctgcccaccagccttgttcctaataaaattaagttgtattcatttt

SEQ ID NO: 405126 - DNA, 2337 bp, Homo sapiens
  misc_feature (2)..(3): n is a, c, g, or t
  misc_feature (5)..(5): n is a, c, g, or t
gnntncgggctgaccctgcccatgagcttgagaattgctcctgccctgggaagaggctcagcacagaaagaggaaggacagcacagctgacagccgtgctcagagagtttctggatcctaggcttatctccacagaggagaacacacaagcagcagagaccatgggaaccctctcagcccctccctgcacacagcgcatcaaatggaaggggctcctgctcacagcatcacttttaaacttctggaacctgcccaccactgcccaagtcacgattgaagccgagccaaccaaagtttccgaggggaaggatgttcttctacttgtccacaatttgccccagaatcttaccggctacatctggtacaaagggcaaatgagggacctctaccattacattacatcatatgtagtagacggtgaaataattatatatgggcctgcatatagtggacgagaaacagcatattccaatgcatccctgctgatccagaatgtcacccgggaggacgcaggatcctacaccttacacatcataaagggagatgatgggactagaggagtaactggacgtttcaccttcaccttacacctggagactcctaagccctccatctccagcagcaacttaaatcccagggagaccatggaggctgtgagcttaacctgtgaccctgagactccagacgcaagctacctgtggtggatgaatggtcagagcctccctatgactcacagcttgaagctgtccgaaaccaacaggaccctctttctattgggtgtcacaaagtatactgcaggaccctatgaatgtgaaatacggaacccagtgagtgccagccgcagtgacccagtcaccctgaatctcctcccgaagctgcccaagccctacatcaccatcaacaacttaaaccccagggagaataaggatgtcttaaacttcacctgtgaacctaagagtgagaactacacctacatttggtggctaaatggtcagagcctcccggtcagtcccagggtaaagcgacccattgaaaacaggatcctcattctacccagtgtcacgagaaatgaaacaggaccctatcaatgtgaaatacgggaccgatatggtggcatccgcagtgacccagtcaccctgaatgtcctctatggtccagacctccccagaatttacccttcattcacctattaccgttcaggagaagtcctctacttgtcctgttctgcggactctaacccaccggcacagtattcttggacaattaatgaaaagtttcagctaccaggacaaaagctctttatccgccatattactacaaagcatagcgggctctatgtttgctctgttcgtaactcagccactggcaaggaaagctccaaatccatgacagtcgaagtctctgactggacagttccctgaattctactagtacctccaattccattttctcccatggaatcactaagagcaagacccactctgttccagaagccctataagctggaggtggacaactcaatgtaaatttcatgggaaaacccttgtacgtgaagcatgagccactcagaactcaccaaaatattcgacaccataacaacagatgctcaaactgtaaaccaggacaacaagtggatgacttcacactgtggacagtttttcccaagatgtcagaacaagactccccatcatgatgaggctctcccccctcttaactgtccttgctcatgcctgcctctttcacttggcaggataatgcagtcattagaatttcacatgtagtagcttctgagagtaacaacagagtgtcagatatgtcatctcaacctcaaacttttacataacatctcagggggaaatgtggctctctccaccttgcatacagggctcccaatagaaatgaacacagagatattgcctgtgtgtttgcagagaagatggtttgtatgaagacgtaggaaagctgaaattataatagagtcccctttaaatccacattgtgtggatggctcttgccgtttcctaagagatacattgtaaaacgtgacagtaagacattctagcagaataaaacatgtaccacctttgctaaaaaaaaaaaaaaaaaaaaaaaaaaaaaaaaaaaaaaaaaacaaaaaaaacaaaaaaaaaaaaaaaaaaaaaaaagagaggaggaagaaagaaaaaaacagggggagaaagcaacagaagaaaagagaaaaaaaacaacgagcagggagcaacgaaagaaaagagaaaaagagagagcaacgggcgaacaggaaacacacagagacaagagcgaggggaccacaaacaaaaaaaagcgggggaaaaa

SEQ ID NO: 405127 - DNA, 2251 bp, Homo sapiens
  misc_feature (2)..(3): n is a, c, g, or t
  misc_feature (5)..(5): n is a, c, g, or t
gnntncgggctgaccctgcccatgagcttgagaattgctcctgccctgggaagaggctcagcacagaaagaggaaggacagcacagctgacagccgtgctcagagagtttctggatcctaggcttatctccacagaggagaacacacaagcagcagagaccatgggaaccctctcagcccctccctgcacacagcgcatcaaatggaaggggctcctgctcacagcatcacttttaaacttctggaacctgcccaccactgcccaagtcacgattgaagccgagccaaccaaagtttccgaggggaaggatgttcttctacttgtccacaatttgccccagaatcttaccggctacatctggtacaaagggcaaatgagggacctctaccattacattacatcatatgtagtagacggtgaaataattatatatgggcctgcatatagtggacgagaaacagcatattccaatgcatccctgctgatccagaatgtcacccgggaggacgcaggatcctacaccttacacatcataaagggagatgatgggactagaggagtaactggacgtttcaccttcaccttacacctggagactcctaagccctccatctccagcagcaacttaaatcccagggagaccatggaggctgtgagcttaacctgtgaccctgagactccagacgcaagctacctgtggtggatgaatggtcagagcctccctatgactcacagcttgaagctgtccgaaaccaacaggaccctctttctattgggtgtcacaaagtatactgcaggaccctatgaatgtgaaatacggaacccagtgagtgccagccgcagtgacccagtcaccctgaatctcctcccgaagctgcccaagccctacatcaccatcaacaacttaaaccccagggagaataaggatgtcttaaacttcacctgtgaacctaagagtgagaactacacctacatttggtggctaaatggtcagagcctcccggtcagtcccagggtaaagcgacccattgaaaacaggatcctcattctacccagtgtcacgagaaatgaaacaggaccctatcaatgtgaaatacgggaccgatatggtggcatccgcagtgacccagtcaccctgaatgtcctctatggtccagacctccccagaatttacccttcattcacctattaccgttcaggagaagtcctctacttgtcctgttctgcggactctaacccaccggcacagtattcttggacaattaatgaaaagtttcagctaccaggacaaaagctctttatccgccatattactacaaagcatagcgggctctatgtttgctctgttcgtaactcagccactggcaaggaaagctccaaatccatgacagtcgaagtctctgaagccctataagctggaggtggacaactcaatgtaaatttcatgggaaaacccttgtacgtgaagcatgagccactcagaactcaccaaaatattcgacaccataacaacagatgctcaaactgtaaaccaggacaacaagtggatgacttcacactgtggacagtttttcccaagatgtcagaacaagactccccatcatgatgaggctctcccccctcttaactgtccttgctcatgcctgcctctttcacttggcaggataatgcagtcattagaatttcacatgtagtagcttctgagagtaacaacagagtgtcagatatgtcatctcaacctcaaacttttacataacatctcagggggaaatgtggctctctccaccttgcatacagggctcccaatagaaatgaacacagagatattgcctgtgtgtttgcagagaagatggtttgtatgaagacgtaggaaagctgaaattataatagagtcccctttaaatccacattgtgtggatggctcttgccgtttcctaagagatacattgtaaaacgtgacagtaagacattctagcagaataaaacatgtaccacctttgctaaaaaaaaaaaaaaaaaaaaaaaaaaaaaaaaaaaaaaaaaacaaaaaaaacaaaaaaaaaaaaaaaaaaaaaaaagagaggaggaagaaagaaaaaaacagggggagaaagcaacagaagaaaagagaaaaaaaacaacgagcagggagcaacgaaagaaaagagaaaaagagagagcaacgggcgaacaggaaacacacagagacaagagcgaggggaccacaaacaaaaaaaagcgggggaaaaa

SEQ ID NO: 405128 - DNA, 2022 bp, Homo sapiens
  misc_feature (2)..(3): n is a, c, g, or t
  misc_feature (5)..(5): n is a, c, g, or t
  misc_feature (1951)..(1951): n is a, c, g, or t
gnntncgggctgaccctgcccatgagcttgagaattgctcctgccctgggaagaggctcagcacagaaagaggaaggacagcacagctgacagccgtgctcagagagtttctggatcctaggcttatctccacagaggagaacacacaagcagcagagaccatgggaaccctctcagcccctccctgcacacagcgcatcaaatggaaggggctcctgctcacagcatcacttttaaacttctggaacctgcccaccactgcccaagtcacgattgaagccgagccaaccaaagtttccgaggggaaggatgttcttctacttgtccacaatttgccccagaatcttaccggctacatctggtacaaagggcaaatgagggacctctaccattacattacatcatatgtagtagacggtgaaataattatatatgggcctgcatatagtggacgagaaacagcatattccaatgcatccctgctgatccagaatgtcacccgggaggacgcaggatcctacaccttacacatcataaagggagatgatgggactagaggagtaactggacgtttcaccttcaccttacacctggagactcctaagccctccatctccagcagcaacttaaatcccagggagaccatggaggctgtgagcttaacctgtgaccctgagactccagacgcaagctacctgtggtggatgaatggtcagagcctccctatgactcacagcttgaagctgtccgaaaccaacaggaccctctttctattgggtgtcacaaagtatactgcaggaccctatgaatgtgaaatacggaacccagtgagtgccagccgcagtgacccagtcaccctgaatctcctcccgaagctgcccaagccctacatcaccatcaacaacttaaaccccagggagaataaggatgtcttaaacttcacctgtgaacctaagagtgagaactacacctacatttggtggctaaatggtcagagcctcccggtcagtcccagggtaaagcgacccattgaaaacaggatcctcattctacccagtgtcacgagaaatgaaacaggaccctatcaatgtgaaatacgggaccgatatggtggcatccgcagtgacccagtcaccctgaatgtcctctatggtccagacctccccagaatttacccttcattcacctattaccgttcaggagaagtcctctacttgtcctgttctgcggactctaacccaccggcacagtattcttggacaattaatgaaaagtttcagctaccaggacaaaagctctttatccgccatattactacaaagcatagcgggctctatgtttgctctgttcgtaactcagccactggcaaggaaagctccaaatccatgacagtcgaagtctctgcttatagcagttcaataaactatacttctgggaaccgtaattgaaacatttacttttgctttctacctgactgccccagaattgggcaactattcatgagaattgatatgtttatggtaatacacatatttgcacaagtacagtaacaatctgctttctttgtaacatgacacatttgaaatcattggttatattaccaatgctttgattcggatgttatattaaaaacatagatagaatgaaccaatatgaactgcaggcaaagtctgaagtcagccttggtttggcttcctattctcaagaggtttgtgaagatttaatctcagattccttataaaaacttagagaaaagaaaattttagaagacagcctacatggtccattgctactcttgctgcacttatgtaaacaatcagaccacatttgaagaaactccacctattttgcaaacaaacttattctactgaaattatcattggtaaaagtagagatgcccatagagggaaaaattatgtggaaaataaaaactgtagtatacctgttaccngattgaaccactgttcattatctttgagtacttataatccactggtagactggactggaccctgaattctt

SEQ ID NO: 405129 - DNA, 2088 bp, Homo sapiens
  misc_feature (2)..(3): n is a, c, g, or t
  misc_feature (5)..(5): n is a, c, g, or t
gnntncgggctgaccctgcccatgagcttgagaattgctcctgccctgggaagaggctcagcacagaaagaggaaggacagcacagctgacagccgtgctcagagagtttctggatcctaggcttatctccacagaggagaacacacaagcagcagagaccatgggaaccctctcagcccctccctgcacacagcgcatcaaatggaaggggctcctgctcacagcatcacttttaaacttctggaacctgcccaccactgcccaagtcacgattgaagccgagccaaccaaagtttccgaggggaaggatgttcttctacttgtccacaatttgccccagaatcttaccggctacatctggtacaaagggcaaatgagggacctctaccattacattacatcatatgtagtagacggtgaaataattatatatgggcctgcatatagtggacgagaaacagcatattccaatgcatccctgctgatccagaatgtcacccgggaggacgcaggatcctacaccttacacatcataaagggagatgatgggactagaggagtaactggacgtttcaccttcaccttacacctggagactcctaagccctccatctccagcagcaacttaaatcccagggagaccatggaggctgtgagcttaacctgtgaccctgagactccagacgcaagctacctgtggtggatgaatggtcagagcctccctatgactcacagcttgaagctgtccgaaaccaacaggaccctctttctattgggtgtcacaaagtatactgcaggaccctatgaatgtgaaatacggaacccagtgagtgccagccgcagtgacccagtcaccctgaatctcctcccgaagctgcccaagccctacatcaccatcaacaacttaaaccccagggagaataaggatgtcttaaacttcacctgtgaacctaagagtgagaactacacctacatttggtggctaaatggtcagagcctcccggtcagtcccagggtaaagcgacccattgaaaacaggatcctcattctacccagtgtcacgagaaatgaaacaggaccctatcaatgtgaaatacgggaccgatatggtggcatccgcagtgacccagtcaccctgaatgtcctctatggtccagacctccccagaatttacccttcattcacctattaccgttcaggagaagtcctctacttgtcctgttctgcggactctaacccaccggcacagtattcttggacaattaatgaaaagtttcagctaccaggacaaaagctctttatccgccatattactacaaagcatagcgggctctatgtttgctctgttcgtaactcagccactggcaaggaaagctccaaatccatgacagtcgaagtctctgactggacattaccctgaattctactagttcctccaattccattttcttccatggaatcgctaagaaaaagacccactctgttccagaagccctataagctggaggtggacaactcaatgtaaatttcatgggaaaacccttgtacctgaagcgtgagccactcagaactcactaaaatgttcgacaccataacaacagatgctcaaactgtaaaccaggacaacaagtggatgacttcacactgtggacagtttttcccaagatgtcagaacaagactccccatcatgatgaggctctcacccctcttaactgtccttgctcatgcctgcctctttcacttggcaggataatgcagtcattagaatttcacatgtagtagcttctgagggtaacaatagagtgtcagatatgtcatctcaacccaaacttttacataacatctcagggggaaatgtggctctctccaccttgcatacaggactcccaatagaaatgaacacagagatattgcccgtgtgtttgcagataagatggtttctatgaagaggtaggaaagctgaaattataatagagtcccctttaaatgcacattctgtggatggtctcgccatttcctaagagatacattgtaaaatggacagtaatactgattctagcagaataaaacatgtaccacatttgca

SEQ ID NO: 405130 - DNA, 2509 bp, Homo sapiens
  misc_feature (2)..(3): n is a, c, g, or t
  misc_feature (5)..(5): n is a, c, g, or t
gnntncgggctgaccctgcccatgagcttgagaattgctcctgccctgggaagaggctcagcacagaaagaggaaggacagcacagctgacagccgtgctcagagagtttctggatcctaggcttatctccacagaggagaacacacaagcagcagagaccatgggaaccctctcagcccctccctgcacacagcgcatcaaatggaaggggctcctgctcacagcatcacttttaaacttctggaacctgcccaccactgcccaagtcacgattgaagccgagccaaccaaagtttccgaggggaaggatgttcttctacttgtccacaatttgccccagaatcttaccggctacatctggtacaaagggcaaatgagggacctctaccattacattacatcatatgtagtagacggtgaaataattatatatgggcctgcatatagtggacgagaaacagcatattccaatgcatccctgctgatccagaatgtcacccgggaggacgcaggatcctacaccttacacatcataaagggagatgatgggactagaggagtaactggacgtttcaccttcaccttacaccgtaagtgattccacatgatccctgggtgttgggggacaggggtcacttctacttcacacacacaggattgtcaggcctggactctgcctgtgtcactcactgcgttatgtcccatgctgggatttgggcatttagtgcaggacacacacagaggagacaaatttcaacagatcagaattcctttcctgcatccagaccctgcagacattaaatcccagggagaccatggaggctgtgagcttaacctgtgaccctgagactccagacgcaagctacctgtggtggatgaatggtcagagcctccctatgactcacagcttgaagctgtccgaaaccaacaggaccctctttctattgggtgtcacaaagtatactgcaggaccctatgaatgtgaaatacggaacccagtgagtgccagccgcagtgacccagtcaccctgaatctcctcccgaagctgcccaagccctacatcaccatcaacaacttaaaccccagggagaataaggatgtcttaaacttcacctgtgaacctaagagtgagaactacacctacatttggtggctaaatggtcagagcctcccggtcagtcccagggtaaagcgacccattgaaaacaggatcctcattctacccagtgtcacgagaaatgaaacaggaccctatcaatgtgaaatacgggaccgatatggtggcatccgcagtgacccagtcaccctgaatgtcctctatggtccagacctccccagaatttacccttcattcacctattaccgttcaggagaagtcctctacttgtcctgttctgcggactctaacccaccggcacagtattcttggacaattaatgaaaagtttcagctaccaggacaaaagctctttatccgccatattactacaaagcatagcgggctctatgtttgctctgttcgtaactcagccactggcaaggaaagctccaaatccatgacagtcgaagtctctgactggacagttccctgaattctactagtacctccaattccattttctcccatggaatcactaagagcaagacccactctgttccagaagccctataagctggaggtggacaactcaatgtaaatttcatgggaaaacccttgtacgtgaagcatgagccactcagaactcaccaaaatattcgacaccataacaacagatgctcaaactgtaaaccaggacaacaagtggatgacttcacactgtggacagtttttcccaagatgtcagaacaagactccccatcatgatgaggctctcccccctcttaactgtccttgctcatgcctgcctctttcacttggcaggataatgcagtcattagaatttcacatgtagtagcttctgagagtaacaacagagtgtcagatatgtcatctcaacctcaaacttttacataacatctcagggggaaatgtggctctctccaccttgcatacagggctcccaatagaaatgaacacagagatattgcctgtgtgtttgcagagaagatggtttgtatgaagacgtaggaaagctgaaattataatagagtcccctttaaatccacattgtgtggatggctcttgccgtttcctaagagatacattgtaaaacgtgacagtaagacattctagcagaataaaacatgtaccacctttgctaaaaaaaaaaaaaaaaaaaaaaaaaaaaaaaaaaaaaaaaaacaaaaaaaacaaaaaaaaaaaaaaaaaaaaaaaagagaggaggaagaaagaaaaaaacagggggagaaagcaacagaagaaaagagaaaaaaaacaacgagcagggagcaacgaaagaaaagagaaaaagagagagcaacgggcgaacaggaaacacacagagacaagagcgaggggaccacaaacaaaaaaaagcgggggaaaaa

SEQ ID NO: 405131 - DNA, 1572 bp, Homo sapiens
  misc_feature (2)..(3): n is a, c, g, or t
  misc_feature (5)..(5): n is a, c, g, or t
gnntncgggctgaccctgcccatgagcttgagaattgctcctgccctgggaagaggctcagcacagaaagaggaaggacagcacagctgacagccgtgctcagagagtttctggatcctaggcttatctccacagaggagaacacacaagcagcagagaccatgggaaccctctcagcccctccctgcacacagcgcatcaaatggaaggggctcctgctcacagcatcacttttaaacttctggaacctgcccaccactgcccaagtcacgattgaagccgagccaaccaaagtttccgaggggaaggatgttcttctacttgtccacaatttgccccagaatcttaccggctacatctggtacaaagggcaaatgagggacctctaccattacattacatcatatgtagtagacggtgaaataattatatatgggcctgcatatagtggacgagaaacagcatattccaatgcatccctgctgatccagaatgtcacccgggaggacgcaggatcctacaccttacacatcataaagggagatgatgggactagaggagtaactggacgtttcaccttcaccttacacctggagactcctaagccctccatctccagcagcaacttaaatcccagggagaccatggaggctgtgagcttaacctgtgaccctgagactccagacgcaagctacctgtggtggatgaatggtcagagcctccctatgactcacagcttgaagctgtccgaaaccaacaggaccctctttctattgggtgtcacaaagtatactgcaggaccctatgaatgtgaaatacggaacccagtgagtgccagccgcagtgacccagtcaccctgaatctcctcccgaagctgcccaagccctacatcaccatcaacaacttaaaccccagggagaataaggatgtcttaaacttcacctgtgaacctaagagtgagaactacacctacatttggtggctaaatggtcagagcctcccggtcagtcccagggtaaagcgacccattgaaaacaggatcctcattctacccagtgtcacgagaaatgaaacaggaccctatcaatgtgaaatacgggaccgatatggtggcatccgcagtgacccagtcaccctgaatgtcctctatggtccagacctccccagaatttacccttcattcacctattaccattcaggagaaaacctctacttgtcctgcttcgcggactctaacccaccagcagaatattcttggacaattaatgggaagtttcagctatcaggacaaaagctctttatcccccagattactacaaagcatagcgggctctatgcttgctctgttcgtaactcagccactggcatggaaagctccaaatccatgacagtcaaagtctctgctccttcaggaacaggacatcttcctggccttaatccattatagcagccgtgatgtcatttctgtatttcaggaagactggcagacagttgctttcattcttcctcaaagtatttaccatcagctacagtccaaaattgctttttgttcaaggagatttatgaaaaga

SEQ ID NO: 405132 - DNA, 1660 bp, Homo sapiens
gacccgatacgcggtcgatctgacgcggcttcgggaggagtcaggtgactgggtcacagcttgaagctgtccgaaaccaacaggaccctctttctattgggtgtcacaaagtatactgcaggaccctatgaatgtgaaatacggaacccagtgagtgccagccgcagtgacccagtcaccctgaatctcctcccgaagctgcccaagccctacatcaccatcaacaacttaaaccccagggagaataaggatgtcttaaacttcacctgtgaacctaagagtgagaactacacctacatttggtggctaaatggtcagagcctcccggtcagtcccagggtaaagcgacccattgaaaacaggatcctcattctacccagtgtcacgagaaatgaaacaggaccctatcaatgtgaaatacgggaccgatatggtggcatccgcagtgacccagtcaccctgaatgtcctctatggtccagacctccccagaatttacccttcattcacctattaccgttcaggagaagtcctctacttgtcctgttctgcggactctaacccaccggcacagtattcttggacaattaatgaaaagtttcagctaccaggacaaaagctctttatccgccatattactacaaagcatagcgggctctatgtttgctctgttcgtaactcagccactggcaaggaaagctccaaatccatgacagtcgaagtctctgactggacagttccctgaattctactagtacctccaattccattttctcccatggaatcactaagagcaagacccactctgttccagaagccctataagctggaggtggacaactcaatgtaaatttcatgggaaaacccttgtacgtgaagcatgagccactcagaactcaccaaaatattcgacaccataacaacagatgctcaaactgtaaaccaggacaacaagtggatgacttcacactgtggacagtttttcccaagatgtcagaacaagactccccatcatgatgaggctctcccccctcttaactgtccttgctcatgcctgcctctttcacttggcaggataatgcagtcattagaatttcacatgtagtagcttctgagagtaacaacagagtgtcagatatgtcatctcaacctcaaacttttacataacatctcagggggaaatgtggctctctccaccttgcatacagggctcccaatagaaatgaacacagagatattgcctgtgtgtttgcagagaagatggtttgtatgaagacgtaggaaagctgaaattataatagagtcccctttaaatccacattgtgtggatggctcttgccgtttcctaagagatacattgtaaaacgtgacagtaagacattctagcagaataaaacatgtaccacctttgctaaaaaaaaaaaaaaaaaaaaaaaaaaaaaaaaaaaaaaaaaacaaaaaaaacaaaaaaaaaaaaaaaaaaaaaaaagagaggaggaagaaagaaaaaaacagggggagaaagcaacagaagaaaagagaaaaaaaacaacgagcagggagcaacgaaagaaaagagaaaaagagagagcaacgggcgaacaggaaacacacagagacaagagcgaggggaccacaaacaaaaaaaagcgggggaaaaa

SEQ ID NO: 405133 - DNA, 1979 bp, Homo sapiens
gtgtgtgtgtgtgtgtgtttgtatgtgtgtgtgtgtctgtgttgtcaaggctgaggactgaagagaccttctcaggacccagggccccatgttttcacaccaatacataggtctcaatattgactgatgttctctccacctcctagcatcacttttaaacttctggaacctgcccaccactgcccaagtcacgattgaagccgagccaaccaaagtttccgaggggaaggatgttcttctacttgtccacaatttgccccagaatcttaccggctacatctggtacaaagggcaaatgagggacctctaccattacattacatcatatgtagtagacggtgaaataattatatatgggcctgcatatagtggacgagaaacagcatattccaatgcatccctgctgatccagaatgtcacccgggaggacgcaggatcctacaccttacacatcataaagggagatgatgggactagaggagtaactggacgtttcaccttcaccttacacccgaagctgcccaagccctacatcaccatcaacaacttaaaccccagggagaataaggatgtcttaaacttcacctgtgaacctaagagtgagaactacacctacatttggtggctaaatggtcagagcctcccggtcagtcccagggtaaagcgacccattgaaaacaggatcctcattctacccagtgtcacgagaaatgaaacaggaccctatcaatgtgaaatacgggaccgatatggtggcatccgcagtgacccagtcaccctgaatgtcctctatggtccagacctccccagaatttacccttcattcacctattaccgttcaggagaagtcctctacttgtcctgttctgcggactctaacccaccggcacagtattcttggacaattaatgaaaagtttcagctaccaggacaaaagctctttatccgccatattactacaaagcatagcgggctctatgtttgctctgttcgtaactcagccactggcaaggaaagctccaaatccatgacagtcgaagtctctgactggacagttccctgaattctactagtacctccaattccattttctcccatggaatcactaagagcaagacccactctgttccagaagccctataagctggaggtggacaactcaatgtaaatttcatgggaaaacccttgtacgtgaagcatgagccactcagaactcaccaaaatattcgacaccataacaacagatgctcaaactgtaaaccaggacaacaagtggatgacttcacactgtggacagtttttcccaagatgtcagaacaagactccccatcatgatgaggctctcccccctcttaactgtccttgctcatgcctgcctctttcacttggcaggataatgcagtcattagaatttcacatgtagtagcttctgagagtaacaacagagtgtcagatatgtcatctcaacctcaaacttttacataacatctcagggggaaatgtggctctctccaccttgcatacagggctcccaatagaaatgaacacagagatattgcctgtgtgtttgcagagaagatggtttgtatgaagacgtaggaaagctgaaattataatagagtcccctttaaatccacattgtgtggatggctcttgccgtttcctaagagatacattgtaaaacgtgacagtaagacattctagcagaataaaacatgtaccacctttgctaaaaaaaaaaaaaaaaaaaaaaaaaaaaaaaaaaaaaaaaaacaaaaaaaacaaaaaaaaaaaaaaaaaaaaaaaagagaggaggaagaaagaaaaaaacagggggagaaagcaacagaagaaaagagaaaaaaaacaacgagcagggagcaacgaaagaaaagagaaaaagagagagcaacgggcgaacaggaaacacacagagacaagagcgaggggaccacaaacaaaaaaaagcgggggaaaaa

SEQ ID NO: 405134 - DNA, 1950 bp, Homo sapiens
gtatcttcagggttgcaggacaaagggaagtcccattattactcatctctagaatgtcctttgaaatggaagctgcagagaaatcacatctagggggacaaagtaggatggaatttggaaggggcccagcagttgcatattccaggtaaggaacccaaggtgagccagccagtcaactgattagggagggcctgggaagggtaccaggggctgtgactcccactgacgtgtctgtccatgacccaacactgctgctcaattgacacttcagaaagtctgtgcttccctaagacagagaaggcggcctcacagtctttgagcccttagatcatcatgcatctatcttgtgacaaaagcaccagctattggctttcaaggactcgggtggaatgagaggtgggagatgccaactctgattgaaggatacctgtggaggaatcaaaggtgccacacaggacaatcttctctctgttatccacacagcgaagctgcccaagccctacatcaccatcaacaacttaaaccccagggagaataaggatgtcttaaacttcacctgtgaacctaagagtgagaactacacctacatttggtggctaaatggtcagagcctcccggtcagtcccagggtaaagcgacccattgaaaacaggatcctcattctacccagtgtcacgagaaatgaaacaggaccctatcaatgtgaaatacgggaccgatatggtggcatccgcagtgacccagtcaccctgaatgtcctctatggtccagacctccccagaatttacccttcattcacctattaccgttcaggagaagtcctctacttgtcctgttctgcggactctaacccaccggcacagtattcttggacaattaatgaaaagtttcagctaccaggacaaaagctctttatccgccatattactacaaagcatagcgggctctatgtttgctctgttcgtaactcagccactggcaaggaaagctccaaatccatgacagtcgaagtctctgactggacagttccctgaattctactagtacctccaattccattttctcccatggaatcactaagagcaagacccactctgttccagaagccctataagctggaggtggacaactcaatgtaaatttcatgggaaaacccttgtacgtgaagcatgagccactcagaactcaccaaaatattcgacaccataacaacagatgctcaaactgtaaaccaggacaacaagtggatgacttcacactgtggacagtttttcccaagatgtcagaacaagactccccatcatgatgaggctctcccccctcttaactgtccttgctcatgcctgcctctttcacttggcaggataatgcagtcattagaatttcacatgtagtagcttctgagagtaacaacagagtgtcagatatgtcatctcaacctcaaacttttacataacatctcagggggaaatgtggctctctccaccttgcatacagggctcccaatagaaatgaacacagagatattgcctgtgtgtttgcagagaagatggtttgtatgaagacgtaggaaagctgaaattataatagagtcccctttaaatccacattgtgtggatggctcttgccgtttcctaagagatacattgtaaaacgtgacagtaagacattctagcagaataaaacatgtaccacctttgctaaaaaaaaaaaaaaaaaaaaaaaaaaaaaaaaaaaaaaaaaacaaaaaaaacaaaaaaaaaaaaaaaaaaaaaaaagagaggaggaagaaagaaaaaaacagggggagaaagcaacagaagaaaagagaaaaaaaacaacgagcagggagcaacgaaagaaaagagaaaaagagagagcaacgggcgaacaggaaacacacagagacaagagcgaggggaccacaaacaaaaaaaagcgggggaaaaa

SEQ ID NO: 405135 - DNA, 2058 bp, Homo sapiens
  misc_feature (2)..(3): n is a, c, g, or t
  misc_feature (5)..(5): n is a, c, g, or t
gnntncgggctgaccctgcccatgagcttgagaattgctcctgccctgggaagaggctcagcacagaaagaggaaggacagcacagctgacagccgtgctcagagagtttctggatcctaggcttatctccacagaggagaacacacaagcagcagagaccatgggaaccctctcagcccctccctgcacacagcgcatcaaatggaaggggctcctgctcacagcatcacttttaaacttctggaacctgcccaccactgcccaagtcacgattgaagccgagccaaccaaagtttccgaggggaaggatgttcttctacttgtccacaatttgccccagaatcttaccggctacatctggtacaaagggcaaatgagggacctctaccattacattacatcatatgtagtagacggtgaaataattatatatgggcctgcatatagtggacgagaaacagcatattccaatgcatccctgctgatccagaatgtcacccgggaggacgcaggatcctacaccttacacatcataaagggagatgatgggactagaggagtaactggacgtttcaccttcaccttacacctggagactcctaagccctccatctccagcagcaacttaaatcccagggagaccatggaggctgtgagcttaacctgtgaccctgagactccagacgcaagctacctgtggtggatgaatggtcagagcctccctatgactcacagcttgaagctgtccgaaaccaacaggaccctctttctattgggtgtcacaaagtatactgcaggaccctatgaatgtgaaatacggaacccagtgagtgccagccgcagtgacccagtcaccctgaatctcctccatggtccagacctccccagaatttacccttcattcacctattaccgttcaggagaagtcctctacttgtcctgttctgcggactctaacccaccggcacagtattcttggacaattaatgaaaagtttcagctaccaggacaaaagctctttatccgccatattactacaaagcatagcgggctctatgtttgctctgttcgtaactcagccactggcaaggaaagctccaaatccatgacagtcgaagtctctgactggacagttccctgaattctactagtacctccaattccattttctcccatggaatcactaagagcaagacccactctgttccagaagccctataagctggaggtggacaactcaatgtaaatttcatgggaaaacccttgtacgtgaagcatgagccactcagaactcaccaaaatattcgacaccataacaacagatgctcaaactgtaaaccaggacaacaagtggatgacttcacactgtggacagtttttcccaagatgtcagaacaagactccccatcatgatgaggctctcccccctcttaactgtccttgctcatgcctgcctctttcacttggcaggataatgcagtcattagaatttcacatgtagtagcttctgagagtaacaacagagtgtcagatatgtcatctcaacctcaaacttttacataacatctcagggggaaatgtggctctctccaccttgcatacagggctcccaatagaaatgaacacagagatattgcctgtgtgtttgcagagaagatggtttgtatgaagacgtaggaaagctgaaattataatagagtcccctttaaatccacattgtgtggatggctcttgccgtttcctaagagatacattgtaaaacgtgacagtaagacattctagcagaataaaacatgtaccacctttgctaaaaaaaaaaaaaaaaaaaaaaaaaaaaaaaaaaaaaaaaaacaaaaaaaacaaaaaaaaaaaaaaaaaaaaaaaagagaggaggaagaaagaaaaaaacagggggagaaagcaacagaagaaaagagaaaaaaaacaacgagcagggagcaacgaaagaaaagagaaaaagagagagcaacgggcgaacaggaaacacacagagacaagagcgaggggaccacaaacaaaaaaaagcgggggaaaaa

SEQ ID NO: 405136 - DNA, 1744 bp, Homo sapiens
  misc_feature (2)..(3): n is a, c, g, or t
  misc_feature (5)..(5): n is a, c, g, or t
  misc_feature (1708)..(1708): n is a, c, g, or t
gnntncgggctgaccctgcccatgagcttgagaattgctcctgccctgggaagaggctcagcacagaaagaggaaggacagcacagctgacagccgtgctcagagagtttctggatcctaggcttatctccacagaggagaacacacaagcagcagagaccatgggaaccctctcagcccctccctgcacacagcgcatcaaatggaaggggctcctgctcacagcatcacttttaaacttctggaacctgcccaccactgcccaagtcacgattgaagccgagccaaccaaagtttccgaggggaaggatgttcttctacttgtccacaatttgccccagaatcttaccggctacatctggtacaaagggcaaatgagggacctctaccattacattacatcatatgtagtagacggtgaaataattatatatgggcctgcatatagtggacgagaaacagcatattccaatgcatccctgctgatccagaatgtcacccgggaggacgcaggatcctacaccttacacatcataaagggagatgatgggactagaggagtaactggacgtttcaccttcaccttacacctggagactcctaagccctccatctccagcagcaacttaaatcccagggagaccatggaggctgtgagcttaacctgtgaccctgagactccagacgcaagctacctgtggtggatgaatggtcagagcctccctatgactcacagcttgaagctgtccgaaaccaacaggaccctctttctattgggtgtcacaaagtatactgcaggaccctatgaatgtgaaatacggaacccagtgagtgccagccgcagtgacccagtcaccctgaatctcctccatggtccagacctccccagaatttacccttcattcacctattaccgttcaggagaagtcctctacttgtcctgttctgcggactctaacccaccggcacagtattcttggacaattaatgaaaagtttcagctaccaggacaaaagctctttatccgccatattactacaaagcatagcgggctctatgtttgctctgttcgtaactcagccactggcaaggaaagctccaaatccatgacagtcgaagtctctgactggacagttccctgaattctactagtacctccaattccattttctcccatggaatcactaagagcaagacccactctgttccagaagccctataagctggaggtggacaactcaatgtaaatttcatgggaaaacccttgtacgtgaagcatgagccactcagaactcaccaaaatattcgacaccataacaacagatgctcaaactgtaaaccaggacaacaagtggatgacttcacactgtggacagtttttcccaagatgtcagaacaagactccccatcatgatgaggctctcccccctcttaactgtccttgctcatgcctgcctctttcacttggcaggataatgcagtcattagaatttcacatgtagtagcttctgagagtaacaacagagtgtcagatatgtcatctcaacctcaaacttttacataacatctcagggggaaatgtggctctctccaccttgcatacagggctcccaatagaaatgaacacagagatattgcctgtgtgtttgcagagaagatggtttgtatgaagacgtaggaaagctgaaattataatagagtccacacntatataaaaaatacacaacaatatagatagtagaga

SEQ ID NO: 405137 - DNA, 1572 bp, Homo sapiens
  misc_feature (2)..(3): n is a, c, g, or t
  misc_feature (5)..(5): n is a, c, g, or t
gnntncgggctgaccctgcccatgagcttgagaattgctcctgccctgggaagaggctcagcacagaaagaggaaggacagcacagctgacagccgtgctcagagagtttctggatcctaggcttatctccacagaggagaacacacaagcagcagagaccatgggaaccctctcagcccctccctgcacacagcgcatcaaatggaaggggctcctgctcacagcatcacttttaaacttctggaacctgcccaccactgcccaagtcacgattgaagccgagccaaccaaagtttccgaggggaaggatgttcttctacttgtccacaatttgccccagaatcttaccggctacatctggtacaaagggcaaatgagggacctctaccattacattacatcatatgtagtagacggtgaaataattatatatgggcctgcatatagtggacgagaaacagcatattccaatgcatccctgctgatccagaatgtcacccgggaggacgcaggatcctacaccttacacatcataaagggagatgatgggactagaggagtaactggacgtttcaccttcaccttacacctggagactcctaagccctccatctccagcagcaacttaaatcccagggagaccatggaggctgtgagcttaacctgtgaccctgagactccagacgcaagctacctgtggtggatgaatggtcagagcctccctatgactcacagcttgaagctgtccgaaaccaacaggaccctctttctattgggtgtcacaaagtatactgcaggaccctatgaatgtgaaatacggaacccagtgagtgccagccgcagtgacccagtcaccctgaatctcctcccgaagctgcccaagccctacatcaccatcaacaacttaaaccccagggagaataaggatgtcttagccttcacctgtgaacctaagagtgagaactacacctacatttggtggctaaatggtcagagcctcccggtcagtcccagggtaaagcgacccattgaaaacaggatcctcattctacccagtgtcacgagaaatgaaacaggaccctatcaatgtgaaatacaggaccgatatggtggcatccgcagttacccagtcaccctgaatgtcctctatggtccagacctccccagaatttacccttcattcacctattaccattcaggagaaaacctctacttgtcctgcttcgcggactctaacccaccagcagaatattcttggacaattaatgggaagtttcagctatcaggacaaaagctctttatcccccagattactacaaagcatagcgggctctatgcttgctctgttcgtaactcagccactggcatggaaagctccaaatccatgacagtcaaagtctctgctccttcaggaacaggacatcttcctggccttaatccattatagcagccgtgatgtcatttctgtatttcaggaagactggcagacagttgctttcattcttcctcaaagtatttaccatcagctacagtccaaaattgctttttgttcaaggagatttatgaaaaga

SEQ ID NO: 405138 - DNA, 851 bp, Homo sapiens
  misc_feature (2)..(3): n is a, c, g, or t
  misc_feature (5)..(5): n is a, c, g, or t
  misc_feature (842)..(842): n is a, c, g, or t
gnntncgggctgaccctgcccatgagcttgagaattgctcctgccctgggaagaggctcagcacagaaagaggaaggacagcacagctgacagccgtgctcagagagtttctggatcctaggcttatctccacagaggagaacacacaagcagcagagaccatgggaaccctctcagcccctccctgcacacagcgcatcaaatggaaggggctcctgctcacagcatcacttttaaacttctggaacctgcccaccactgcccaagtcacgattgaagccgagccaaccaaagtttccgaggggaaggatgttcttctacttgtccacaatttgccccagaatcttaccggctacatctggtacaaagggcaaatgagggacctctaccattacattacatcatatgtagtagacggtgaaataattatatatgggcctgcatatagtggacgagaaacagcatattccaatgcatccctgctgatccagaatgtcacccgggaggacgcaggatcctacaccttacacatcataaagggagatgatgggactagaggagtaactggacgtttcaccttcaccttacacctggagactcctaagccctccatctccagcagcaacttaaatcccagggagaccatggaggctgtgagcttaacctgtgaccctgagactccagacgcaagctacctgtggtggatgaatggtcagagcctccctatgactcacagcttgaagctgtccgaaaccaacaggcctagttttcttgtccttccttggcttacagattcatcaccgcaatctctgccttcatctttatacgcattctccctgtgncaagctaat

SEQ ID NO: 405139 - DNA, 1292 bp, Homo sapiens
ccaccggcaggttgtactccaccggcaggttgtactccaccggcaggttgtactccaccggcaggttgtactccaccggcaggttgtactccaccgcaggttgtatggtccagacctccccagaatttacccttcattcacctattaccgttcaggagaagtcctctacttgtcctgttctgcggactctaacccaccggcacagtattcttggacaattaatgaaaagtttcagctaccaggacaaaagctctttatccgccatattactacaaagcatagcgggctctatgtttgctctgttcgtaactcagccactggcaaggaaagctccaaatccatgacagtcgaagtctctgactggacagttccctgaattctactagtacctccaattccattttctcccatggaatcactaagagcaagacccactctgttccagaagccctataagctggaggtggacaactcaatgtaaatttcatgggaaaacccttgtacgtgaagcatgagccactcagaactcaccaaaatattcgacaccataacaacagatgctcaaactgtaaaccaggacaacaagtggatgacttcacactgtggacagtttttcccaagatgtcagaacaagactccccatcatgatgaggctctcccccctcttaactgtccttgctcatgcctgcctctttcacttggcaggataatgcagtcattagaatttcacatgtagtagcttctgagagtaacaacagagtgtcagatatgtcatctcaacctcaaacttttacataacatctcagggggaaatgtggctctctccaccttgcatacagggctcccaatagaaatgaacacagagatattgcctgtgtgtttgcagagaagatggtttgtatgaagacgtaggaaagctgaaattataatagagtcccctttaaatccacattgtgtggatggctcttgccgtttcctaagagatacattgtaaaacgtgacagtaagacattctagcagaataaaacatgtaccacctttgctaaaaaaaaaaaaaaaaaaaaaaaaaaaaaaaaaaaaaaaaaacaaaaaaaacaaaaaaaaaaaaaaaaaaaaaaaagagaggaggaagaaagaaaaaaacagggggagaaagcaacagaagaaaagagaaaaaaaacaacgagcagggagcaacgaaagaaaagagaaaaagagagagcaacgggcgaacaggaaacacacagagacaagagcgaggggaccacaaacaaaaaaaagcgggggaaaaa

SEQ ID NO: 405140 - DNA, 1462 bp, Homo sapiens
  misc_feature (2)..(3): n is a, c, g, or t
  misc_feature (5)..(5): n is a, c, g, or t
gnntncgggctgaccctgcccatgagcttgagaattgctcctgccctgggaagaggctcagcacagaaagaggaaggacagcacagctgacagccgtgctcagagagtttctggacatcacttttaaacttctggaacctgcccaccactgcccaagtcacgattgaagccgagccaaccaaagtttccgaggggaaggatgttcttctacttgtccacaatttgccccagaatcttaccggctacatctggtacaaagggcaaatgagggacctctaccattacattacatcatatgtagtagacggtgaaataattatatatgggcctgcatatagtggacgagaaacagcatattccaatgcatccctgctgatccagaatgtcacccgggaggacgcaggatcctacaccttacacatcataaagggagatgatgggactagaggagtaactggacgtttcaccttcaccttacacctggagactcctaagccctccatctccagcagcaacttaaatcccagggagaccatggaggctgtgagcttaacctgtgaccctgagactccagacgcaagctacctgtggtggatgaatggtcagagcctccctatgactcacagcttgaagctgtccgaaaccaacaggaccctctttctattgggtgtcacaaagtatactgcaggaccctatgaatgtgaaatacggaacccagtgagtgccagccgcagtgacccagtcaccctgaatctcctcccgaagctgcccaagccctacatcaccatcaacaacttaaaccccagggagaataaggatgtcttagccttcacctgtgaacctaagagtgagaactacacctacatttggtggctaaatggtcagagcctcccggtcagtcccagggtaaagcgacccattgaaaacaggatcctcattctacccagtgtcacgagaaatgaaacaggaccctatcaatgtgaaatacaggaccgatatggtggcatccgcagttacccagtcaccctgaatgtcctctatggtccagacctccccagaatttacccttcattcacctattaccattcaggagaaaacctctacttgtcctgcttcgcggactctaacccaccagcagaatattcttggacaattaatgggaagtttcagctatcaggacaaaagctctttatcccccagattactacaaagcatagcgggctctatgcttgctctgttcgtaactcagccactggcatggaaagctccaaatccatgacagtcaaagtctctgctccttcaggaacaggacatcttcctggccttaatccattatagcagccgtgatgtcatttctgtatttcaggaagactggcagacagttgctttcattcttcctcaaagtatttaccatcagctacagtccaaaattgctttttgttcaaggagatttatgaaaaga

SEQ ID NO: 405141 - DNA, 2300 bp, Homo sapiens
  misc_feature (2)..(3): n is a, c, g, or t
  misc_feature (5)..(5): n is a, c, g, or t
gnntncgggctgaccctgcccatgagcttgagaattgctcctgccctgggaagaggctcagcacagaaagaggaaggacagcacagctgacagccgtgctcagagagtttctggatcctaggcttatctccacagaggagaacacacaagcagcagagaccatgggaaccctctcagcccctccctgcacacagcgcatcaaatggaaggggctcctgctcacagcatcacttttaaacttctggaacctgcccaccactgcccaagtcacgattgaagccgagccaaccaaagtttccgaggggaaggatgttcttctacttgtccacaatttgccccagaatcttaccggctacatctggtacaaagggcaaatgagggacctctaccattacattacatcatatgtagtagacggtgaaataattatatatgggcctgcatatagtggacgagaaacagcatattccaatgcatccctgctgatccagaatgtcacccgggaggacgcaggatcctacaccttacacatcataaagggagatgatgggactagaggagtaactggacgtttcaccttcaccttacaccgcatgaagctgtacaggagatctctagaacctcctcatcctgcataactgaaaccggacacccacagaacaacgccctattcccctgatcccagctcctggcaaactactattctacactctgattcactctggaatccacgtgatatcaggtcattccttggactctgctctatctttagaggtcactggctcaagtcagccactatgagacacctgggaaaactgcgccaccttgtggctccactgcctgatgactgaactgacctccggacttgactctgttctcccctgtgttatttctgctgaagtacccagtcccaggccaggctttccagtacccaaagggtttaaagacaattggaagttccatcacccatctctaggatgtccttggcaagggaagctgcagagaaaacataccttgggcggcaaagtaagactgaaactaagaagattccagcactgcatgctccaagtgaggaccacaagtggagactcccaagccctccatctccagcagcaaattaaaccccagggaggccatggaggctgtgagcttaacctgtgatcctgagactccggacgcaagctacctgtggtggatgaatggtcagagcctccctatgtctcacaggttgcagttgtctgaaaccaacaggaccctctttctattgggtgtcacaaagtacactgcaggaccctatgaatgtgaaatacggaacccagtgagtgccagccgcagtgacccagtcaccctgaatctcctccatggtccagacctccccagaatttacccttcattcacctattaccgttcaggagaagtcctctacttgtcctgttctgcggactctaacccaccggcacagtattcttggacaattaatgggaagtttcagctatcaggacaaaagctctttatcccccaaattactacaaagcatagcgggctctatgcttgctctgttcgtaactcagccactggcaaggaaagctccaaatccatgacagtaaaagtctctgactggacattaccctgaattctactagttcctccaattccattttcttccatggaatcgctaagaaaaagacccactctgttccagaagccctataagctggaggtggacaactcaatgtaaatttcatgggaaaacccttgtacctgaagcgtgagccactcagaactcactaaaatgttcgacaccataacaacagatgctcaaactgtaaaccaggacaacaagtggatgacttcacactgtggacagtttttcccaagatgtcagaacaagactccccatcatgatgaggctctcacccctcttaactgtccttgctcatgcctgcctctttcacttggcaggataatgcagtcattagaatttcacatgtagtagcttctgagggtaacaatagagtgtcagatatgtcatctcaacccaaacttttacataacatctcagggggaaatgtggctctctccaccttgcatacaggactcccaatagaaatgaacacagagatattgcccgtgtgtttgcagataagatggtttctatgaagaggtaggaaagctgaaattataatagagtcccctttaaatgcacattctgtggatggtctcgccatttcctaagagatacattgtaaaatggacagtaatactgattctagcagaataaaacatgtaccacatttgca

SEQ ID NO: 405142 - DNA, 1075 bp, Homo sapiens
tcgaattcgatatatcatggtcgtaacataaagctctttatccgccatattactacaaagcatagcgggctctatgtttgctctgttcgtaactcagccactggcaaggaaagctccaaatccatgacagtcgaagtctctgactggacagttccctgaattctactagtacctccaattccattttctcccatggaatcactaagagcaagacccactctgttccagaagccctataagctggaggtggacaactcaatgtaaatttcatgggaaaacccttgtacgtgaagcatgagccactcagaactcaccaaaatattcgacaccataacaacagatgctcaaactgtaaaccaggacaacaagtggatgacttcacactgtggacagtttttcccaagatgtcagaacaagactccccatcatgatgaggctctcccccctcttaactgtccttgctcatgcctgcctctttcacttggcaggataatgcagtcattagaatttcacatgtagtagcttctgagagtaacaacagagtgtcagatatgtcatctcaacctcaaacttttacataacatctcagggggaaatgtggctctctccaccttgcatacagggctcccaatagaaatgaacacagagatattgcctgtgtgtttgcagagaagatggtttgtatgaagacgtaggaaagctgaaattataatagagtcccctttaaatccacattgtgtggatggctcttgccgtttcctaagagatacattgtaaaacgtgacagtaagacattctagcagaataaaacatgtaccacctttgctaaaaaaaaaaaaaaaaaaaaaaaaaaaaaaaaaaaaaaaaaacaaaaaaaacaaaaaaaaaaaaaaaaaaaaaaaagagaggaggaagaaagaaaaaaacagggggagaaagcaacagaagaaaagagaaaaaaaacaacgagcagggagcaacgaaagaaaagagaaaaagagagagcaacgggcgaacaggaaacacacagagacaagagcgaggggaccacaaacaaaaaaaagcgggggaaaaa

SEQ ID NO: 405143 - DNA, 2579 bp, Homo sapiens
  misc_feature (2)..(3): n is a, c, g, or t
  misc_feature (5)..(5): n is a, c, g, or t
gnntncgggctgaccctgcccatgagcttgagaattgctcctgccctgggaagaggctcagcacagaaagaggaaggacagcacagctgacagccgtgctcagagagtttctggatcctaggcttatctccacagaggagaacacacaagcagcagagaccatgggaaccctctcagcccctccctgcacacagcgcatcaaatggaaggggctcctgctcacagcatcacttttaaacttctggaacctgcccaccactgcccaagtcacgattgaagccgagccaaccaaagtttccgaggggaaggatgttcttctacttgtccacaatttgccccagaatcttaccggctacatctggtacaaagggcaaatgagggacctctaccattacattacatcatatgtagtagacggtgaaataattatatatgggcctgcatatagtggacgagaaacagcatattccaatgcatccctgctgatccagaatgtcacccgggaggacgcaggatcctacaccttacacatcataaagggagatgatgggactagaggagtaactggacgtttcaccttcaccttacaccgcatgaagctgtacaggagatctctagaacctcctcatcctgcataactgaaaccggacacccacagaacaacgccctattcccctgatcccagctcctggcaaactactattctacactctgattcactctggaatccacgtgatatcaggtcattccttggactctgctctatctttagaggtcactggctcaagtcagccactatgagacacctgggaaaactgcgccaccttgtggctccactgcctgatgactgaactgacctccggacttgactctgttctcccctgtgttatttctgctgaagtacccagtcccaggccaggctttccagtacccaaagggtttaaagacaattggaagttccatcacccatctctaggatgtccttggcaagggaagctgcagagaaaacataccttgggcggcaaagtaagactgaaactaagaagattccagcactgcatgctccaagtgaggaccacaagtggagactcccaagccctccatctccagcagcaaattaaaccccagggaggccatggaggctgtgagcttaacctgtgatcctgagactccggacgcaagctacctgtggtggatgaatggtcagagcctccctatgtctcacaggttgcagttgtctgaaaccaacaggaccctctttctattgggtgtcacaaagtacactgcaggaccctatgaatgtgaaatacggaacccagtgagtgccagccgcagtgacccagtcaccctgaatctcctcccgaagctgcccaagccctacatcaccatcaacaacttaaaccccagggagaataaggatgtcttaaacttcacctgtgaacctaagagtgagaactacacctacatttggtggctaaatggtcagagcctcccggtcagtcccagggtaaagcgacccattgaaaacaggatcctcattctacccagtgtcacgagaaatgaaacaggaccctatcaatgtgaaataagggaccaatatggtggcatccgcagtgacccagtcaccctgaatgtcctctatggtccagacctccccagaatttacccttcattcacctattaccgttcaggagaagtcctctacttgtcctgttctgcggactctaacccaccggcacagtattcttggacaattaatgggaagtttcagctatcaggacaaaagctctttatcccccaaattactacaaagcatagcgggctctatgcttgctctgttcgtaactcagccactggcaaggaaagctccaaatccatgacagtaaaagtctctgactggacattaccctgaattctactagttcctccaattccattttcttccatggaatcgctaagaaaaagacccactctgttccagaagccctataagctggaggtggacaactcaatgtaaatttcatgggaaaacccttgtacctgaagcgtgagccactcagaactcactaaaatgttcgacaccataacaacagatgctcaaactgtaaaccaggacaacaagtggatgacttcacactgtggacagtttttcccaagatgtcagaacaagactccccatcatgatgaggctctcacccctcttaactgtccttgctcatgcctgcctctttcacttggcaggataatgcagtcattagaatttcacatgtagtagcttctgagggtaacaatagagtgtcagatatgtcatctcaacccaaacttttacataacatctcagggggaaatgtggctctctccaccttgcatacaggactcccaatagaaatgaacacagagatattgcccgtgtgtttgcagataagatggtttctatgaagaggtaggaaagctgaaattataatagagtcccctttaaatgcacattctgtggatggtctcgccatttcctaagagatacattgtaaaatggacagtaatactgattctagcagaataaaacatgtaccacatttgca

SEQ ID NO: 405144 - DNA, 657 bp, Homo sapiens
  misc_feature (2)..(3): n is a, c, g, or t
  misc_feature (5)..(5): n is a, c, g, or t
gnntncgggctgaccctgcccatgagcttgagaattgctcctgccctgggaagaggctcagcacagaaagaggaaggacagcacagctgacagccgtgctcagagagtttctggatcctaggcttatctccacagaggagaacacacaagcagcagagaccatgggaaccctctcagcccctccctgcacacagcgcatcaaatggaaggggctcctgctcacagcatcacttttaaacttctggaacctgcccaccactgcccaagtcacgattgaagccgagccaaccaaagtttccgaggggaaggatgttcttctacttgtccacaatttgccccagaatcttaccggctacatctggtacaaagggcaaatgagggacctctaccattacattacatcatatgtagtagacggtgaaataattatatatgggcctgcatatagtggacgagaaacagcatattccaatgcatccctgctgatccagaatgtcacccgggaggacgcaggatcctacaccttacacatcataaagggagatgatgggactagaggagtaactggacgtttcaccttcaccttacacctggagactcctaacctccatctccagcagcaactaaatcccatgtcacgctcgcgcggtaccgaca

SEQ ID NO: 405145 - DNA, 625 bp, Homo sapiens
  misc_feature (2)..(3): n is a, c, g, or t
  misc_feature (5)..(5): n is a, c, g, or t
gnntncgggctgaccctgcccatgagcttgagaattgctcctgccctgggaagaggctcagcacagaaagaggaaggacagcacagctgacagccgtgctcagagagtttctggatcctaggcttatctccacagaggagaacacacaagcagcagagaccatgggaaccctctcagcccctccctgcacacagcgcatcaaatggaaggggctcctgctcacagcatcacttttaaacttctggaacctgcccaccactgcccaagtcacgattgaagccgagccaaccaaagtttccgaggggaaggatgttcttctacttgtccacaatttgccccagaatcttaccggctacatctggtacaaagggcaaatgagggacctctaccattacattacatcatatgtagtagacggtgaaataattatatatgggcctgcatatagtggacgagaaacagcatattccaatgcatccctgctgatccagaatgtcacccgggaggacgcaggatcctacaccttacacatcataaagggagatgatgggactagaggagtaactgcgccaggcactttcccagtcataccggttgtactaccacgcccctcgtatctagctcg

SEQ ID NO: 405146 - DNA, 1141 bp, Homo sapiens
  misc_feature (1070)..(1070): n is a, c, g, or t
gatcactttagttatcagactcctaccaacactgtaccaataacaaaaaatatggaaagctctttatccgccatattactacaaagcatagcgggctctatgtttgctctgttcgtaactcagccactggcaaggaaagctccaaatccatgacagtcgaagtctctggtaagtggatcccagcatcgttggcaatagggttttaggtggagtctatctggcattcagagaagagtcaggaaaacaattgtattcccagcctgtgtcccatgggcacaagcaaatcccaaattctcctcctgaaccctccaaatttgtctaagaacttcgaaaactttaacaaacaggctgatatcttcataatattcccagcctagaccaagcaggaagaacattgatttcattgaaataattgataataatgaagataatgtttttatgatttttatttgaaaatttgctgattctttaaatggtttgttttctacattgatggaatttttctcttttaatctatctacagcttatagcagttcaataaactatacttctgggaaccgtaattgaaacatttacttttgctttctacctgactgccccagaattgggcaactattcatgagaattgatatgtttatggtaatacacatatttgcacaagtacagtaacaatctgctttctttgtaacatgacacatttgaaatcattggttatattaccaatgctttgattcggatgttatattaaaaacatagatagaatgaaccaatatgaactgcaggcaaagtctgaagtcagccttggtttggcttcctattctcaagaggtttgtgaagatttaatctcagattccttataaaaacttagagaaaagaaaattttagaagacagcctacatggtccattgctactcttgctgcacttatgtaaacaatcagaccacatttgaagaaactccacctattttgcaaacaaacttattctactgaaattatcattggtaaaagtagagatgcccatagagggaaaaattatgtggaaaataaaaactgtagtatacctgttaccngattgaaccactgttcattatctttgagtacttataatccactggtagactggactggaccctgaattctt

SEQ ID NO: 405147 - DNA, 1738 bp, Homo sapiens
ccgggaagaagctcagcgcagaaggaggcaggacagcactgctgagagctgtgctcaggaagcttctggatcctaggctcatctccacagaggagaacacacagacagcagagaccatggggctcctctcagcccctccctgcacacagcgcatcacctggaaggggctcctgctcacaggtcattccttggactctgctctatctttagaggtcactggctcaagtcagccactatgagacacctgggaaaactgcgccaccttgtggctccactgcctgatgactgaactgacctccggacttgactctgttctcccctgtgttatttctgctgaagtacccagtcccaggccaggctttccagtacccaaagggtttaaagacaattggaagttccatcacccatctctaggatgtccttggcaagggaagctgcagagaaaacataccttgggcggcaaagtaagactgaaactaagaagattccagcactgcatgctccaagtgaggaccacaagtggagactcccaagccctccatctccagcagcaaattaaaccccagggaggccatggaggctgtgagcttaacctgtgatcctgagactccggacgcaagctacctgtggtggatgaatggtcagagcctccctatgtctcacaggttgcagttgtctgaaaccaacaggaccctctttctattgggtgtcacaaagtacactgcaggaccctatgaatgtgaaatacggaacccagtgagtgccagccgcagtgacccagtcaccctgaatctcctccatggtccagacctccccagaatttacccttcattcacctattaccgttcaggagaagtcctctacttgtcctgttctgcggactctaacccaccggcacagtattcttggacaattaatgggaagtttcagctatcaggacaaaagctctttatcccccaaattactacaaagcatagcgggctctatgcttgctctgttcgtaactcagccactggcaaggaaagctccaaatccatgacagtaaaagtctctgactggacattaccctgaattctactagttcctccaattccattttcttccatggaatcgctaagaaaaagacccactctgttccagaagccctataagctggaggtggacaactcaatgtaaatttcatgggaaaacccttgtacctgaagcgtgagccactcagaactcactaaaatgttcgacaccataacaacagatgctcaaactgtaaaccaggacaacaagtggatgacttcacactgtggacagtttttcccaagatgtcagaacaagactccccatcatgatgaggctctcacccctcttaactgtccttgctcatgcctgcctctttcacttggcaggataatgcagtcattagaatttcacatgtagtagcttctgagggtaacaatagagtgtcagatatgtcatctcaacccaaacttttacataacatctcagggggaaatgtggctctctccaccttgcatacaggactcccaatagaaatgaacacagagatattgcccgtgtgtttgcagataagatggtttctatgaagaggtaggaaagctgaaattataatagagtcccctttaaatgcacattctgtggatggtctcgccatttcctaagagatacattgtaaaatggacagtaatactgattctagcagaataaaacatgtaccacatttgca

SEQ ID NO: 405148 - DNA, 1712 bp, Homo sapiens
ccgggaagaagctcagcgcagaaggaggcaggacagcactgctgagagctgtgctcaggaagcttctggatcctaggctcatctccacagaggagaacacacagacagcagagaccatggggctcctctcagcccctccctgcacacagcgcatcacctggaaggggctcctgctcacaggtcattccttggactctgctctatctttagaggtcactggctcaagtcagccactatgagacacctgggaaaactgcgccaccttgtggctccactgcctgatgactgaactgacctccggacttgactctgttctcccctgtgttatttctgctgaagtacccagtcccaggccaggctttccagtacccaaagggtttaaagacaattggaagttccatcacccatctctaggatgtccttggcaagggaagctgcagagaaaacataccttgggcggcaaagtaagactgaaactaagaagattccagcactgcatgctccaagtgaggaccacaagtggagactcccaagccctccatctccagcagcaaattaaaccccagggaggccatggaggctgtgagcttaacctgtgatcctgagactccggacgcaagctacctgtggtggatgaatggtcagagcctccctatgtctcacaggttgcagttgtctgaaaccaacaggaccctctttctattgggtgtcacaaagtacactgcaggaccctatgaatgtgaaatacggaacccagtgagtgccagccgcagtgacccagtcaccctgaatctcctcccgaagctgcccaagccctacatcaccatcaacaacttaaaccccagggagaataaggatgtcttaaacttcacctgtgaacctaagagtgagaactacacctacatttggtggctaaatggtcagagcctcccggtcagtcccagggtaaagcgacccattgaaaacaggatcctcattctacccagtgtcacgagaaatgaaacaggaccctatcaatgtgaaataagggaccaatatggtggcatccgcagtgacccagtcaccctgaatgtcctctatggtccagacctccccagaatttacccttcattcacctattaccgttcaggagaagtcctctacttgtcctgttctgcggactctaacccaccggcacagtattcttggacaattaatgggaagtttcagctatcaggacaaaagctctttatcccccaaattactacaaagcatagcgggctctatgcttgctctgttcgtaactcagccactggcaaggaaagctccaaatccatgacagtaaaagtctctggtaagcggatcccagtatccttggcaatagggatttaggtggagtctatctggccttcagggaagagtcaggaaaacatttttattcccagcctgcgtcccatgggcacaagcaaatcccaaattctcctcctaaaccctccaaatttgtctaagaactttgaaaactttaacaaacaggctgatatcttcataaaattcccagcctagaccaagcaggaaaaacattgatttcaatgaaataattgataataatgaggataatgtttttatgattttcatttgaaaatttgctgattctttaaatggtttgttttctacattgacggaatttttctcttttaacctatctgtagcttatagcagttcaataaactata

SEQ ID NO: 405149 - DNA, 870 bp, Homo sapiens
cttaaccaagagtataaggggagtggacgctcttgtcatgggagacttggggcccacagcttgtgatgggagaaacaggtgaatacctgaggattcggctcagtgaacatagagggggttgggctgggacttgagggtgtgtcttggctcagagggtcactgtgtccctttaagagaccaggaacatccccttccctcagatgacatcacctgtggctttattctctttgctccagatggtccagacctccccagaatttacccttcattcacctattaccgttcaggagaagtcctctacttgtcctgttctgcggactctaacccaccggcacagtattcttggacaattaatgggaagtttcagctatcaggacaaaagctctttatcccccaaattactacaaagcatagcgggctctatgcttgctctgttcgtaactcagccactggcaaggaaagctccaaatccatgacagtaaaagtctctggtaagcggatcccagtatccttggcaatagggatttaggtggagtctatctggccttcagggaagagtcaggaaaacatttttattcccagcctgcgtcccatgggcacaagcaaatcccaaattctcctcctaaaccctccaaatttgtctaagaactttgaaaactttaacaaacaggctgatatcttcataaaattcccagcctagaccaagcaggaaaaacattgatttcaatgaaataattgataataatgaggataatgtttttatgattttcatttgaaaatttgctgattctttaaatggtttgttttctacattgacggaatttttctcttttaacctatctgtagcttatagcagttcaataaactata

SEQ ID NO: 405150 - DNA, 2377 bp, Homo sapiens
  misc_feature (2)..(3): n is a, c, g, or t
  misc_feature (5)..(5): n is a, c, g, or t
  misc_feature (2306)..(2306): n is a, c, g, or t
gnntncgggctgaccctgcccatgagcttgagaattgctcctgccctgggaagaggctcagcacagaaagaggaaggacagcacagctgacagccgtgctcagagagtttctggatcctaggcttatctccacagaggagaacacacaagcagcagagaccatgggaaccctctcagcccctccctgcacacagcgcatcaaatggaaggggctcctgctcacagcatcacttttaaacttctggaacctgcccaccactgcccaagtcacgattgaagccgagccaaccaaagtttccgaggggaaggatgttcttctacttgtccacaatttgccccagaatcttaccggctacatctggtacaaagggcaaatgagggacctctaccattacattacatcatatgtagtagacggtgaaataattatatatgggcctgcatatagtggacgagaaacagcatattccaatgcatccctgctgatccagaatgtcacccgggaggacgcaggatcctacaccttacacatcataaagggagatgatgggactagaggagtaactggacgtttcaccttcaccttacacctggagactcctaagccctccatctccagcagcaacttaaatcccagggagaccatggaggctgtgagcttaacctgtgaccctgagactccagacgcaagctacctgtggtggatgaatggtcagagcctccctatgactcacagcttgaagctgtccgaaaccaacaggaccctctttctattgggtgtcacaaagtatactgcaggaccctatgaatgtgaaatacggaacccagtgagtgccagccgcagtgacccagtcaccctgaatctcctcccgaagctgcccaagccctacatcaccatcaacaacttaaaccccagggagaataaggatgtcttaaacttcacctgtgaacctaagagtgagaactacacctacatttggtggctaaatggtcagagcctcccggtcagtcccagggtaaagcgacccattgaaaacaggatcctcattctacccagtgtcacgagaaatgaaacaggaccctatcaatgtgaaatacgggaccgatatggtggcatccgcagtgacccagtcaccctgaatgtcctctatggtccagacctccccagaatttacccttcattcacctattaccgttcaggagaagtcctctacttgtcctgttctgcggactctaacccaccggcacagtattcttggacaattaatgaaaagtttcagctaccaggacaaaagctctttatccgccatattactacaaagcatagcgggctctatgtttgctctgttcgtaactcagccactggcaaggaaagctccaaatccatgacagtcgaagtctctggtaagtggatcccagcatcgttggcaatagggttttaggtggagtctatctggcattcagagaagagtcaggaaaacaattgtattcccagcctgtgtcccatgggcacaagcaaatcccaaattctcctcctgaaccctccaaatttgtctaagaacttcgaaaactttaacaaacaggctgatatcttcataatattcccagcctagaccaagcaggaagaacattgatttcattgaaataattgataataatgaagataatgtttttatgatttttatttgaaaatttgctgattctttaaatggtttgttttctacattgatggaatttttctcttttaatctatctacagcttatagcagttcaataaactatacttctgggaaccgtaattgaaacatttacttttgctttctacctgactgccccagaattgggcaactattcatgagaattgatatgtttatggtaatacacatatttgcacaagtacagtaacaatctgctttctttgtaacatgacacatttgaaatcattggttatattaccaatgctttgattcggatgttatattaaaaacatagatagaatgaaccaatatgaactgcaggcaaagtctgaagtcagccttggtttggcttcctattctcaagaggtttgtgaagatttaatctcagattccttataaaaacttagagaaaagaaaattttagaagacagcctacatggtccattgctactcttgctgcacttatgtaaacaatcagaccacatttgaagaaactccacctattttgcaaacaaacttattctactgaaattatcattggtaaaagtagagatgcccatagagggaaaaattatgtggaaaataaaaactgtagtatacctgttaccngattgaaccactgttcattatctttgagtacttataatccactggtagactggactggaccctgaattctt

SEQ ID NO: 405151 - DNA, 284 bp, Homo sapiens
  misc_feature (2)..(3): n is a, c, g, or t
  misc_feature (5)..(5): n is a, c, g, or t
gnntncgggctgaccctgcccatgagcttgagaattgctcctgccctgggaagaggctcagcacagaaagaggaaggacagcacagctgacagccgtgctcagagagtttctggatcctaggcttatctccacagaggagaacacacaagcagcagagaccatgggaaccctctcagcccctccctgcacacagcgcatcaaatggaaggggctcctgctcacagcatcacttttaaacttctggaacctccccccaccccccctgagcatacaagagggccga

SEQ ID NO: 405152 - DNA, 2045 bp, Homo sapiens
  misc_feature (2)..(3): n is a, c, g, or t
  misc_feature (5)..(5): n is a, c, g, or t
gnntncgggctgaccctgcccatgagcttgagaattgctcctgccctgggaagaggctcagcacagaaagaggaaggacagcacagctgacagccgtgctcagagagtttctggatcctaggcttatctccacagaggagaacacacaagcagcagagaccatgggaaccctctcagcccctccctgcacacagcgcatcaaatggaaggggctcctgctcacagcatcacttttaaacttctggaacctgcccaccactgcccaagtcacgattgaagccgagccaaccaaagtttccgaggggaaggatgttcttctacttgtccacaatttgccccagaatcttaccggctacatctggtacaaagggcaaatgagggacctctaccattacattacatcatatgtagtagacggtgaaataattatatatgggcctgcatatagtggacgagaaacagcatattccaatgcatccctgctgatccagaatgtcacccgggaggacgcaggatcctacaccttacacatcataaagggagatgatgggactagaggagtaactggacgtttcaccttcaccttacacctggagactcctaagccctccatctccagcagcaacttaaatcccagggagaccatggaggctgtgagcttaacctgtgaccctgagactccagacgcaagctacctgtggtggatgaatggtcagagcctccctatgactcacagcttgaagctgtccgaaaccaacaggaccctctttctattgggtgtcacaaagtatactgcaggaccctatgaatgtgaaatacggaacccagtgagtgccagccgcagtgacccagtcaccctgaatctcctcccgaagctgcccaagccctacatcaccatcaacaacttaaaccccagggagaataaggatgtcttaaacttcacctgtgaacctaagagtgagaactacacctacatttggtggctaaatggtcagagcctcccggtcagtcccagggtaaagcgacccattgaaaacaggatcctcattctacccagtgtcacgagaaatgaaacaggaccctatcaatgtgaaatacgggaccgatatggtggcatccgcagtgacccagtcaccctgaatgtcctctatggtccagacctccccagaatttacccttcattcacctattaccgttcaggagaagtcctctacttgtcctgttctgcggactctaacccaccggcacagtattcttggacaattaatgaaaagtttcagctaccaggacaaaagctctttatccgccatattactacaaagcatagcgggctctatgtttgctctgttcgtaactcagccactggcaaggaaagctccaaatccatgacagtcgaagtctctggtaagtggatcccagcatcgttggcaatagggttttaggtggagtctatctggcattcagagaagagtcaggaaaacaattgtattcccagcctgtgtcccatgggcacaagcaaatcccaaattctcctcctgaaccctccaaatttgtctaagaacttcgaaaactttaacaaacaggctgatatcttcataatattcccagcctagaccaagcaggaagaacattgatttcattgaaataattgataataatgaagataatgtttttatgatttttatttgaaaatttgctgattctttaaatggtttgttttctacattgatggaatttttctcttttaatctatctacagcttatagcagttcaataaactatacttctgggaaccgtaaaaaaaaaaaaaaaaaaaaaaaaaaaaaaaaaaaaaaaaaacaaaaaaaacaaaaaaaaaaaaaaaaaaaaaaaagagaggaggaagaaagaaaaaaacagggggagaaagcaacagaagaaaagagaaaaaaaacaacgagcagggagcaacgaaagaaaagagaaaaagagagagcaacgggcgaacaggaaacacacagagacaagagcgaggggaccacaaacaaaaaaaagcgggggaaaaa

SEQ ID NO: 405153 - DNA, 1553 bp, Homo sapiens
  misc_feature (2)..(3): n is a, c, g, or t
  misc_feature (5)..(5): n is a, c, g, or t
gnntncgggctgaccctgcccatgagcttgagaattgctcctgccctgggaagaggctcagcacagaaagaggaaggacagcacagctgacagccgtgctcagagagtttctggatcctaggcttatctccacagaggagaacacacaagcagcagagaccatgggaaccctctcagcccctccctgcacacagcgcatcaaatggaaggggctcctgctcacagcatcacttttaaacttctggaacctgcccaccactgcccaagtcacgattgaagccgagccaaccaaagtttccgaggggaaggatgttcttctacttgtccacaatttgccccagaatcttaccggctacatctggtacaaagggcaaatgagggacctctaccattacattacatcatatgtagtagacggtgaaataattatatatgggcctgcatatagtggacgagaaacagcatattccaatgcatccctgctgatccagaatgtcacccgggaggacgcaggatcctacaccttacacatcataaagggagatgatgggactagaggagtaactggacgtttcaccttcaccttacacctggagactcctaagccctccatctccagcagcaacttaaatcccagggagaccatggaggctgtgagcttaacctgtgaccctgagactccagacgcaagctacctgtggtggatgaatggtcagagcctccctatgactcacagcttgaagctgtccgaaaccaacaggaccctctttctattgggtgtcacaaagtatactgcaggaccctatgaatgtgaaatacggaacccagtgagtgccagccgcagtgacccagtcaccctgaatctcctcccgaagctgcccaagccctacatcaccatcaacaacttaaaccccagggagaataaggatgtcttaaacttcacctgtgaacctaagagtgagaactacacctacatttggtggctaaatggtcagagcctcccggtcagtcccagggtaaagcgacccattgaaaacaggatcctcattctacccagtgtcacgagaaatgaaacaggaccctatcaatgtgaaatacgggaccgatatggtggcatccgcagtgacccagtcaccctgaatgtcctctatggtccagacctccccagaatttacccttcattcacctattaccgttcaggagaagtcctctacttgtcctgttctgcggactctaacccaccggcacagtattcttggacaattaatgaaaagtttcagctaccaggacaaaagctctttatccgccatattactacaaagcatagcgggctctatgtttgctctgttcgtaactcagccactggcaaggaaagctccaaatccatgacagtcgaagtctctgactggacagttccctgaattctactagtacctccaattccattttctcccatggaatcactaagagcaagacccactctgttccagaagccctataagctggaggtgggtcagaacataagggtgggtcagaacataaggggtaccgag

SEQ ID NO: 405154 - DNA, 2237 bp, Homo sapiens
ctgaccggtgtatatcgatgcacaaaacattctcctttctctgaaggtttacgatgcatgttatcattaaccagtcttttactactaaacctaaggtggccaactgaaacaaacagttctgagaccgttcttccaccactgattaagagtggggtggcaggtattagggataatattcatttagccttctgagctttctgggcagacttggtgaccttgccagctccagcagccttcttgtccactgctttgatgacacccaccgcaactgtctgtctcatatcacgaacagcaaagcgacccaaaggtggatagtctgagaagctctcaacacacgcctgcatatagtggacgagaaacagcatattccaatgcatccctgctgatccagaatgtcacccgggaggacgcaggatcctacaccttacacatcataaagggagatgatgggactagaggagtaactggacgtttcaccttcaccttacacctggagactcctaagccctccatctccagcagcaacttaaatcccagggagaccatggaggctgtgagcttaacctgtgaccctgagactccagacgcaagctacctgtggtggatgaatggtcagagcctccctatgactcacagcttgaagctgtccgaaaccaacaggaccctctttctattgggtgtcacaaagtatactgcaggaccctatgaatgtgaaatacggaacccagtgagtgccagccgcagtgacccagtcaccctgaatctcctcccgaagctgcccaagccctacatcaccatcaacaacttaaaccccagggagaataaggatgtcttaaacttcacctgtgaacctaagagtgagaactacacctacatttggtggctaaatggtcagagcctcccggtcagtcccagggtaaagcgacccattgaaaacaggatcctcattctacccagtgtcacgagaaatgaaacaggaccctatcaatgtgaaatacgggaccgatatggtggcatccgcagtgacccagtcaccctgaatgtcctctatggtccagacctccccagaatttacccttcattcacctattaccgttcaggagaagtcctctacttgtcctgttctgcggactctaacccaccggcacagtattcttggacaattaatgaaaagtttcagctaccaggacaaaagctctttatccgccatattactacaaagcatagcgggctctatgtttgctctgttcgtaactcagccactggcaaggaaagctccaaatccatgacagtcgaagtctctgactggacagttccctgaattctactagtacctccaattccattttctcccatggaatcactaagagcaagacccactctgttccagaagccctataagctggaggtggacaactcaatgtaaatttcatgggaaaacccttgtacgtgaagcatgagccactcagaactcaccaaaatattcgacaccataacaacagatgctcaaactgtaaaccaggacaacaagtggatgacttcacactgtggacagtttttcccaagatgtcagaacaagactccccatcatgatgaggctctcccccctcttaactgtccttgctcatgcctgcctctttcacttggcaggataatgcagtcattagaatttcacatgtagtagcttctgagagtaacaacagagtgtcagatatgtcatctcaacctcaaacttttacataacatctcagggggaaatgtggctctctccaccttgcatacagggctcccaatagaaatgaacacagagatattgcctgtgtgtttgcagagaagatggtttgtatgaagacgtaggaaagctgaaattataatagagtcccctttaaatccacattgtgtggatggctcttgccgtttcctaagagatacattgtaaaacgtgacagtaagacattctagcagaataaaacatgtaccacctttgctaaaaaaaaaaaaaaaaaaaaaaaaaaaaaaaaaaaaaaaaaacaaaaaaaacaaaaaaaaaaaaaaaaaaaaaaaagagaggaggaagaaagaaaaaaacagggggagaaagcaacagaagaaaagagaaaaaaaacaacgagcagggagcaacgaaagaaaagagaaaaagagagagcaacgggcgaacaggaaacacacagagacaagagcgaggggaccacaaacaaaaaaaagcgggggaaaaa

SEQ ID NO: 405155 - DNA, 1321 bp, Homo sapiens
  misc_feature (2)..(3): n is a, c, g, or t
  misc_feature (5)..(5): n is a, c, g, or t
gnntncgggctgaccctgcccatgagcttgagaattgctcctgccctgggaagaggctcagcacagaaagaggaaggacagcacagctgacagccgtgctcagagagtttctggatcctaggcttatctccacagaggagaacacacaagcagcagagaccatgggaaccctctcagcccctccctgcacacagcgcatcaaatggaaggggctcctgctcacagcatcacttttaaacttctggaacctgcccaccactgcccaagtcacgattgaagccgagccaaccaaagtttccgaggggaaggatgttcttctacttgtccacaatttgccccagaatcttaccggctacatctggtacaaagggcaaatgagggacctctaccattacattacatcatatgtagtagacggtgaaataattatatatgggcctgcatatagtggacgagaaacagcatattccaatgcatccctgctgatccagaatgtcacccgggaggacgcaggatcctacaccttacacatcataaagggagatgatgggactagaggagtaactggacgtttcaccttcaccttacacctggagactcctaagccctccatctccagcagcaacttaaatcccagggagaccatggaggctgtgagcttaacctgtgaccctgagactccagacgcaagctacctgtggtggatgaatggtcagagcctccctatgactcacagcttgaagctgtccgaaaccaacaggaccctctttctattgggtgtcacaaagtatactgcaggaccctatgaatgtgaaatacggaacccagtgagtgccagccgcagtgacccagtcaccctgaatctcctcccgaagctgcccaagccctacatcaccatcaacaacttaaaccccagggagaataaggatgtcttaaacttcacctgtgaacctaagagtgagaactacacctacatttggtggctaaatggtcagagcctcccggtcagtcccagggtaaagcgacccattgaaaacaggatcctcattctacccagtgtcacgagaaatgaaacaggaccctatcaatgtgaaatacgggaccgatatggtggcatccgcagtgacccagtcaccctgaatgtcctctatggtccagacctccccagaatttacccttcattcacctattaccgttcaggagaagtcctctacttgtcctgttctgcggactctacccagtgtcacgagaaatgaaacaggaccctatcaatgtgaaatacgggaccgatatggtggcatccgcagtaacccagtcaccc

SEQ ID NO: 405156 - DNA, 2058 bp, Homo sapiens
  misc_feature (2)..(3): n is a, c, g, or t
  misc_feature (5)..(5): n is a, c, g, or t
gnntncgggctgaccctgcccatgagcttgagaattgctcctgccctgggaagaggctcagcacagaaagaggaaggacagcacagctgacagccgtgctcagagagtttctggatcctaggcttatctccacagaggagaacacacaagcagcagagaccatgggaaccctctcagcccctccctgcacacagcgcatcaaatggaaggggctcctgctcacagcatcacttttaaacttctggaacctgcccaccactgcccaagtcacgattgaagccgagccaaccaaagtttccgaggggaaggatgttcttctacttgtccacaatttgccccagaatcttaccggctacatctggtacaaagggcaaatgagggacctctaccattacattacatcatatgtagtagacggtgaaataattatatatgggcctgcatatagtggacgagaaacagcatattccaatgcatccctgctgatccagaatgtcacccgggaggacgcaggatcctacaccttacacatcataaagggagatgatgggactagaggagtaactggacgtttcaccttcaccttacacccgaagctgcccaagccctacatcaccatcaacaacttaaaccccagggagaataaggatgtcttaaacttcacctgtgaacctaagagtgagaactacacctacatttggtggctaaatggtcagagcctcccggtcagtcccagggtaaagcgacccattgaaaacaggatcctcattctacccagtgtcacgagaaatgaaacaggaccctatcaatgtgaaatacgggaccgatatggtggcatccgcagtgacccagtcaccctgaatgtcctctatggtccagacctccccagaatttacccttcattcacctattaccgttcaggagaagtcctctacttgtcctgttctgcggactctaacccaccggcacagtattcttggacaattaatgaaaagtttcagctaccaggacaaaagctctttatccgccatattactacaaagcatagcgggctctatgtttgctctgttcgtaactcagccactggcaaggaaagctccaaatccatgacagtcgaagtctctgactggacagttccctgaattctactagtacctccaattccattttctcccatggaatcactaagagcaagacccactctgttccagaagccctataagctggaggtggacaactcaatgtaaatttcatgggaaaacccttgtacgtgaagcatgagccactcagaactcaccaaaatattcgacaccataacaacagatgctcaaactgtaaaccaggacaacaagtggatgacttcacactgtggacagtttttcccaagatgtcagaacaagactccccatcatgatgaggctctcccccctcttaactgtccttgctcatgcctgcctctttcacttggcaggataatgcagtcattagaatttcacatgtagtagcttctgagagtaacaacagagtgtcagatatgtcatctcaacctcaaacttttacataacatctcagggggaaatgtggctctctccaccttgcatacagggctcccaatagaaatgaacacagagatattgcctgtgtgtttgcagagaagatggtttgtatgaagacgtaggaaagctgaaattataatagagtcccctttaaatccacattgtgtggatggctcttgccgtttcctaagagatacattgtaaaacgtgacagtaagacattctagcagaataaaacatgtaccacctttgctaaaaaaaaaaaaaaaaaaaaaaaaaaaaaaaaaaaaaaaaaacaaaaaaaacaaaaaaaaaaaaaaaaaaaaaaaagagaggaggaagaaagaaaaaaacagggggagaaagcaacagaagaaaagagaaaaaaaacaacgagcagggagcaacgaaagaaaagagaaaaagagagagcaacgggcgaacaggaaacacacagagacaagagcgaggggaccacaaacaaaaaaaagcgggggaaaaa

SEQ ID NO: 405157 - DNA, 827 bp, Homo sapiens
  misc_feature (2)..(3): n is a, c, g, or t
  misc_feature (5)..(5): n is a, c, g, or t
gnntncgggctgaccctgcccatgagcttgagaattgctcctgccctgggaagaggctcagcacagaaagaggaaggacagcacagctgacagccgtgctcagagagtttctggatcctaggcttatctccacagaggagaacacacaagcagcagagaccatgggaaccctctcagcccctccctgcacacagcgcatcaaatggaaggggctcctgctcacagcatcacttttaaacttctggaacctgcccaccactgcccaagtcacgattgaagccgagccaaccaaagtttccgaggggaaggatgttcttctacttgtccacaatttgccccagaatcttaccggctacatctggtacaaagggcaaatgagggacctctaccattacattacatcatatgtagtagacggtgaaataattatatatgggcctgcatatagtggacgagaaacagcatattccaatgcatccctgctgatccagaatgtcacccgggaggacgcaggatcctacaccttacacatcataaagggagatgatgggactagaggagtaactggacgtttcaccttcaccttacacctggagactcctaagccctccatctccagcagcaacttaaatcccagggagaccatggaggctgtgagcttaacctgtgaccctgagactccagacgcaagctacctgtggtggatgaatggtcagagcctccctatgactcacagcttgaagctgtccgaaaccaacaggaccctctttctattgggtgtcacaaagtatacatgacaactgggatcgctctagagtcaccgcgct

SEQ ID NO: 405158 - DNA, 1317 bp, Homo sapiens
ggtcctagcctcgcacagtggagcagcgtagttcttgagcagtgcgtcatggttgtgtgagttctgtgtcaaacttgctgtaggtctgctttgaggatctgcccagtccggcggctggcgtcttccagcatggtccagacctccccagaatttacccttcattcacctattaccgttcaggagaagtcctctacttgtcctgttctgcggactctaacccaccggcacagtattcttggacaattaatgaaaagtttcagctaccaggacaaaagctctttatccgccatattactacaaagcatagcgggctctatgtttgctctgttcgtaactcagccactggcaaggaaagctccaaatccatgacagtcgaagtctctgactggacagttccctgaattctactagtacctccaattccattttctcccatggaatcactaagagcaagacccactctgttccagaagccctataagctggaggtggacaactcaatgtaaatttcatgggaaaacccttgtacgtgaagcatgagccactcagaactcaccaaaatattcgacaccataacaacagatgctcaaactgtaaaccaggacaacaagtggatgacttcacactgtggacagtttttcccaagatgtcagaacaagactccccatcatgatgaggctctcccccctcttaactgtccttgctcatgcctgcctctttcacttggcaggataatgcagtcattagaatttcacatgtagtagcttctgagagtaacaacagagtgtcagatatgtcatctcaacctcaaacttttacataacatctcagggggaaatgtggctctctccaccttgcatacagggctcccaatagaaatgaacacagagatattgcctgtgtgtttgcagagaagatggtttgtatgaagacgtaggaaagctgaaattataatagagtcccctttaaatccacattgtgtggatggctcttgccgtttcctaagagatacattgtaaaacgtgacagtaagacattctagcagaataaaacatgtaccacctttgctaaaaaaaaaaaaaaaaaaaaaaaaaaaaaaaaaaaaaaaaaacaaaaaaaacaaaaaaaaaaaaaaaaaaaaaaaagagaggaggaagaaagaaaaaaacagggggagaaagcaacagaagaaaagagaaaaaaaacaacgagcagggagcaacgaaagaaaagagaaaaagagagagcaacgggcgaacaggaaacacacagagacaagagcgaggggaccacaaacaaaaaaaagcgggggaaaaa

SEQ ID NO: 405159 - DNA, 2274 bp, Homo sapiens
  misc_feature (2)..(3): n is a, c, g, or t
  misc_feature (5)..(5): n is a, c, g, or t
gnntncgggctgaccctgcccatgagcttgagaattgctcctgccctgggaagaggctcagcacagaaagaggaaggacagcacagctgacagccgtgctcagagagtttctggatcctaggcttatctccacagaggagaacacacaagcagcagagaccatgggaaccctctcagcccctccctgcacacagcgcatcaaatggaaggggctcctgctcacagcatcacttttaaacttctggaacctgcccaccactgcccaagtcacgattgaagccgagccaaccaaagtttccgaggggaaggatgttcttctacttgtccacaatttgccccagaatcttaccggctacatctggtacaaagggcaaatgagggacctctaccattacattacatcatatgtagtagacggtgaaataattatatatgggcctgcatatagtggacgagaaacagcatattccaatgcatccctgctgatccagaatgtcacccgggaggacgcaggatcctacaccttacacatcataaagggagatgatgggactagaggagtaactggacgtttcaccttcaccttacaccgcatgaagctgtacaggagatctctagaacctcctcatcctgcataactgaaaccggacacccacagaacaacgccctattcccctgatcccagctcctggcaaactactattctacactctgattcactctggaatccacgtgatatcaggtcattccttggactctgctctatctttagaggtcactggctcaagtcagccactatgagacacctgggaaaactgcgccaccttgtggctccactgcctgatgactgaactgacctccggacttgactctgttctcccctgtgttatttctgctgaagtacccagtcccaggccaggctttccagtacccaaagggtttaaagacaattggaagttccatcacccatctctaggatgtccttggcaagggaagctgcagagaaaacataccttgggcggcaaagtaagactgaaactaagaagattccagcactgcatgctccaagtgaggaccacaagtggagactcccaagccctccatctccagcagcaaattaaaccccagggaggccatggaggctgtgagcttaacctgtgatcctgagactccggacgcaagctacctgtggtggatgaatggtcagagcctccctatgtctcacaggttgcagttgtctgaaaccaacaggaccctctttctattgggtgtcacaaagtacactgcaggaccctatgaatgtgaaatacggaacccagtgagtgccagccgcagtgacccagtcaccctgaatctcctcccgaagctgcccaagccctacatcaccatcaacaacttaaaccccagggagaataaggatgtcttaaacttcacctgtgaacctaagagtgagaactacacctacatttggtggctaaatggtcagagcctcccggtcagtcccagggtaaagcgacccattgaaaacaggatcctcattctacccagtgtcacgagaaatgaaacaggaccctatcaatgtgaaataagggaccaatatggtggcatccgcagtgacccagtcaccctgaatgtcctctatggtccagacctccccagaatttacccttcattcacctattaccgttcaggagaagtcctctacttgtcctgttctgcggactctaacccaccggcacagtattcttggacaattaatgggaagtttcagctatcaggacaaaagctctttatcccccaaattactacaaagcatagcgggctctatgcttgctctgttcgtaactcagccactggcaaggaaagctccaaatccatgacagtaaaagtctctggtaagcggatcccagtatccttggcaatagggatttaggtggagtctatctggccttcagggaagagtcaggaaaacatttttattcccagcctgcgtcccatgggcacaagcaaatcccaaattctcctcctaaaccctccaaatttgtctaagaactttgaaaactttaacaaacaggctgatatcttcataaaattcccagcctagaccaagcaggaaaaacattgatttcaatgaaataattgataataatgaggataatgtttttatgattttcatttgaaaatttgctgattctttaaatggtttgttttctacattgacggaatttttctcttttaacctatctgtagcttatagcagttcaataaactata

SEQ ID NO: 405160 - DNA, 923 bp, Homo sapiens
  misc_feature (2)..(3): n is a, c, g, or t
  misc_feature (5)..(5): n is a, c, g, or t
  misc_feature (788)..(788): n is a, c, g, or t
  misc_feature (813)..(813): n is a, c, g, or t
  misc_feature (835)..(835): n is a, c, g, or t
  misc_feature (857)..(857): n is a, c, g, or t
  misc_feature (891)..(891): n is a, c, g, or t
gnntncgggctgaccctgcccatgagcttgagaattgctcctgccctgggaagaggctcagcacagaaagaggaaggacagcacagctgacagccgtgctcagagagtttctggatcctaggcttatctccacagaggagaacacacaagcagcagagaccatgggaaccctctcagcccctccctgcacacagcgcatcaaatggaaggggctcctgctcacagcatcacttttaaacttctggaacctgcccaccactgcccaagtcacgattgaagccgagccaaccaaagtttccgaggggaaggatgttcttctacttgtccacaatttgccccagaatcttaccggctacatctggtacaaagggcaaatgagggacctctaccattacattacatcatatgtagtagacggtgaaataattatatatgggcctgcatatagtggacgagaaacagcatattccaatgcatccctgctgatccagaatgtcacccgggaggacgcaggatcctacaccttacacatcataaagggagatgatgggactagaggagtaactggacgtttcaccttcaccttacacccgaagctgcccaagccctacatcaccatcaacaacttaaaccccagggagaataaggatgtcttaaacttcacctgtgaacctaagagtgagaactacacctacatttggtggctcttgtgaacagagacagttgagacttcaacatttcaaccccatagaaggcaaggaagtgcagccaggggaatggggaggcanggaagaaagcatgagtgtgcccggnagagcgatatgtgcatctcttnccaaacctctgagtcagtgcancagtgatgctggcagcatgacatgggacactgcnttggagaattacaccacagaagccgcccaatg

SEQ ID NO: 405161 - DNA, 2237 bp, Homo sapiens
agcggagagcagggaaaggtcagaaagggaagacccaggtctctgaaggaggcgtcaggaaagaagtctaaggatgccctgatgtgagcaggacctgagggcagtgtggagggggccgtgcggacccctggggaagaggattccaaacagaaaaatgccaagcatcacttttaaacttctggaacctgcccaccactgcccaagtcacgattgaagccgagccaaccaaagtttccgaggggaaggatgttcttctacttgtccacaatttgccccagaatcttaccggctacatctggtacaaagggcaaatgagggacctctaccattacattacatcatatgtagtagacggtgaaataattatatatgggcctgcatatagtggacgagaaacagcatattccaatgcatccctgctgatccagaatgtcacccgggaggacgcaggatcctacaccttacacatcataaagggagatgatgggactagaggagtaactggacgtttcaccttcaccttacaccgcatgaagctgtacaggagatctctagaacctcctcatcctgcataactgaaaccggacacccacagaacaacgccctattcccctgatcccagctcctggcaaactactattctacactctgattcactctggaatccacgtgatatcaggtcattccttggactctgctctatctttagaggtcactggctcaagtcagccactatgagacacctgggaaaactgcgccaccttgtggctccactgcctgatgactgaactgacctccggacttgactctgttctcccctgtgttatttctgctgaagtacccagtcccaggccaggctttccagtacccaaagggtttaaagacaattggaagttccatcacccatctctaggatgtccttggcaagggaagctgcagagaaaacataccttgggcggcaaagtaagactgaaactaagaagattccagcactgcatgctccaagtgaggaccacaagtggagactcccaagccctccatctccagcagcaaattaaaccccagggaggccatggaggctgtgagcttaacctgtgatcctgagactccggacgcaagctacctgtggtggatgaatggtcagagcctccctatgtctcacaggttgcagttgtctgaaaccaacaggaccctctttctattgggtgtcacaaagtacactgcaggaccctatgaatgtgaaatacggaacccagtgagtgccagccgcagtgacccagtcaccctgaatctcctccatggtccagacctccccagaatttacccttcattcacctattaccgttcaggagaagtcctctacttgtcctgttctgcggactctaacccaccggcacagtattcttggacaattaatgggaagtttcagctatcaggacaaaagctctttatcccccaaattactacaaagcatagcgggctctatgcttgctctgttcgtaactcagccactggcaaggaaagctccaaatccatgacagtaaaagtctctgactggacattaccctgaattctactagttcctccaattccattttcttccatggaatcgctaagaaaaagacccactctgttccagaagccctataagctggaggtggacaactcaatgtaaatttcatgggaaaacccttgtacctgaagcgtgagccactcagaactcactaaaatgttcgacaccataacaacagatgctcaaactgtaaaccaggacaacaagtggatgacttcacactgtggacagtttttcccaagatgtcagaacaagactccccatcatgatgaggctctcacccctcttaactgtccttgctcatgcctgcctctttcacttggcaggataatgcagtcattagaatttcacatgtagtagcttctgagggtaacaatagagtgtcagatatgtcatctcaacccaaacttttacataacatctcagggggaaatgtggctctctccaccttgcatacaggactcccaatagaaatgaacacagagatattgcccgtgtgtttgcagataagatggtttctatgaagaggtaggaaagctgaaattataatagagtcccctttaaatgcacattctgtggatggtctcgccatttcctaagagatacattgtaaaatggacagtaatactgattctagcagaataaaacatgtaccacatttgca

SEQ ID NO: 405162 - DNA, 469 bp, Homo sapiens
  misc_feature (2)..(3): n is a, c, g, or t
  misc_feature (5)..(5): n is a, c, g, or t
gnntncgggctgaccctgcccatgagcttgagaattgctcctgccctgggaagaggctcagcacagaaagaggaaggacagcacagctgacagccgtgctcagagagtttctggatcctaggcttatctccacagaggagaacacacaagcagcagagaccatgggaaccctctcagcccctccctgcacacagcgcatcaaatggaaggggctcctgctcacagcatcacttttaaacttctggaacctgcccaccactgcccaagtcacgattgaagccgagccaaccaaagtttccgaggggaaggatgttcttctacttgtccacaatttgccccagaatcttaccggctacatctggtacaaagggcaaatgagggacctctaccattacattacatcatatgtagtagacggtgaaataattatatatggctgctctcctggcctctgctctccggtccggct

SEQ ID NO: 405163 - DNA, 1012 bp, Homo sapiens
ggtacctctgtatacgcggctcgatctgactacgcggctcgatctgctacgcggctcagcagcaacttataccccagggaggacatggaggctgtgagcttaacctgtgatcctgagactccggacgcaagctacctgtggtggatgaatggtcagagcctccctatgactcacagcttgcagttgtccaaaaacaaaaggaccctctttctatttggtgtcacaaagtacactgcaggaccctatgaatgtgaaatacggaacccagtgagtgccagccgcagtgacccagtcaccctgaatctcctcccgaagctgcccaagccctacatcaccatcaacaacttaaaccccagggagaataaggatgtcttagccttcacctgtgaacctaagagtgagaactacacctacatttggtggctaaatggtcagagcctcccggtcagtcccagggtaaagcgacccattgaaaacaggatcctcattctacccagtgtcacgagaaatgaaacaggaccctatcaatgtgaaatacaggaccgatatggtggcatccgcagttacccagtcaccctgaatgtcctctatggtccagacctccccagaatttacccttcattcacctattaccattcaggagaaaacctctacttgtcctgcttcgcggactctaacccaccagcagaatattcttggacaattaatgggaagtttcagctatcaggacaaaagctctttatcccccagattactacaaagcatagcgggctctatgcttgctctgttcgtaactcagccactggcatggaaagctccaaatccatgacagtcaaagtctctgctccttcaggaacaggacatcttcctggccttaatccattatagcagccgtgatgtcatttctgtatttcaggaagactggcagacagttgctttcattcttcctcaaagtatttaccatcagctacagtccaaaattgctttttgttcaaggagatttatgaaaaga

SEQ ID NO: 405164 - DNA, 299 bp, Homo sapiens
atcatgtaagtcagatcatgtcgctccttggctcaaaagccttctgtgacttcccatctcactcattaattccaaaatctctacgagccttcagggtcctatgtgacctggtcacccactccctgtgaattgatttcctatcctttgcttttcactcagttctttccagccacacaagactgctgtgtgtttcttatacatgccaagggtgcttttttttttttttttttcttataagacaggtctcactctgtgacctaggctgaagcggtggtgcaatcatggtacactgcagcctc

SEQ ID NO: 405165 - DNA, 1098 bp, Homo sapiens
  misc_feature (5)..(5): n is a, c, g, or t
  misc_feature (734)..(734): n is a, c, g, or t
ggccngctgacccatcgtgggatgcctgggcagtctccagactaaatgcctgtggctgtcagaacggaccaggctgtgtcctaaaactgtgcccacgggcctgcctcgcaggggaggtcttggctgtctctgccctccacagctgccctgcgcaccgcatgccctccactcgcgctgggtgccgagggccgggggagaaggcagggctgcctcgggaagggcgaccttggcccccccgtgtgaaacgcacacctgcatgaggctcccgcgctccctgctcccctcgcgtccttccctgggtgtctccgtgccaggtttttagggagtgcccccccaccccggcccccttctgtgttgctcctgccacttcagtcctctgggacacagggttgagtccgagcagcagagtattggtatgtctgtctgtcccgtggacctgccccgcagggcccagcgtttgtggctacgagcaccagcccgtctgcggcggaaaccccctgtgctcgacccgcttccggctcattcaggaatgtgtggcaactgcagacttgcatctggaacggggagacgtgaggttgcgactcctgcccccagacacactgccatggtgctgcccccagacgcactgctatggtgtggtcttagtgcccagtatctcgtttgagaggctcatccttgtcagaaacattaggcttagaatcgtttaagaagttgcaaattttctggccgggcanagtgctgggattaccggcgtgagccaccacgcctggccaaaagatttgttttttaacatatttgttataacttaagaatcccctctttggcttttgtttcctactccaaagttttttgttcccctttggccttgataccatctttcgttttattaaagttgattatggttcctctgtcttgtccctagccagacaaaggcttaggagaagtcaaaggacgtgttaattatgtttcttgtaaactgacttttcatttccccctaacacatttagttggcttggtgtttagtttaacaatcaattgctacaaatatgctgcttaaaaatgctgcttttattaaaacaaataaatgaattcaaagac

SEQ ID NO: 405166 - DNA, 468 bp, Homo sapiens
tgactgctgtccctggaggcatgagctcctcttccaggctgggctggcctgcagaaccagggactcccacattgaggaagttcctgagcaggcagcagactcccaaggagccaccccagcagctgtagctaaaaccaagggtgggcggaggagctgtgacataagacacccatcacccacccagccagcagcacacctgcattgagacctcgggtcctcgagtccctggcctggtgcattctccccgtgtcccccgagcttcagagcatcagcagtgttcctccttcactgtgacgcttgtcctcacttcccaggtgaggagtctaagaaaacagcctttccatcagcccctgtcgtgacagaccctccagtgggatggtagtggctgcctcacccatttacagggcaacccagttttgctccttctgccttgaaatttgttcctcccagaaactgtccctcacaagg

SEQ ID NO: 405167 - DNA, 317 bp, Homo sapiens
  misc_feature (269)..(269): n is a, c, g, or t
cttcacccctggctctcggcaatgctgctcctctctcctgcatggatcacctgctcctggaattcattctcccatttcttaggttgccactttactgtagcttcctaatcgaagagtcttgctgtgtcacccaggctggaatgccgtggcacaatctcggctcaacctccacctcctgggttcaagtgattcttctgtctcagcctcctgagtagctgggactacaggaagagtgcacaggagcctggcactcctggacctgaggaaancctgaaactgttggtatttgcagatcctcttccaaaaagagttcaccg

SEQ ID NO: 405168 - DNA, 493 bp, Homo sapiens
ttcattttatttaacttaagaacaacagaatgtagaatgtgtccagtcttgagctctgcttaagtgctatgccaatgaatacatgctcttactgataaattagatattatttgcaaagcagataaaagaataaacagtatcccagatgaagagaagaagctgagaagcagaaaatatgggaacatgaaagttctccacatattcagggaatgacacacttagtctgtgtcagagtggccagagtgtatgaatgtgtatgctgaagcagtgagagagagggctgtaaggtagagtcgggtcaaaaagagaaggtccatatatgcatcctaatgagtataatctcattatataagtaattgagagccactgggcatatataagtaggtaaatattttagaagaattctaatgatagtaagcaaagtggattgataggaggcaaggagatttattaagtggctattgcaatagacaagtaatggatttgtggaaca

SEQ ID NO: 405169 - DNA, 978 bp, Homo sapiens
gtgagacgtgtacgcttctgtttcaccttccgctgtgattctaagtttcctgaagccggctaccctgcttcctgttaagcctgtggaactctagtggacatctgaaaccctaaaacatctcatctgtgcaaaaaagaggaatgaccaggtcgggagagtgagaagctcgcaccacttcgaaagcgtctgcctggatgctgaagttcgggttgttcttgtagctctggatcacgcaggacttcacaccttgtcctccgcactcaatgagagcctgaggccgatccacagagaggagctgcaccttcttcatttcccgaactccccagaagagaacctgaggaaaagaccagcagagccatcaccacagatccacggaggagccccacacctgccctggctctgtgtggaaaagtcagacctgctccctgagaaccacgctgtgttcctccaggaaagaactgcacagctttttgagggctcattctttttctctaggtctcccgcccattccatatcacctctcctacaattcaggtggggccactgcccttgagtgccaaagaacaactcagctcctccgctgacccgtacctccactcggtatttgctcagcaccggccgaatgttggcaggaaccgggtagatctgggtgatgtctggtggctcaacgggtgggaggccttgcagcccagaagggggaacctaccgcacaaggcaagtatgagttagatgctggagagacacagggaaggcaacagtgccacacaaccacctcatcagtaagatgttcactgtttgcaccaaagtagttcaggtaaataagcagctttcctattatttttaatgtaagcgcttccaggtccccttgggcttaagtcccgcttacggccgtggggaaacacgaggttctttatcacccgggggctccccatgttcccctgtcaacgttaaagtggccgggaagaaagctacttcgac

SEQ ID NO: 405170 - DNA, 687 bp, Homo sapiens
aggaagggcctgagctgagcccttccctgagttcaacagagatgagagtctggggaagctgaggagactagaattcgtagggcaagaataccagaaagaatggagtcctggagagaaagagctacttatataaatctgcatggggctccttggagtcttgtggaataccaccctgcacatgtgtaggatgagactgcaagatactgggcagaaaataagaacagggagctgtgagctgcatggttcccagagctcacacagcaccgggaaccttcgagttctgcccagccacaatggagagaccttgcattgagtcaagagcccaggagggccgtgcctgagatgtatggctaaaagagctttttaggaaaggttactacagacctaccatgaccagggtgaaaaaacaagcctcagaagcatgaaggtgatccacaagcaacttaggagttgaaagaaaaagagagagagagagaggagggaggaaggaagggcggaaggaaaagaaaccagtactctttaaaggaagataacaaaatccagacactcaacaatgtgacattaaaaagttccatatccagtgaaaacagtcactagatatgttctagattttaaaagactaaaaagggctggaggccaggtgcagtgactcacacctataatcccagcactttgggaggctgaggt

SEQ ID NO: 405171 - DNA, 2385 bp, Homo sapiens
agcgccgggcaggacttccgggagcctggggcccaggactgcagcggcttcggaaggtgggctctgccagcgggaccatgctgctccgagccgcttggaggcgggcggcagtggcggtgacagcggctccagggccgaagcccgcggcgcccactcgggggctgcgcctgcgcgttggagaccgtgctcctcagtctgcggttcccgcagatacagccgctgccccggaggtggggccagtgctgcgacctctctatatggatgtgcaagctacaactcctctggacccccgggtgcttgatgccatgctcccttacctaatcaactactatgggaacccacactcccggacacatgcttatggctgggagagtgaggcagccatggaacgtgctcgtcagcaagtagcatctctgattggagctgatcctcgtgagatcatttttactagtggtgctactgaatccaacaacatagcaattaagggggtggcccgattctacaggtcacggaaaaagcacttgatcaccacccagacagaacacaaatgtgtcttggactcctgccgttcactggaagctgagggctttcaggtcacctacctcccagtgcagaagagtgggatcattgacctaaaggaactagaggctgctatccagccagatactagcctggtgtcagtcatgactgtgaacaatgagattggagtgaagcagcctattgcagaaatagggcggatttgcagttccagaaaggtatatttccatactgatgcagcccaggctgttggaaaaatcccacttgatgtcaatgacatgaaaattgatctcatgagcattagtggtcacaaaatctacggtcccaaaggggttggtgccatctacatccgtcgccggccccgtgtgcgtgtggaggccctgcagagtggaggggggcaggagcggggtatgcggtctgggacagtgcccacacccttagtggtggggctgggggctgcgtgtgaggtggcacagcaagagatggagtatgaccacaagcgaatctcaaagttgtcagagcggctgatacagaatataatgaagagccttccagatgtggtgatgaatggggaccctaagcaccattatcccggctgtatcaacctctcctttgcatatgtggaaggggaaagtctgctgatggcactgaaggacgttgccttatcctcagggagtgcctgcacctctgcatccctggagccctcttatgtgcttagagcaattggcactgatgaggatttagcgcactcttctatcaggtttggaattggccgcttcactacagaggaggaagtggactacacagtggagaaatgcattcagcatgtgaagcgtcttcgagaaatgagccctctctgggagatggttcaggatggcattgacctcaagagcatcaagtggacccaacactagaagaatagggccctgactttgtgctggtctggcccctcctgcctcaccaacccgtgcacaaccagacaccttgttacacctagtggatgctctagattggtatagaccagttgacttcagcatcagtccacctctatgacagaaacacaagaaaactgtctttccctagcttcagttccttgggtgtggagcactccccatttcttctcgggtcttaaagtgtgtggacattttcatcccgaagccatagagacatttgctgtcatattgctgctgggcacatctgtgctcttggtgaggagagcaagaggaaccagaagaagtctctttggtcagggaccatgatgctctacatggacatttgagtcttcgtcttctgctgctgctcggctggaccagcttctttaacagcaagcataatccacttcaatgtaatattttctgtagctccaaaggctatctcttcatattgactgcagacagactgaatggacagtttcttagagggcttgtctcctttctacccttgtcctctttcctttcctttgacctaatggagctagaaatatgtctgtgactccaccagttattctaataatttgttttcttgaaaattgttaatttcaagactggagaaataaactcaccttctatttactctgtgactttatgagaggttgagggaaaagtggaagctgtacttgggaattgtggagaagaccgccactccatctgatttgcataaatgactcagtgggcttttgtatctcttcatttaagaattatttgaatgcctgccaggagccagatttgttctgggtattaggaatacactggttaacaggaccaaaaaagaccctgccctcactgagttttaaattttagtggagagatggaaaataattaaacaaataaacaatgttatagattgtga

SEQ ID NO: 405172 - DNA, 721 bp, Homo sapiens
tggagctagaataactggtggagtcacagacatatttctagctccattaggtcaaaggaaaggaaagaggacaagggtagaaaggagacaagccctctaagaaactgtccattcagtctgtgactccaccagttattctaataatttgttttcttgaaaattgttaatttcaagactggagaaataaactcaccttctatttaaaaaaaaaaaaaaaaaaaaaaaaaaaaaaaaaaaaaaaaaaaaaaaaaaaaaaagaggggggggggggccaaagagatttccccggggggggccacacaacattatagcgcgcgccaacaccagcggaatttcttgggtgaacagagagggggccccccaataatgaggaggaggacatcatattaaacagcgagaggagacggggcgcgccgagcggataaacaacagcgctcgggacgaggggagaaaaaggcggcacagcggggggaaacttgtggggaaagaagaacccctatatctgggggagggggaaacaatatgtgggggaaagaggctcctccaaaaggggatttatgagcgcttaaagggggagaaattaaaaaattttaagaaggggttaaaggggtgggtaaaaaacgtggggataattagagtggggcggtaagaaaaagtttgtggcaaacaggaggtgttgttttattagaaaatattttatccggggagggttgtaaaaacg

SEQ ID NO: 405173 - DNA, 2054 bp, Homo sapiens
agcgccgggcaggacttccgggagcctggggcccaggactgcagcggcttcggaaggtgggctctgccagcgggaccatgctgctccgagccgcttggaggcgggcggcagtggcggtgacagcggctccagggccgaagcccgcggcgcccactcgggggctgcgcctgcgcgttggagaccgtgctcctcagtctgcggttcccgcagatacagccgctgccccggaggtggggccagtgctgcgacctctctatatggatgtgcaagctacaactcctctggacccccgggtgcttgatgccatgctcccttacctaatcaactactatgggaacccacactcccggacacatgcttatggctgggagagtgaggcagccatggaacgtgctcgtcagcaagtagcatctctgattggagctgatcctcgtgagatcatttttactagtggtgctactgaatccaacaacatagcaattaagggggtggcccgattctacaggtcacggaaaaagcacttgatcaccacccagacagaacacaaatgtgtcttggactcctgccgttcactggaagctgagggctttcaggtcacctacctcccagtgcagaagagtgggatcattgacctaaaggaactagaggctgctatccagccagatactagcctggtgtcagtcatgactgtgaacaatgagattggagtgaagcagcctattgcagaaatagggcggatttgcagttccagaaaggtatatttccatactgatgcagcccaggctgttggaaaaatcccacttgatgtcaatgacatgaaaattgatctcatgagcattagtggtcacgtgcgtgtggaggccctgcagagtggaggggggcaggagcggggtatgcggtctgggacagtgcccacacccttagtggtggggctgggggctgcgtgtgaggtggcacagcaagagatggagtatgaccacaagcgaatctcaaagttgtcagagcggctgatacagaatataatgaagagccttccagatgtggtgatgaatggggaccctaagcaccattatcccggctgtatcaacctctcctttgcatatgtggaaggggaaagtctgctgatggcactgaaggacgttgccttatcctcagggagtgcctgcacctctgcatccctggagccctcttatgtgcttagagcaattggcactgatgaggatttagcgcactcttctatcaggtttggaattggccgcttcactacagaggaggaagtggactacacagtggagaaatgcattcagcatgtgaagcgtcttcgagaaatgagccctctctgggagatggttcaggatggcattgacctcaagagcatcaagtggacccaacactagaagaatagggccctgactttgtgctggtctggcccctcctgcctcaccaacccgtgcacaaccagacaccttgttacacctagtggatgctctagattggtatagaccagttgacttcagcatcagtccacctctatgacagaaacacaagaaaactgtctttccctagcttcagttccttgggtgtggagcactccccatttcttctcgggtcttaaagtgtgtggacattttcatcccgaagccatagagacatttgctgtcatattgctgctgggcacatctgtgctcttggtgaggagagcaagaggaaccagaagaagtctctttggtcagggaccatgatgctctacatggacatttgagtcttcgtcttctgctgctgctcggctggaccagcttctttaacagcaagcataatccacttcaatgtaatattttctgtagctccaaaggctatctcttcatattgactgcagacagactgaatggacagtttcttagagggcttgtctcctttctacccttgtcctctttcctttcctttgacctaatggagctagaaatatgtctgtgactccaccagttattctaataatttgttttcttgaaaattgttaatttcaagactggagaaataaactcaccttctattta

SEQ ID NO: 405174 - DNA, 1950 bp, Homo sapiens
agcgccgggcaggacttccgggagcctggggcccaggactgcagcggcttcggaaggtgggctctgccagcgggaccatgctgctccgagccgcttggaggcgggcggcagtggcggtgacagcggctccagggccgaagcccgcggcgcccactcgggggctgcgcctgcgcgttggagaccgtgctcctcagtctgcggttcccgcagatacagccgctgccccggaggtggggccagtgctgcgacctctctatatggatgtgcaagctacaactcctctggacccccgggtgcttgatgccatgctcccttacctaatcaactactatgggaacccacactcccggacacatgcttatggctgggagagtgaggcagccatggaacgtgctcgtcagcaagtagcatctctgattggagctgatcctcgtgagatcatttttactagtggtgctactgaatccaacaacatagcaattaagggggtggcccgattctacaggtcacggaaaaagcacttgatcaccacccagacagaacacaaatgtgtcttggactcctgccgttcactggaagctgagggctttcaggtcacctacctcccagtgcagaagagtgggatcattgacctaaaggaactagaggctgctatccagccagatactagcctggtgtcagtcatgactgtgaacaatgagattggagtgaagcagcctattgcagaaatagggcggatttgcagttccagaaaggtatatttccatactgatgcagcccaggctgttggaaaaatcccacttgatgtcaatgacatgaaaattgatctcatgagcattagtggtcacaaaatctacggtcccaaagtatgaccacaagcgaatctcaaagttgtcagagcggctgatacagaatataatgaagagccttccagatgtggtgatgaatggggaccctaagcaccattatcccggctgtatcaacctctcctttgcatatgtggaaggggaaagtctgctgatggcactgaaggacgttgccttatcctcagggagtgcctgcacctctgcatccctggagccctcttatgtgcttagagcaattggcactgatgaggatttagcgcactcttctatcaggtttggaattggccgcttcactacagaggaggaagtggactacacagtggagaaatgcattcagcatgtgaagcgtcttcgagaaatgagccctctctgggagatggttcaggatggcattgacctcaagagcatcaagtggacccaacactagaagaatagggccctgactttgtgctggtctggcccctcctgcctcaccaacccgtgcacaaccagacaccttgttacacctagtggatgctctagattggtatagaccagttgacttcagcatcagtccacctctatgacagaaacacaagaaaactgtctttccctagcttcagttccttgggtgtggagcactccccatttcttctcgggtcttaaagtgtgtggacattttcatcccgaagccatagagacatttgctgtcatattgctgctgggcacatctgtgctcttggtgaggagagcaagaggaaccagaagaagtctctttggtcagggaccatgatgctctacatggacatttgagtcttcgtcttctgctgctgctcggctggaccagcttctttaacagcaagcataatccacttcaatgtaatattttctgtagctccaaaggctatctcttcatattgactgcagacagactgaatggacagtttcttagagggcttgtctcctttctacccttgtcctctttcctttcctttgacctaatggagctagaaatatgtctgtgactccaccagttattctaataatttgttttcttgaaaattgttaatttcaagactggagaaataaactcaccttctattta

SEQ ID NO: 405175 - DNA, 2330 bp, Homo sapiens
agcgccgggcaggacttccgggagcctggggcccaggactgcagcggcttcggaaggtgggctctgccagcgggaccatgctgctccgagccgcttggaggcgggcggcagtggcggtgacagcggctccagggccgaagcccgcggcgcccactcgggggctgcgcctgcgcgttggagaccgtgctcctcagtctgcggttcccgcagatacagccgctgccccggaggtggggccagtgctgcgacctctctatatggatgtgcaagctacaactcctctggacccccgggtgcttgatgccatgctcccttacctaatcaactactatgggaacccacactcccggacacatgcttatggctgggagagtgaggcagccatggaacgtgctcgtcagcaagtagcatctctgattggagctgatcctcgtgagatcatttttactagtggtgctactgaatccaacaacatagcaattaagggggtggcccgattctacaggtcacggaaaaagcacttgatcaccacccagacagaacacaaatgtgtcttggactcctgccgttcactggaagctgagggctttcaggtcacctacctcccagtgcagaagagtgggatcattgacctaaaggaactagaggctgctatccagccagatactagcctggtgtcagtcatgactgtgaacaatgagattggagtgaagcagcctattgcagaaatagggcggatttgcagttccagaaaggtatatttccatactgatgcagcccaggctgttggaaaaatcccacttgatgtcaatgacatgaaaattgatctcatgagcattagtggtcacaaaatctacggtcccaaaggggttggtgccatctacatccgtcgccggccccgtgtgcgtgtggaggccctgcagagtggaggggggcaggagcggggtatgcggtctgggacagtgcccacacccttagtggtggggctgggggctgcgtgtgaggtggcacagcaagagatggagtatgaccacaagcgaatctcaaagttgtcagagcggctgatacagaatataatgaagagccttccagatgtggtgatgaatggggaccctaagcaccattatcccggctgtatcaacctctcctttgcatatgtggaaggggaaagtctgctgatggcactgaaggacgttgccttatcctcagggagtgcctgcacctctgcatccctggagccctcttatgtgcttagagcaattggcactgatgaggatttagcgcactcttctatcaggtttggaattggccgcttcactacagaggaggaagtggactacacagtggagaaatgcattcagcatgtgaagcgtcttcgagaaatgagccctctctgggagatggttcaggatggcattgacctcaagagcatcaagtggacccaacactagaagaatagggccctgactttgtgctggtctggcccctcctgcctcaccaacccgtgcacaaccagacaccttgttacacctagtggatgctctagattggtatagaccagttgacttcagcatcagtccacctctatgacagaaacacaagaaaactgtctttccctagcttcagttccttgggtgtggagcactccccatttcttctcgggtcttaaagtgtgtggacattttcatcccgaagccatagagacatttgctgtcatattgctgctgggcacatctgtgctcttggtgaggagagcaagaggaaccagaagaagtctctttggtcagggaccatgatgctctacatggacatttgagtcttcgtcttctgctgctgctcggctggaccagcttctttaacagcaagcataatccacttcaatgtaatattttctgtagctccaaaggctatctcttcatattgactgcagacagactgaatggacagtttcttagagggcttgtctcctttctacccttgtcctctttcctttcctttgacctaatggagctagaaatatgtctgtgactccaccagttattctaataatttgttttcttgaaaattgttaatttcaagactggagaaataaactcaccttctatttactctgtgactttatgagaggttgaggtgcataaatgactcagtgggcttttgtatctcttcatttaagaattatttgaatgcctgccaggagccagatttgttctgggtattaggaatacactggttaacaggaccaaaaaagaccctgccctcactgagttttaaattttagtggagagatggaaaataattaaacaaataaacaatgttatagattgtga

SEQ ID NO: 405176 - DNA, 1499 bp, Homo sapiens
agcgccgggcaggacttccgggagcctggggcccaggactgcagcggcttcggaaggtgggctctgccagcgggaccatgctgctccgagccgcttggaggcgggcggcagtggcggtgacagcggctccagggccgaagcccgcggcgcccactcgggggctgcgcctgcgcgttggagaccgtgctcctcagtctgcggttcccgcagatacagccgctgccccggaggtggggccagtgctgcgacctctctatatggatgtgcaagctacaactcctctggacccccgggtgcttgatgccatgctcccttacctaatcaactactatgggaacccacactcccggacacatgcttatggctgggagagtgaggcagccatggaacgtgctcgtcagcaagtagcatctctgattggagctgatcctcgtgagatcatttttactagtggtgctactgaatccaacaacatagcaattaagggggtggcccgattctacaggtcacggaaaaagcacttgatcaccacccagacagaacacaaatgtgtcttggactcctgccgttcactggaagctgagggctttcaggtcacctacctcccagtgcagaagagtgggatcattgacctaaaggaactagaggctgctatccagccagatactagcctggtgtcagtcatgactgtgaacaatgagattggagtgaagcagcctattgcagaaatagggcggatttgcagttccagaaaggtatatttccatactgatgcagcccaggctgttggaaaaatcccacttgatgtcaatgacatgaaaattgatctcatgagcattagtggtcacaaaatctacggtcccaaaggggttggtgccatctacatccgtcgccggccccgtgtgcgtgtggaggccctgcagagtggaggggggcaggagcggggtatgcggtctgggacagtgcccacacccttagtggtggggctgggggctgcgtgtgaggtggcacagcaagagatggagtatgaccacaagcgaatctcaaagttgtcagagcggctgatacagaatataatgaagagccttccagatgtggtgatgaatggggaccctaagcaccattatcccggctgtatcaacctctcctttgcatatgtggaaggggaaagtctgctgatggcactgaaggacgttgccttatcctcagggagtgcctgcacctctgcatccctggagccctcttatgtgcttagagcaattggcactgatgaggatttagcgcactcttctatcaggtcagtgagttgagctgcaacatttatgaaaggcatcctcttatatttttcatctcctgttacagtttttttctttttccaccctgaagtttttctcagtcgagttctccttatctcttctcataaccttgtgaaagtttctagagcagtggttctcagacttcattgagtatcacctgggaagtttgtgaaatatgatatc

SEQ ID NO: 405177 - DNA, 180 bp, Homo sapiens
gagatacagtggtccccatgagtacataggatgataggtggggctgatacatagtcacttccagttataggagaagggcttctcaaactgtctttctgagctggttaatggttactgcctaatccttccttgcctgctccttagtatgaccacaagcgaatctcaaagttgtcagagcgg

SEQ ID NO: 405178 - DNA, 2108 bp, Homo sapiens
agcgccgggcaggacttccgggagcctggggcccaggactgcagcggcttcggaaggtgggctctgccagcgggaccatgctgctccgagccgcttggaggcgggcggcagtggcggtgacagcggctccagggccgaagcccgcggcgcccactcgggggctgcgcctgcgcgttggagaccgtgctcctcagtctgcggttcccgcagatacagccgctgccccggaggtggggccagtgctgcgacctctctatatggatgtgcaagctacaactcctctggacccccgggtgcttgatgccatgctcccttacctaatcaactactatgggaacccacactcccggacacatgcttatggctgggagagtgaggcagccatggaacgtgctcgtcagcaagtagcatctctgattggagctgatcctcgtgagatcatttttactagtggtgctactgaatccaacaacatagcaattaagggggtggcccgattctacaggtcacggaaaaagcacttgatcaccacccagacagaacacaaatgtgtcttggactcctgccgttcactggaagctgagggctttcaggtcacctacctcccagtgcagaagagtgggatcattgacctaaaggaactagaggctgctatccagccagatactagcctggtgtcagtcatgactgtgaacaatgagattggagtgaagcagcctattgcagaaatagggcggatttgcagttccagaaaggtatatttccatactgatgcagcccaggctgttggaaaaatcccacttgatgtcaatgacatgaaaattgatctcatgagcattagtggtcacaaaatctacggtcccaaaggggttggtgccatctacatccgtcgccggccccgtgtgcgtgtggaggccctgcagagtggaggggggcaggagcggggtatgcggtctgggacagtgcccacacccttagtggtggggctgggggctgcgtgtgaggtggcacagcaagagatggagtatgaccacaagcgaatctcaaagttgtcagagcggctgatacagaatataatgaagagccttccagatgtggtgatgaatggggaccctaagcaccattatcccggctgtatcaacctctcctttgcatatgtggaaggggaaagtctgctgatggcactgaaggacgttgccttatcctcagggagtgcctgcacctctgcatccctggagccctcttatgtgcttagagcaattggcactgatgaggatttagcgcactcttctatcaggtttggaattggccgcttcactacagaggaggaagtggactacacagtggagaaatgcattcagcatgtgaagcgtcttcgagaaatgagccctctctgggagatggttcaggatggcattgacctcaagagcatcaagtggacccaacactagaagaatagggccctgactttgtgctggtctggcccctcctgcctcaccaacccgtgcacaaccagacaccttgttacacctagtggatgctctagattggtatagaccagttgacttcagcatcagtccacctctatgacagaaacacaagaaaactgtctttccctagcttcagttccttgggtgtggagcactccccatttcttctcgggtcttaaagtgtgtggacattttcatcccgaagccatagagacatttgctgtcatattgctgctgggcacatctgtgctcttggtgaggagagcaagaggaaccagaagaagtctctttggtcagggaccatgatgctctacatggacatttgagtcttcgtcttctgctgctgctcggctggaccagcttctttaacagcaagcataatccacttcaatgtaatattttctgtagctccaaaggctatctcttcatattgactgcagacagactgaatggacagtttcttagagggcttgtctcctttctacccttgtcctctttcctttcctttgacctaatggagctagaaatatgtctgtgactccaccagttattctaataatttgttttcttgaaaattgttaatttcaagactggagaaataaactcaccttctattta

SEQ ID NO: 405179 - DNA, 801 bp, Homo sapiens
  misc_feature (1)..(1): n is a, c, g, or t
ntgcctacactcataaccactacaactctagagtcaaggtcccccacaccgacatgcggccggcgcagtatctactatccccgcgctaccccctcttccgcaaagctatgtaggcacgccctccagagctcaagggaccgctaatagaagaatagcccccaccctctactgtatggcccctcaggcgttgttaaccgggcgatacaaagaaaccttgttacacctagtggatgctctagattggtatagaccagttgacttcagcatcagtccacctctatgacagaaacacaagaaaactgtctttccctagcttcagttccttgggtgtggagcactccccatttcttctcgggtcttaaagtgtgtggacattttcatcccgaagccatagagacatttgctgtcatattgctgctgggcacatctgtgctcttggtgaggagagcaagaggaaccagaagaagtctctttggtcagggaccatgatgctctacatggacatttgagtcttcgtcttctgctgctgctcggctggaccagcttctttaacagcaagcataatccacttcaatgtaatattttctgtagctccaaaggctatctcttcatattgactgcagacagactgaatggacagtttcttagagggcttgtctcctttctacccttgtcctctttcctttcctttgacctaatggagctagaaatatgtctgtgactccaccagttattctaataatttgttttcttgaaaattgttaatttcaagactggagaaataaactcaccttctattta

SEQ ID NO: 405180 - DNA, 1938 bp, Homo sapiens
agcgccgggcaggacttccgggagcctggggcccaggactgcagcggcttcggaaggtgggctctgccagcgggaccatgctgctccgagccgcttggaggcgggcggcagtggcggtgacagcggctccagggccgaagcccgcggcgcccactcgggggctgcgcctgcgcgttggagaccgtgctcctcagtctgcggttcccgcagatacagccgctgccccggaggtggggccagtgctgcgacctctctatatggatgtgcaagctacaactcctctggacccccgggtgcttgatgccatgctcccttacctaatcaactactatgggaacccacactcccggacacatgcttatggctgggagagtgaggcagccatggaacgtgctcgtcagcaagtagcatctctgattggagctgatcctcgtgagatcatttttactagtggtgctactgaatccaacaacatagcaattaagggggtggcccgattctacaggtcacggaaaaagcacttgatcaccacccagacagaacacaaatgtgtcttggactcctgccgttcactggaagctgagggctttcaggtcacctacctcccagtgcagaagagtgggatcattgacctaaaggaactagaggctgctatccagccagatactagcctggtgtcagtcatgactgtgaacaatgagattggagtgaagcagcctattgcagaaatagggcggatttgcagttccagaaaggtatatttccatactgatgcagcccaggctgttggaaaaatcccacttgatgtcaatgacatgaaaattgatctcatgagcattagtggtcacaaaatctacggtcccaaaggggttggtgccatctacatccgtcgccggccccgtgtgcgtgtggaggccctgcagagtggaggggggcaggagcggggtatgcggtctgggacagtgcccacacccttagtggtggggctgggggctgcgtgtgaggtggcacagcaagagatggagtatgaccacaagcgaatctcaaagttgtcagagcggctgatacagaatataatgaagagccttccagatgtggtgatgaatggggaccctaagcaccattatcccggctgtatcaacctctcctttgcatatgtggaaggggaaagtctgctgatggcactgaaggacgttgccttatcctcagggagtgcctgcacctctgcatccctggagccctcttatgtgcttagagcaattggcactgatgaggatttagcgcactcttctatcaggtttggaattggccgcttcactacagaggaggaagtggactacacagtggagaaatgcattcagcatgtgaagcgtcttcgagaaatgagccctctctgggagatggttcaggatggcattgacctcaagagcatcaagtggacccaacactagaagaatagggccctgactttgtgctggtctggccctctcgggtcttaaagtgtgtggacattttcatcccgaagccatagagacatttgctgtcatattgctgctgggcacatctgtgctcttggtgaggagagcaagaggaaccagaagaagtctctttggtcagggaccatgatgctctacatggacatttgagtcttcgtcttctgctgctgctcggctggaccagcttctttaacagcaagcataatccacttcaatgtaatattttctgtagctccaaaggctatctcttcatattgactgcagacagactgaatggacagtttcttagagggcttgtctcctttctacccttgtcctctttcctttcctttgacctaatggagctagaaatatgtctgtgactccaccagttattctaataatttgttttcttgaaaattgttaatttcaagactggagaaataaactcaccttctattta

SEQ ID NO: 405181 - DNA, 2047 bp, Homo sapiens
agcgccgggcaggacttccgggagcctggggcccaggactgcagcggcttcggaaggtgggctctgccagcgggaccatgctgctccgagccgcttggaggcgggcggcagtggcggtgacagcggctccagggccgaagcccgcggcgcccactcgggggctgcgcctgcgcgttggagaccgtgctcctcagtctgcggttcccgcagatacagccgctgccccggaggtggggccagtgctgcgacctctctatatggatgtgcaagctacaactcctctggacccccgggtgcttgatgccatgctcccttacctaatcaactactatgggaacccacactcccggacacatgcttatggctgggagagtgaggcagccatggaacgtgctcgtcagcaagtagcatctctgattggagctgatcctcgtgagatcatttttactagtggtgctactgaatccaacaacatagcaattaagggggtggcccgattctacaggtcacggaaaaagcacttgatcaccacccagacagaacacaaatgtgtcttggactcctgccgttcactggaagctgagggctttcaggtcacctacctcccagtgcagaagagtgggatcattgacctaaaggaactagaggctgctatccagccagatactagcctggtgtcagtcatgactgtgaacaatgagattggagtgaagcagcctattgcagaaatagggcggatttgcagttccagaaaggtatatttccatactgatgcagcccaggctgttggaaaaatcccacttgatgtcaatgacatgaaaattgatctcatgagcattagtggtcacaaaatctacggtcccaaaggggttggtgccatctacatccgtcgccggccccgtgtgcgtgtggaggccctgcagagtggaggggggcaggagcggggtatgcggtctgggacagtgcccacacccttagtggtggggctgggggctgcgtgtgaggtggcacagcaagagatggagtatgaccacaagcgaatctcaaagttgtcagagcggctgatacagaatataatgaagagccttccagatgtggtgatgaatggggaccctaagcaccattatcccggctgtatcaacctctcctttgcatatgtggaaggggaaagtctgctgatggcactgaaggacgttgccttatcctcagggagtgcctgcacctctgcatccctggagccctcttatgtgcttagagcaattggcactgatgaggatttagcgcactcttctatcaggtttggaattggccgcttcactacagaggaggaagtggactacacagtggagaaatgcattcagcatgtgaagcgtcttcgagaaatgagccctctctgggagatggttcaggatggcattgacctcaagagcatcaagtggacccaacactagaagaatagggccctgactttgtgctggtctggcccctcctgcctcaccaacccgtgcacaaccagacaccttgttacacctagtggatgctctagattggtatagaccagttgacttcagcatcagtccacctctatgacagaaacacaagaaaactgtctttccctagcttcagttccttgggtgtggagcactccccatttctattgctgctgggcacatctgtgctcttggtgaggagagcaagaggaaccagaagaagtctctttggtcagggaccatgatgctctacatggacatttgagtcttcgtcttctgctgctgctcggctggaccagcttctttaacagcaagcataatccacttcaatgtaatattttctgtagctccaaaggctatctcttcatattgactgcagacagactgaatggacagtttcttagagggcttgtctcctttctacccttgtcctctttcctttcctttgacctaatggagctagaaatatgtctgtgactccaccagttattctaataatttgttttcttgaaaattgttaatttcaagactggagaaataaactcaccttctattta

SEQ ID NO: 405182 - DNA, 797 bp, Homo sapiens
agcgccgggcaggacttccgggagcctggggcccaggactgcagcggcttcggaaggtgggctctgccagcgggaccatgctgctccgagccgcttggaggcgggcggcagtggcggtgacagcggctccagggccgaagcccgcggcgcccactcgggggctgcgcctgcgcgttggagaccgtgctcctcagtctgcggttcccgcagatacagccgctgccccggaggtggggccagtgctgcgacctctctatatggatgtgcaagctacaactcctctggacccccgggtgcttgatgccatgctcccttacctaatcaactactatgggaacccacactcccggacacatgcttatggctgggagagtgaggcagccatggaacgtgctcgtcagcaagtagcatctctgattggagctgatcctcgtgagatcatttttactagtggtgctactgaatccaacaacatagcaattaagactgagtctcactctgtcatccaggctggagtgcagtggcacgatcttgactcactgcaagctccgcctcctgggttcacgccattctcctgcctcagcctcctgagtagctgggactacaggcgccctccaccacacccggctaattttttgtatttttagtagagacaggggtttcactgtgttagccagaatggtctcgatctcctgacctcgtgatccgccctcctcggcctcccaaagtgccccacaaccatttttacttactgatgtaaatactttttaggataaaatagagtataaatcaattat

SEQ ID NO: 405183 - DNA, 4661 bp, Homo sapiens
cgggggcccggtgggcccgcggaggaaagatactggggagtgggagccgcggggttcagagcgatgattcccccacaggaggcatccgctcgacggcgggagattgaggacaagctgaagcaggaggaggagactctgtccttcatccgagacagcctggagaagagcgaccagctcactaagaacatggtgtctatcttatcatcctttgagagccgccttatgaagctggagaactccatcatccctgtgcacaagcagacggagaatctgcagcggctgcaggagaatgttgagaagacgctgtcctgcctggaccatgtcatcagctactaccatgtggccagtgacactgagaagatcatcagagagggccccacaggtaggctggaagagtacctgggaagcatggccaagattcagaaggcagtggagtatttccaggacaacagcccagacagcccggaactcaacaaagtgaaactgctctttgagcgcgggaaggaggccctggagtccgaatttcgcagcctgatgacgcggcacagtaaggtcgtctcgcccgtgctcatcttggatctgatcagtggtgacgatgatctggaggcccaggaggacgtgaccctggagcacctgcccgagagcgtgctccaggatgtcattcgcatctcccgctggctggtggaatatggccgcaaccaagatttcatgaacgtctactaccagatacgctccagccagctggaccgctccatcaaaggactgaaggagcatttccataagagcagttcttcctctggggttccctactcccctgctatccccaacaagaggaaagacacacctaccaagaagccagtcaagcggccagggagagatgacatgctggacgtggagaccgatgcctacatccactgcgtcagtgccttcgtcaagctggcgcagagcgagtaccagctgctggccgacatcatccccgagcaccaccagaagaagaccttcgactccctgatacaggatgccctggatgggctgatgcttgaaggggagaacatcgtgtctgctgcccggaaggccattgtgcgacacgacttctccacggtgctcaccgtcttccccatcctgcgacacctcaagcagaccaagcctgagtttgaccaggtgctccagggcacggctgccagcacaaagaacaagctgcctggcctcatcacatccatggagaccatcggtgccaaagcgctggaggacttcgcagacaacatcaagaatgacccggacaaggagtacaacatgccgaaggacggcaccgtacacgagctcaccagcaatgccatcctcttcctgcagcagcttttggacttccaggagacggcaggcgccatgctggcctcccaagagaccagctcttcggccaccagctacagctctgagttcagcaagcggctgctaagcacctatatctgtaaagtgctgggcaacctgcagttgaacttgctgagcaagtccaaggtgtacgaggacccagctctgagcgccatcttcctgcacaacaactacaattacatcctcaagtccctggagaagtctgaactgatccagctggtggcagtgacacagaagactgctgagcgctcctaccgggagcacattgagcagcagatccagacctaccagcgcagctggttaaaggtgactgattacatcgcagagaagaatctacctgtgttccagccgggagtcaagctccgggacaaggagcggcagattatcaaggagcgttttaagggcttcaatgatggcctcgaagaactgtgcaaaatccagaaggcctgggctattccagacacagagcagagggacaggattcgccaggcccagaagaccattgtcaaggagacctacggggcctttctacagaagtttggcagcgtgcccttcaccaagaacccggagaagtacatcaagtacggggtggagcaggtgggcgacatgatcgatcgccttttcgacacctctgcctgagcctgctgctagccctgcctggttccaccagactggcgtgtcattggacagataaaccagtgttagcttgcctctgggctgggtgagcttgaagtcctctgggacagagacctgtctccacgcctccgggagctgtgtccctgagccccctagtcctggctcctgctttttccccacagcccgtgttcccagccgaaccagcactctcccggaagcctggggtccctccacaccttggcttttatgaccctgatggcttctgaaacaggaaaagagagaaggaagacagaggcctgtgcccactgctgctccatgtgtaccaagagcagcagggcagaagggccctccctccagcctaggtcagaggtggggacagagaactcccctacagcccagagatgtggcagggctcagagaagcagccagagctcctggaggaaaggcagtcgggactgaccccctctcttaaaacacattcccgcccgcccacaggcctgaggtctgggacctttccctcccaggagtcccctaggtggctgggggaggcaggctcactggccattttccctagagtccagcacactgcaggaggcgttcggaggaggagttccgccccaccctctacagccttcctcaggcccctgtctctggtccccagcctcagtgcctcttggcccagggccaggcagtcgtggttgcagaaggagcaattaggctgcctgcctgtgggctgggagacagggacaatggggaaaagttaaggagcaaaatgggggttggaagcaaaaaatagggccccacctatttaggacgagattgaagactgacccttgaggcacacttgcactggagatgggtttatttcacgctctgtgcttgtgtgctagcggagggagagctcagggtggcttaatccagaggccctgtcatggcccgcccccagccatgggaaagcaaacttcatcctaaggtgtgcagcccaggccctgcccctttacagtctaggccgcctgccatggggtgcagcctctccaggggctgcgtcagacttgcacgctgcccacatccagattcctgcaaagacgaattgggtgcacagcaccccaaccacatacacgaggaagaagatgcggtcagcagtctcaggccagcttctctgtgacccctttactcctctggagggctctgtggggagagatacagggaaaggagctgttcttcaaggtcccctcaacatgagcggaagagcgaaccccaggggtcatcagcctgtatcgcttcctttcttagattctcagctgatgaaaatttgggtctggcccatttcaggccatcttcagttgaagaaacaccctcttaggctgtgcaaggcatgggttatcaggggattgaggtcacctgggacttcagggaggctcagcttgctccctgccccagacctgtttcttctaagggaggaggacatggtggagaccagggacaggagagccagcagggtggatgcaaggggcctctacccacacctggacctccgtgccctcaccccagccctaggtgtgcacctaggcctcattccttaccccccagcccctgcccaccttcagcaggatgaggccctgggttgccgtgctctcgctgttcccctctcggggctgggctggggccgctcttggccccaaggttgccccgggccagcagcccagccagcagcacagtctctatggtgctgaggaagagcagcagcagcaggatggtgaagtagtaaactgggggaggcagggcacagggagatgctcaggggccagtccctgtgtctctggtgcccagcgagctgagcaccagtgggtgaccggggagaaacagggcagactgggtaagggagcagggcttactgagcagtgggttgcaggaggaggagctgggcagggcctgcaccagggaggagtggaggacgaggtaactcagcagcaatgtcaccttgtagcctatgcgctcaatggcccggaggggcagcaaccccccgcacacgtcagccaacagcagtgcctctgcaggcaccaagagagcgatgatggacttgagcgccgtgttcttcagcctcagctggaaggggaaaagtcagggccttcccggcgggggggaaggaggtgggcatcgggggcatggggcctggcctctggccgtgcatcctcactcccacccgcctccagcagccctctgtcggcctcctcgcgacttgactcaccgtcacctggaagcagggcaccagctgctggggtgggacttgggtcttcagatcataaactacgtattccctcttgacactcacaatctcgttcaccacgtgggcctggaactctaactccatcgctgaggggtgggaatgagaactatgaaccaggaaggagagatcccagctgccaagtctgggggtagcagactggagcccaggggtgatggagacttttgatggcttttggcagggacagacttggacacaaaaccgatccatagaagggcttcccaaaccttgttttgcaacatcccaaattgtctccagttgaaggaaggcctttatcagattcatagatgagctttcattgtaaaaataaatgtactttgcaccacttcaagat

SEQ ID NO: 405184 - DNA, 4754 bp, Homo sapiens
cgggggcccggtgggcccgcggaggaaagatactggggagtgggagccgcggggttcagagcgatgattcccccacaggaggcatccgctcgacggcgggagattgaggacaagctgaagcaggaggaggagactctgtccttcatccgagacagcctggagaagagcgaccagctcactaagaacatggtgtctatcttatcatcctttgagagccgccttatgaagctggagaactccatcatccctgtgcacaagcagacggagaatctgcagcggctgcaggagaatgttgagaagacgctgtcctgcctggaccatgtcatcagctactaccatgtggccagtgacactgagaagatcatcagagagggccccacaggtaggctggaagagtacctgggaagcatggccaagattcagaaggcagtggagtatttccaggacaacagcccagacagcccggaactcaacaaagtgaaactgctctttgagcgcgggaaggaggccctggagtccgaatttcgcagcctgatgacgcggcacagtaaggtcgtctcgcccgtgctcatcttggatctgatcagtggtgacgatgatctggaggcccaggaggacgtgaccctggagcacctgcccgagagcgtgctccaggatgtcattcgcatctcccgctggctggtggaatatggccgcaaccaagatttcatgaacgtctactaccagatacgctccagccagctggaccgctccatcaaaggactgaaggagcatttccataagagcagttcttcctctggggttccctactcccctgctatccccaacaagaggaaagacacacctaccaagaagccagtcaagcggccagggacgatccgtaaggctcagaaccttctgaaacagtattcccagcatggtctagatgggaaaaaggggggctctaacctcattcctctggaagggagagatgacatgctggacgtggagaccgatgcctacatccactgcgtcagtgccttcgtcaagctggcgcagagcgagtaccagctgctggccgacatcatccccgagcaccaccagaagaagaccttcgactccctgatacaggatgccctggatgggctgatgcttgaaggggagaacatcgtgtctgctgcccggaaggccattgtgcgacacgacttctccacggtgctcaccgtcttccccatcctgcgacacctcaagcagaccaagcctgagtttgaccaggtgctccagggcacggctgccagcacaaagaacaagctgcctggcctcatcacatccatggagaccatcggtgccaaagcgctggaggacttcgcagacaacatcaagaatgacccggacaaggagtacaacatgccgaaggacggcaccgtacacgagctcaccagcaatgccatcctcttcctgcagcagcttttggacttccaggagacggcaggcgccatgctggcctcccaagagaccagctcttcggccaccagctacagctctgagttcagcaagcggctgctaagcacctatatctgtaaagtgctgggcaacctgcagttgaacttgctgagcaagtccaaggtgtacgaggacccagctctgagcgccatcttcctgcacaacaactacaattacatcctcaagtccctggagaagtctgaactgatccagctggtggcagtgacacagaagactgctgagcgctcctaccgggagcacattgagcagcagatccagacctaccagcgcagctggttaaaggtgactgattacatcgcagagaagaatctacctgtgttccagccgggagtcaagctccgggacaaggagcggcagattatcaaggagcgttttaagggcttcaatgatggcctcgaagaactgtgcaaaatccagaaggcctgggctattccagacacagagcagagggacaggattcgccaggcccagaagaccattgtcaaggagacctacggggcctttctacagaagtttggcagcgtgcccttcaccaagaacccggagaagtacatcaagtacggggtggagcaggtgggcgacatgatcgatcgccttttcgacacctctgcctgagcctgctgctagccctgcctggttccaccagactggcgtgtcattggacagataaaccagtgttagcttgcctctgggctgggtgagcttgaagtcctctgggacagagacctgtctccacgcctccgggagctgtgtccctgagccccctagtcctggctcctgctttttccccacagcccgtgttcccagccgaaccagcactctcccggaagcctggggtccctccacaccttggcttttatgaccctgatggcttctgaaacaggaaaagagagaaggaagacagaggcctgtgcccactgctgctccatgtgtaccaagagcagcagggcagaagggccctccctccagcctaggtcagaggtggggacagagaactcccctacagcccagagatgtggcagggctcagagaagcagccagagctcctggaggaaaggcagtcgggactgaccccctctcttaaaacacattcccgcccgcccacaggcctgaggtctgggacctttccctcccaggagtcccctaggtggctgggggaggcaggctcactggccattttccctagagtccagcacactgcaggaggcgttcggaggaggagttccgccccaccctctacagccttcctcaggcccctgtctctggtccccagcctcagtgcctcttggcccagggccaggcagtcgtggttgcagaaggagcaattaggctgcctgcctgtgggctgggagacagggacaatggggaaaagttaaggagcaaaatgggggttggaagcaaaaaatagggccccacctatttaggacgagattgaagactgacccttgaggcacacttgcactggagatgggtttatttcacgctctgtgcttgtgtgctagcggagggagagctcagggtggcttaatccagaggccctgtcatggcccgcccccagccatgggaaagcaaacttcatcctaaggtgtgcagcccaggccctgcccctttacagtctaggccgcctgccatggggtgcagcctctccaggggctgcgtcagacttgcacgctgcccacatccagattcctgcaaagacgaattgggtgcacagcaccccaaccacatacacgaggaagaagatgcggtcagcagtctcaggccagcttctctgtgacccctttactcctctggagggctctgtggggagagatacagggaaaggagctgttcttcaaggtcccctcaacatgagcggaagagcgaaccccaggggtcatcagcctgtatcgcttcctttcttagattctcagctgatgaaaatttgggtctggcccatttcaggccatcttcagttgaagaaacaccctcttaggctgtgcaaggcatgggttatcaggggattgaggtcacctgggacttcagggaggctcagcttgctccctgccccagacctgtttcttctaagggaggaggacatggtggagaccagggacaggagagccagcagggtggatgcaaggggcctctacccacacctggacctccgtgccctcaccccagccctaggtgtgcacctaggcctcattccttaccccccagcccctgcccaccttcagcaggatgaggccctgggttgccgtgctctcgctgttcccctctcggggctgggctggggccgctcttggccccaaggttgccccgggccagcagcccagccagcagcacagtctctatggtgctgaggaagagcagcagcagcaggatggtgaagtagtaaactgggggaggcagggcacagggagatgctcaggggccagtccctgtgtctctggtgcccagcgagctgagcaccagtgggtgaccggggagaaacagggcagactgggtaagggagcagggcttactgagcagtgggttgcaggaggaggagctgggcagggcctgcaccagggaggagtggaggacgaggtaactcagcagcaatgtcaccttgtagcctatgcgctcaatggcccggaggggcagcaaccccccgcacacgtcagccaacagcagtgcctctgcaggcaccaagagagcgatgatggacttgagcgccgtgttcttcagcctcagctggaaggggaaaagtcagggccttcccggcgggggggaaggaggtgggcatcgggggcatggggcctggcctctggccgtgcatcctcactcccacccgcctccagcagccctctgtcggcctcctcgcgacttgactcaccgtcacctggaagcagggcaccagctgctggggtgggacttgggtcttcagatcataaactacgtattccctcttgacactcacaatctcgttcaccacgtgggcctggaactctaactccatcgctgaggggtgggaatgagaactatgaaccaggaaggagagatcccagctgccaagtctgggggtagcagactggagcccaggggtgatggagacttttgatggcttttggcagggacagacttggacacaaaaccgatccatagaagggcttcccaaaccttgttttgcaacatcccaaattgtctccagttgaaggaaggcctttatcagattcatagatgagctttcattgtaaaaataaatgtactttgcaccacttcaagat

SEQ ID NO: 405185 - DNA, 2188 bp, Homo sapiens
cgggggcccggtgggcccgcggaggaaagatactggggagtgggagccgcggggttcagagcgatgattcccccacaggaggcatccgctcgacggcgggagattgaggacaagctgaagcaggaggaggagactctgtccttcatccgagacagcctggagaagagcgaccagctcactaagaacatggtgtctatcttatcatcctttgagagccgccttatgaagctggagaactccatcatccctgtgcacaagcagacggagaatctgcagcggctgcaggagaatgttgagaagacgctgtcctgcctggaccatgtcatcagctactaccatgtggccagtgacactgagaagatcatcagagagggccccacaggtaggctggaagagtacctgggaagcatggccaagattcagaaggcagtggagtatttccaggacaacagcccagacagcccggaactcaacaaagtgaaactgctctttgagcgcgggaaggaggccctggagtccgaatttcgcagcctgatgacgcggcacagtaaggtcgtctcgcccgtgctcatcttggatctgatcagtggtgacgatgatctggaggcccaggaggacgtgaccctggagcacctgcccgagagcgtgctccaggatgtcattcgcatctcccgctggctggtggaatatggccgcaaccaagatttcatgaacgtctactaccagatacgctccagccagctggaccgctccatcaaaggactgaaggagcatttccataagagcagttcttcctctggggttccctactcccctgctatccccaacaagaggaaagacacacctaccaagaagccagtcaagcggccagggacgatccgtaaggctcagaaccttctgaaacagtattcccagcatggtctagatgggaaaaaggggggctctaacctcattcctctggaagggagagatgacatgctggacgtggagaccgatgcctacatccactgcgtcagtgccttcgtcaagctggcgcagagcgagtaccagctgctggccgacatcatccccgagcaccaccagaagaagaccttcgactccctgatacaggatgccctggatgggctgatgcttgaaggggagaacatcgtgtctgctgcccggaaggccattgtgcgacacgacttctccacggtgctcaccgtcttccccatcctgcgacacctcaagcagaccaagcctgagtttgaccaggtgctccagggcacggctgccagcacaaagaacaagctgcctggcctcatcacatccatggagaccatcggtgccaaagcgctggaggacttcgcagacaacatcaagaatgacccggacaaggagtacaacatgccgaaggacggcaccgtacacgagctcaccagcaatgccatcctcttcctgcagcagcttttggacttccaggagacggcaggcgccatgctggcctcccaagagaccagctcttcggccaccagctacagctctgagttcagcaagcggctgctaagcacctatatctgtaaagtgctgggcaacctgcagttgaacttgctgagcaagtccaaggtgtacgaggacccagctctgagcgccatcttcctgcacaacaactacaattacatcctcaagtccctggagaagtctgaactgatccagctggtggcagtgacacagaagactgctgagcgctcctaccgggagcacattgagcagcagatccagacctaccagcgcagctggttaaaggtgactgattacatcgcagagaagaatctacctgtgttccagccgggagtcaagctccgggacaaggagcggcagattatcaaggagcgttttaagggcttcaatgatggcctcgaagaactgtgcaaaatccagaaggcctgggctattccagacacagagcagagggacaggattcgccaggcccagaagaccattgtcaaggagacctacggggcctttctacagaagtttggcagcgtgcccttcaccaagaacccggagaagtacatcaagtacggggtggagcaggtgggcgacatgatcgatcgccttttcgacacctctgcctgagcctgctgctagccctgcctggttccaccagactggcgtgtcattggacagataaaccagtgttagcttg

SEQ ID NO: 405186 - DNA, 740 bp, Homo sapiens
cgggggcccggtgggcccgcggaggaaagatactggggagtgggagccgcggggttcagagcgatgattcccccacaggaggcatccgctcgacggcgggagattgaggacaagctgaagcaggaggaggagactctgtccttcatccgagacagcctggagaagagcgaccagctcactaagaacatggtgtctatcttatcatcctttgagagccgccttatgaagctggagaactccatcatccctgtgcacaagcagacggagaatctgcagcggctgcaggagaatgttgagaagacgctgtcctgcctggaccatgtcatcagctactaccatgtggccagtgacactgagaagatcatcagagagggccccacaggtaggctggaagagtacctgggaagcatggccaagattcagaaggcagtggagtatttccaggacaacagcccagacagcccggaactcaacaaagtggtaaggggtccgcagaataacgtgagaagcttggggatatcagtctctgccctggtctcatgagggacatggagccagcttgaggatgtatgcagtagaatacacagaaggatatagcacagtacatcctataggcattaggatctctgcttcaagaattgcacattttttattattaaaaattctttattataaaacttgttaatgtattataaaaattaaattataaattacatataaaatataaacttaacatttga

SEQ ID NO: 405187 - DNA, 465 bp, Homo sapiens
  misc_feature (4)..(4): n is a, c, g, or t
  misc_feature (26)..(26): n is a, c, g, or t
  misc_feature (84)..(84): n is a, c, g, or t
  misc_feature (105)..(105): n is a, c, g, or t
aacnagcctatgacccccatgaattnaacgccccaaagcctccgaaaattaaaccccctcacctaaagggaaacaaaaaagctnggagcctccccaccgcggtgncggccgcctcctagaacctaagtggatccccccgggctgccaggaattccggcacgaggttcacccacgtgggcctggaactctaactccatcgctgaggggtgggaatgagaactatgaaccaggaaggagagatcccagctgccaagtctgggggtagcagactggagcccaggggtgatggagacttttgatggcttttggcagggacagacttggacacaaaaccgatccatagaagggcttcccaaaccttgttttgcaacatcccaaattgtctccagttgaaggaaggcctttatcagattcatagatgagctttcattgtaaaaataaatgtactttgcaccacttcaagat

SEQ ID NO: 405188 - DNA, 492 bp, Homo sapiens
agtggggggatagaatatatttgagcctggagtcccctgtattaattttctttttcccaaatactgtgtccttagtccttcttcatcccccatgccccagcctgacctggctcttttctttcccagccccacaggtaggctggaagagtacctgggaagcatggccaagattcagaaggcagtggagtatttccaggacaacagcccagacagcccggaactcaacaaagtggtaaggggtccgcagaataacgtgagaagcttggggatatcagtctctgccctggtctcatgagggacatggagccagcttgaggatgtatgcagtagaatacacagaaggatatagcacagtacatcctataggcattaggatctctgcttcaagaattgcacattttttattattaaaaattctttattataaaacttgttaatgtattataaaaattaaattataaattacatataaaatataaacttaacatttga

SEQ ID NO: 405189 - DNA, 4823 bp, Homo sapiens
cgggggcccggtgggcccgcggaggaaagatactggggagtgggagccgcggggttcagagcgatgattcccccacaggaggcatccgctcgacggcgggagattgaggacaagctgaagcaggaggaggagactctgtccttcatccgagacagcctggagaagagcgaccagctcactaagaacatggtgtctatcttatcatcctttgagagccgccttatgaagctggagaactccatcatccctgtgcacaagcagacggagaatctgcagcggctgcaggagaatgttgagaagacgctgtcctgcctggaccatgtcatcagctactaccatgtggccagtgacactgagaagatcatcagagagggccccacaggtaggctggaagagtacctgggaagcatggccaagattcagaaggcagtggagtatttccaggacaacagcccagacagcccggaactcaacaaagtgaaactgctctttgagcgcgggaaggaggccctggagtccgaatttcgcagcctgatgacgcggcacagtaaggtcgtctcgcccgtgctcatcttggatctgatcagtggtgacgatgatctggaggcccaggaggacgtgaccctggagcacctgcccgagagcgtgctccaggatgtcattcgcatctcccgctggctggtggaatatggccgcaaccaagatttcatgaacgtctactaccagatacgctccagccagctggaccgctccatcaaaggactgaaggagcatttccataagagcagttcttcctctggggttccctactcccctgctatccccaacaagaggaaagacacacctaccaagaagccagtcaagcggccagggacgatccgtaaggctcagaaccttctgaaacagtattcccagcatggtctagatgggaaaaaggggggctctaacctcattcctctggaaggtcacgagcatgatttccgagttaagcacctgtccgaggccttgaacgacaagcacgggccgctggccgggagagatgacatgctggacgtggagaccgatgcctacatccactgcgtcagtgccttcgtcaagctggcgcagagcgagtaccagctgctggccgacatcatccccgagcaccaccagaagaagaccttcgactccctgatacaggatgccctggatgggctgatgcttgaaggggagaacatcgtgtctgctgcccggaaggccattgtgcgacacgacttctccacggtgctcaccgtcttccccatcctgcgacacctcaagcagaccaagcctgagtttgaccaggtgctccagggcacggctgccagcacaaagaacaagctgcctggcctcatcacatccatggagaccatcggtgccaaagcgctggaggacttcgcagacaacatcaagaatgacccggacaaggagtacaacatgccgaaggacggcaccgtacacgagctcaccagcaatgccatcctcttcctgcagcagcttttggacttccaggagacggcaggcgccatgctggcctcccaagagaccagctcttcggccaccagctacagctctgagttcagcaagcggctgctaagcacctatatctgtaaagtgctgggcaacctgcagttgaacttgctgagcaagtccaaggtgtacgaggacccagctctgagcgccatcttcctgcacaacaactacaattacatcctcaagtccctggagaagtctgaactgatccagctggtggcagtgacacagaagactgctgagcgctcctaccgggagcacattgagcagcagatccagacctaccagcgcagctggttaaaggtgactgattacatcgcagagaagaatctacctgtgttccagccgggagtcaagctccgggacaaggagcggcagattatcaaggagcgttttaagggcttcaatgatggcctcgaagaactgtgcaaaatccagaaggcctgggctattccagacacagagcagagggacaggattcgccaggcccagaagaccattgtcaaggagacctacggggcctttctacagaagtttggcagcgtgcccttcaccaagaacccggagaagtacatcaagtacggggtggagcaggtgggcgacatgatcgatcgccttttcgacacctctgcctgagcctgctgctagccctgcctggttccaccagactggcgtgtcattggacagataaaccagtgttagcttgcctctgggctgggtgagcttgaagtcctctgggacagagacctgtctccacgcctccgggagctgtgtccctgagccccctagtcctggctcctgctttttccccacagcccgtgttcccagccgaaccagcactctcccggaagcctggggtccctccacaccttggcttttatgaccctgatggcttctgaaacaggaaaagagagaaggaagacagaggcctgtgcccactgctgctccatgtgtaccaagagcagcagggcagaagggccctccctccagcctaggtcagaggtggggacagagaactcccctacagcccagagatgtggcagggctcagagaagcagccagagctcctggaggaaaggcagtcgggactgaccccctctcttaaaacacattcccgcccgcccacaggcctgaggtctgggacctttccctcccaggagtcccctaggtggctgggggaggcaggctcactggccattttccctagagtccagcacactgcaggaggcgttcggaggaggagttccgccccaccctctacagccttcctcaggcccctgtctctggtccccagcctcagtgcctcttggcccagggccaggcagtcgtggttgcagaaggagcaattaggctgcctgcctgtgggctgggagacagggacaatggggaaaagttaaggagcaaaatgggggttggaagcaaaaaatagggccccacctatttaggacgagattgaagactgacccttgaggcacacttgcactggagatgggtttatttcacgctctgtgcttgtgtgctagcggagggagagctcagggtggcttaatccagaggccctgtcatggcccgcccccagccatgggaaagcaaacttcatcctaaggtgtgcagcccaggccctgcccctttacagtctaggccgcctgccatggggtgcagcctctccaggggctgcgtcagacttgcacgctgcccacatccagattcctgcaaagacgaattgggtgcacagcaccccaaccacatacacgaggaagaagatgcggtcagcagtctcaggccagcttctctgtgacccctttactcctctggagggctctgtggggagagatacagggaaaggagctgttcttcaaggtcccctcaacatgagcggaagagcgaaccccaggggtcatcagcctgtatcgcttcctttcttagattctcagctgatgaaaatttgggtctggcccatttcaggccatcttcagttgaagaaacaccctcttaggctgtgcaaggcatgggttatcaggggattgaggtcacctgggacttcagggaggctcagcttgctccctgccccagacctgtttcttctaagggaggaggacatggtggagaccagggacaggagagccagcagggtggatgcaaggggcctctacccacacctggacctccgtgccctcaccccagccctaggtgtgcacctaggcctcattccttaccccccagcccctgcccaccttcagcaggatgaggccctgggttgccgtgctctcgctgttcccctctcggggctgggctggggccgctcttggccccaaggttgccccgggccagcagcccagccagcagcacagtctctatggtgctgaggaagagcagcagcagcaggatggtgaagtagtaaactgggggaggcagggcacagggagatgctcaggggccagtccctgtgtctctggtgcccagcgagctgagcaccagtgggtgaccggggagaaacagggcagactgggtaagggagcagggcttactgagcagtgggttgcaggaggaggagctgggcagggcctgcaccagggaggagtggaggacgaggtaactcagcagcaatgtcaccttgtagcctatgcgctcaatggcccggaggggcagcaaccccccgcacacgtcagccaacagcagtgcctctgcaggcaccaagagagcgatgatggacttgagcgccgtgttcttcagcctcagctggaaggggaaaagtcagggccttcccggcgggggggaaggaggtgggcatcgggggcatggggcctggcctctggccgtgcatcctcactcccacccgcctccagcagccctctgtcggcctcctcgcgacttgactcaccgtcacctggaagcagggcaccagctgctggggtgggacttgggtcttcagatcataaactacgtattccctcttgacactcacaatctcgttcaccacgtgggcctggaactctaactccatcgctgaggggtgggaatgagaactatgaaccaggaaggagagatcccagctgccaagtctgggggtagcagactggagcccaggggtgatggagacttttgatggcttttggcagggacagacttggacacaaaaccgatccatagaagggcttcccaaaccttgttttgcaacatcccaaattgtctccagttgaaggaaggcctttatcagattcatagatgagctttcattgtaaaaataaatgtactttgcaccacttcaagat

SEQ ID NO: 405190 - DNA, 5133 bp, Homo sapiens
gcccgggctcgcctcacctccccgcctgcttaagccctcccggagcgctcggggttcgacccccgagcacggcgggaggagggcgcccccctgcggcacagccacgtccacgaagcccctcccggggttctagaaagcggaggcctccgaaggaaagaccaagatgcagagagatgtctaaaaggtgccagaaggtgactatccagccctggtatcactgcctggtgatttcgtttctttgatcttcacgaatggcctcactggctgtgatttggacagaaatcagctgccacgtgcaacattctcccatgggaacatgtgtccgcagtacctatctcagagcccaaatccttcctgccccacagccttctcctgggacctgccttgggaggcatccgctcgacggcgggagattgaggacaagctgaagcaggaggaggagactctgtccttcatccgagacagcctggagaagagcgaccagctcactaagaacatggtgtctatcttatcatcctttgagagccgccttatgaagctggagaactccatcatccctgtgcacaagcagacggagaatctgcagcggctgcaggagaatgttgagaagacgctgtcctgcctggaccatgtcatcagctactaccatgtggccagtgacactgagaagatcatcagagagggccccacaggtaggctggaagagtacctgggaagcatggccaagattcagaaggcagtggagtatttccaggacaacagcccagacagcccggaactcaacaaagtgaaactgctctttgagcgcgggaaggaggccctggagtccgaatttcgcagcctgatgacgcggcacagtaaggtcgtctcgcccgtgctcatcttggatctgatcagtggtgacgatgatctggaggcccaggaggacgtgaccctggagcacctgcccgagagcgtgctccaggatgtcattcgcatctcccgctggctggtggaatatggccgcaaccaagatttcatgaacgtctactaccagatacgctccagccagctggaccgctccatcaaaggactgaaggagcatttccataagagcagttcttcctctggggttccctactcccctgctatccccaacaagaggaaagacacacctaccaagaagccagtcaagcggccagggacgatccgtaaggctcagaaccttctgaaacagtattcccagcatggtctagatgggaaaaaggggggctctaacctcattcctctggaaggtcacgagcatgatttccgagttaagcacctgtccgaggccttgaacgacaagcacgggccgctggccgggagagatgacatgctggacgtggagaccgatgcctacatccactgcgtcagtgccttcgtcaagctggcgcagagcgagtaccagctgctggccgacatcatccccgagcaccaccagaagaagaccttcgactccctgatacaggatgccctggatgggctgatgcttgaaggggagaacatcgtgtctgctgcccggaaggccattgtgcgacacgacttctccacggtgctcaccgtcttccccatcctgcgacacctcaagcagaccaagcctgagtttgaccaggtgctccagggcacggctgccagcacaaagaacaagctgcctggcctcatcacatccatggagaccatcggtgccaaagcgctggaggacttcgcagacaacatcaagaatgacccggacaaggagtacaacatgccgaaggacggcaccgtacacgagctcaccagcaatgccatcctcttcctgcagcagcttttggacttccaggagacggcaggcgccatgctggcctcccaagagaccagctcttcggccaccagctacagctctgagttcagcaagcggctgctaagcacctatatctgtaaagtgctgggcaacctgcagttgaacttgctgagcaagtccaaggtgtacgaggacccagctctgagcgccatcttcctgcacaacaactacaattacatcctcaagtccctggagaagtctgaactgatccagctggtggcagtgacacagaagactgctgagcgctcctaccgggagcacattgagcagcagatccagacctaccagcgcagctggttaaaggtgactgattacatcgcagagaagaatctacctgtgttccagccgggagtcaagctccgggacaaggagcggcagattatcaaggagcgttttaagggcttcaatgatggcctcgaagaactgtgcaaaatccagaaggcctgggctattccagacacagagcagagggacaggattcgccaggcccagaagaccattgtcaaggagacctacggggcctttctacagaagtttggcagcgtgcccttcaccaagaacccggagaagtacatcaagtacggggtggagcaggtgggcgacatgatcgatcgccttttcgacacctctgcctgagcctgctgctagccctgcctggttccaccagactggcgtgtcattggacagataaaccagtgttagcttgcctctgggctgggtgagcttgaagtcctctgggacagagacctgtctccacgcctccgggagctgtgtccctgagccccctagtcctggctcctgctttttccccacagcccgtgttcccagccgaaccagcactctcccggaagcctggggtccctccacaccttggcttttatgaccctgatggcttctgaaacaggaaaagagagaaggaagacagaggcctgtgcccactgctgctccatgtgtaccaagagcagcagggcagaagggccctccctccagcctaggtcagaggtggggacagagaactcccctacagcccagagatgtggcagggctcagagaagcagccagagctcctggaggaaaggcagtcgggactgaccccctctcttaaaacacattcccgcccgcccacaggcctgaggtctgggacctttccctcccaggagtcccctaggtggctgggggaggcaggctcactggccattttccctagagtccagcacactgcaggaggcgttcggaggaggagttccgccccaccctctacagccttcctcaggcccctgtctctggtccccagcctcagtgcctcttggcccagggccaggcagtcgtggttgcagaaggagcaattaggctgcctgcctgtgggctgggagacagggacaatggggaaaagttaaggagcaaaatgggggttggaagcaaaaaatagggccccacctatttaggacgagattgaagactgacccttgaggcacacttgcactggagatgggtttatttcacgctctgtgcttgtgtgctagcggagggagagctcagggtggcttaatccagaggccctgtcatggcccgcccccagccatgggaaagcaaacttcatcctaaggtgtgcagcccaggccctgcccctttacagtctaggccgcctgccatggggtgcagcctctccaggggctgcgtcagacttgcacgctgcccacatccagattcctgcaaagacgaattgggtgcacagcaccccaaccacatacacgaggaagaagatgcggtcagcagtctcaggccagcttctctgtgacccctttactcctctggagggctctgtggggagagatacagggaaaggagctgttcttcaaggtcccctcaacatgagcggaagagcgaaccccaggggtcatcagcctgtatcgcttcctttcttagattctcagctgatgaaaatttgggtctggcccatttcaggccatcttcagttgaagaaacaccctcttaggctgtgcaaggcatgggttatcaggggattgaggtcacctgggacttcagggaggctcagcttgctccctgccccagacctgtttcttctaagggaggaggacatggtggagaccagggacaggagagccagcagggtggatgcaaggggcctctacccacacctggacctccgtgccctcaccccagccctaggtgtgcacctaggcctcattccttaccccccagcccctgcccaccttcagcaggatgaggccctgggttgccgtgctctcgctgttcccctctcggggctgggctggggccgctcttggccccaaggttgccccgggccagcagcccagccagcagcacagtctctatggtgctgaggaagagcagcagcagcaggatggtgaagtagtaaactgggggaggcagggcacagggagatgctcaggggccagtccctgtgtctctggtgcccagcgagctgagcaccagtgggtgaccggggagaaacagggcagactgggtaagggagcagggcttactgagcagtgggttgcaggaggaggagctgggcagggcctgcaccagggaggagtggaggacgaggtaactcagcagcaatgtcaccttgtagcctatgcgctcaatggcccggaggggcagcaaccccccgcacacgtcagccaacagcagtgcctctgcaggcaccaagagagcgatgatggacttgagcgccgtgttcttcagcctcagctggaaggggaaaagtcagggccttcccggcgggggggaaggaggtgggcatcgggggcatggggcctggcctctggccgtgcatcctcactcccacccgcctccagcagccctctgtcggcctcctcgcgacttgactcaccgtcacctggaagcagggcaccagctgctggggtgggacttgggtcttcagatcataaactacgtattccctcttgacactcacaatctcgttcaccacgtgggcctggaactctaactccatcgctgaggggtgggaatgagaactatgaaccaggaaggagagatcccagctgccaagtctgggggtagcagactggagcccaggggtgatggagacttttgatggcttttggcagggacagacttggacacaaaaccgatccatagaagggcttcccaaaccttgttttgcaacatcccaaattgtctccagttgaaggaaggcctttatcagattcatagatgagctttcattgtaaaaataaatgtactttgcaccacttcaagat

SEQ ID NO: 405191 - DNA, 4957 bp, Homo sapiens
cttcagagagaacagaagttgagatttggcttcaaagggtggaagggaagccatcttgggctgattattttaagaagaattaatttgatgcttggtttgccttcaaataaaatttcaaccaatttgtcttagaccacctactatatgccaggcacatgataggtgctgaagatacagtggggaacaggtacaccctgttccttcgcttgtggagtttattgtctagaaaaccagagaaaaggcaggaaatgccgaaggtgggtgtgtagaagcagtgctgggaccactgtgagtcccaagatcaagaggcttccctcccgcaggtgtctatcttatcatcctttgagagccgccttatgaagctggagaactccatcatccctgtgcacaagcagacggagaatctgcagcggctgcaggagaatgttgagaagacgctgtcctgcctggaccatgtcatcagctactaccatgtggccagtgacactgagaagatcatcagagagggccccacaggtaggctggaagagtacctgggaagcatggccaagattcagaaggcagtggagtatttccaggacaacagcccagacagcccggaactcaacaaagtgaaactgctctttgagcgcgggaaggaggccctggagtccgaatttcgcagcctgatgacgcggcacagtaaggtcgtctcgcccgtgctcatcttggatctgatcagtggtgacgatgatctggaggcccaggaggacgtgaccctggagcacctgcccgagagcgtgctccaggatgtcattcgcatctcccgctggctggtggaatatggccgcaaccaagatttcatgaacgtctactaccagatacgctccagccagctggaccgctccatcaaaggactgaaggagcatttccataagagcagttcttcctctggggttccctactcccctgctatccccaacaagaggaaagacacacctaccaagaagccagtcaagcggccagggacgatccgtaaggctcagaaccttctgaaacagtattcccagcatggtctagatgggaaaaaggggggctctaacctcattcctctggaaggtcacgagcatgatttccgagttaagcacctgtccgaggccttgaacgacaagcacgggccgctggccgggagagatgacatgctggacgtggagaccgatgcctacatccactgcgtcagtgccttcgtcaagctggcgcagagcgagtaccagctgctggccgacatcatccccgagcaccaccagaagaagaccttcgactccctgatacaggatgccctggatgggctgatgcttgaaggggagaacatcgtgtctgctgcccggaaggccattgtgcgacacgacttctccacggtgctcaccgtcttccccatcctgcgacacctcaagcagaccaagcctgagtttgaccaggtgctccagggcacggctgccagcacaaagaacaagctgcctggcctcatcacatccatggagaccatcggtgccaaagcgctggaggacttcgcagacaacatcaagaatgacccggacaaggagtacaacatgccgaaggacggcaccgtacacgagctcaccagcaatgccatcctcttcctgcagcagcttttggacttccaggagacggcaggcgccatgctggcctcccaagagaccagctcttcggccaccagctacagctctgagttcagcaagcggctgctaagcacctatatctgtaaagtgctgggcaacctgcagttgaacttgctgagcaagtccaaggtgtacgaggacccagctctgagcgccatcttcctgcacaacaactacaattacatcctcaagtccctggagaagtctgaactgatccagctggtggcagtgacacagaagactgctgagcgctcctaccgggagcacattgagcagcagatccagacctaccagcgcagctggttaaaggtgactgattacatcgcagagaagaatctacctgtgttccagccgggagtcaagctccgggacaaggagcggcagattatcaaggagcgttttaagggcttcaatgatggcctcgaagaactgtgcaaaatccagaaggcctgggctattccagacacagagcagagggacaggattcgccaggcccagaagaccattgtcaaggagacctacggggcctttctacagaagtttggcagcgtgcccttcaccaagaacccggagaagtacatcaagtacggggtggagcaggtgggcgacatgatcgatcgccttttcgacacctctgcctgagcctgctgctagccctgcctggttccaccagactggcgtgtcattggacagataaaccagtgttagcttgcctctgggctgggtgagcttgaagtcctctgggacagagacctgtctccacgcctccgggagctgtgtccctgagccccctagtcctggctcctgctttttccccacagcccgtgttcccagccgaaccagcactctcccggaagcctggggtccctccacaccttggcttttatgaccctgatggcttctgaaacaggaaaagagagaaggaagacagaggcctgtgcccactgctgctccatgtgtaccaagagcagcagggcagaagggccctccctccagcctaggtcagaggtggggacagagaactcccctacagcccagagatgtggcagggctcagagaagcagccagagctcctggaggaaaggcagtcgggactgaccccctctcttaaaacacattcccgcccgcccacaggcctgaggtctgggacctttccctcccaggagtcccctaggtggctgggggaggcaggctcactggccattttccctagagtccagcacactgcaggaggcgttcggaggaggagttccgccccaccctctacagccttcctcaggcccctgtctctggtccccagcctcagtgcctcttggcccagggccaggcagtcgtggttgcagaaggagcaattaggctgcctgcctgtgggctgggagacagggacaatggggaaaagttaaggagcaaaatgggggttggaagcaaaaaatagggccccacctatttaggacgagattgaagactgacccttgaggcacacttgcactggagatgggtttatttcacgctctgtgcttgtgtgctagcggagggagagctcagggtggcttaatccagaggccctgtcatggcccgcccccagccatgggaaagcaaacttcatcctaaggtgtgcagcccaggccctgcccctttacagtctaggccgcctgccatggggtgcagcctctccaggggctgcgtcagacttgcacgctgcccacatccagattcctgcaaagacgaattgggtgcacagcaccccaaccacatacacgaggaagaagatgcggtcagcagtctcaggccagcttctctgtgacccctttactcctctggagggctctgtggggagagatacagggaaaggagctgttcttcaaggtcccctcaacatgagcggaagagcgaaccccaggggtcatcagcctgtatcgcttcctttcttagattctcagctgatgaaaatttgggtctggcccatttcaggccatcttcagttgaagaaacaccctcttaggctgtgcaaggcatgggttatcaggggattgaggtcacctgggacttcagggaggctcagcttgctccctgccccagacctgtttcttctaagggaggaggacatggtggagaccagggacaggagagccagcagggtggatgcaaggggcctctacccacacctggacctccgtgccctcaccccagccctaggtgtgcacctaggcctcattccttaccccccagcccctgcccaccttcagcaggatgaggccctgggttgccgtgctctcgctgttcccctctcggggctgggctggggccgctcttggccccaaggttgccccgggccagcagcccagccagcagcacagtctctatggtgctgaggaagagcagcagcagcaggatggtgaagtagtaaactgggggaggcagggcacagggagatgctcaggggccagtccctgtgtctctggtgcccagcgagctgagcaccagtgggtgaccggggagaaacagggcagactgggtaagggagcagggcttactgagcagtgggttgcaggaggaggagctgggcagggcctgcaccagggaggagtggaggacgaggtaactcagcagcaatgtcaccttgtagcctatgcgctcaatggcccggaggggcagcaaccccccgcacacgtcagccaacagcagtgcctctgcaggcaccaagagagcgatgatggacttgagcgccgtgttcttcagcctcagctggaaggggaaaagtcagggccttcccggcgggggggaaggaggtgggcatcgggggcatggggcctggcctctggccgtgcatcctcactcccacccgcctccagcagccctctgtcggcctcctcgcgacttgactcaccgtcacctggaagcagggcaccagctgctggggtgggacttgggtcttcagatcataaactacgtattccctcttgacactcacaatctcgttcaccacgtgggcctggaactctaactccatcgctgaggggtgggaatgagaactatgaaccaggaaggagagatcccagctgccaagtctgggggtagcagactggagcccaggggtgatggagacttttgatggcttttggcagggacagacttggacacaaaaccgatccatagaagggcttcccaaaccttgttttgcaacatcccaaattgtctccagttgaaggaaggcctttatcagattcatagatgagctttcattgtaaaaataaatgtactttgcaccacttcaagat

SEQ ID NO: 405192 - DNA, 3831 bp, Homo sapiens
tctagaggatccctgatgagaagagttgtgccatcccccagggagagatgacatgctggacgtggagaccgatgcctacatccactgcgtcagtgccttcgtcaagctggcgcagagcgagtaccagctgctggccgacatcatccccgagcaccaccagaagaagaccttcgactccctgatacaggatgccctggatgggctgatgcttgaaggggagaacatcgtgtctgctgcccggaaggccattgtgcgacacgacttctccacggtgctcaccgtcttccccatcctgcgacacctcaagcagaccaagcctgagtttgaccaggtgctccagggcacggctgccagcacaaagaacaagctgcctggcctcatcacatccatggagaccatcggtgccaaagcgctggaggacttcgcagacaacatcaagaatgacccggacaaggagtacaacatgccgaaggacggcaccgtacacgagctcaccagcaatgccatcctcttcctgcagcagcttttggacttccaggagacggcaggcgccatgctggcctcccaagagaccagctcttcggccaccagctacagctctgagttcagcaagcggctgctaagcacctatatctgtaaagtgctgggcaacctgcagttgaacttgctgagcaagtccaaggtgtacgaggacccagctctgagcgccatcttcctgcacaacaactacaattacatcctcaagtccctggagaagtctgaactgatccagctggtggcagtgacacagaagactgctgagcgctcctaccgggagcacattgagcagcagatccagacctaccagcgcagctggttaaaggtgactgattacatcgcagagaagaatctacctgtgttccagccgggagtcaagctccgggacaaggagcggcagattatcaaggagcgttttaagggcttcaatgatggcctcgaagaactgtgcaaaatccagaaggcctgggctattccagacacagagcagagggacaggattcgccaggcccagaagaccattgtcaaggagacctacggggcctttctacagaagtttggcagcgtgcccttcaccaagaacccggagaagtacatcaagtacggggtggagcaggtgggcgacatgatcgatcgccttttcgacacctctgcctgagcctgctgctagccctgcctggttccaccagactggcgtgtcattggacagataaaccagtgttagcttgcctctgggctgggtgagcttgaagtcctctgggacagagacctgtctccacgcctccgggagctgtgtccctgagccccctagtcctggctcctgctttttccccacagcccgtgttcccagccgaaccagcactctcccggaagcctggggtccctccacaccttggcttttatgaccctgatggcttctgaaacaggaaaagagagaaggaagacagaggcctgtgcccactgctgctccatgtgtaccaagagcagcagggcagaagggccctccctccagcctaggtcagaggtggggacagagaactcccctacagcccagagatgtggcagggctcagagaagcagccagagctcctggaggaaaggcagtcgggactgaccccctctcttaaaacacattcccgcccgcccacaggcctgaggtctgggacctttccctcccaggagtcccctaggtggctgggggaggcaggctcactggccattttccctagagtccagcacactgcaggaggcgttcggaggaggagttccgccccaccctctacagccttcctcaggcccctgtctctggtccccagcctcagtgcctcttggcccagggccaggcagtcgtggttgcagaaggagcaattaggctgcctgcctgtgggctgggagacagggacaatggggaaaagttaaggagcaaaatgggggttggaagcaaaaaatagggccccacctatttaggacgagattgaagactgacccttgaggcacacttgcactggagatgggtttatttcacgctctgtgcttgtgtgctagcggagggagagctcagggtggcttaatccagaggccctgtcatggcccgcccccagccatgggaaagcaaacttcatcctaaggtgtgcagcccaggccctgcccctttacagtctaggccgcctgccatggggtgcagcctctccaggggctgcgtcagacttgcacgctgcccacatccagattcctgcaaagacgaattgggtgcacagcaccccaaccacatacacgaggaagaagatgcggtcagcagtctcaggccagcttctctgtgacccctttactcctctggagggctctgtggggagagatacagggaaaggagctgttcttcaaggtcccctcaacatgagcggaagagcgaaccccaggggtcatcagcctgtatcgcttcctttcttagattctcagctgatgaaaatttgggtctggcccatttcaggccatcttcagttgaagaaacaccctcttaggctgtgcaaggcatgggttatcaggggattgaggtcacctgggacttcagggaggctcagcttgctccctgccccagacctgtttcttctaagggaggaggacatggtggagaccagggacaggagagccagcagggtggatgcaaggggcctctacccacacctggacctccgtgccctcaccccagccctaggtgtgcacctaggcctcattccttaccccccagcccctgcccaccttcagcaggatgaggccctgggttgccgtgctctcgctgttcccctctcggggctgggctggggccgctcttggccccaaggttgccccgggccagcagcccagccagcagcacagtctctatggtgctgaggaagagcagcagcagcaggatggtgaagtagtaaactgggggaggcagggcacagggagatgctcaggggccagtccctgtgtctctggtgcccagcgagctgagcaccagtgggtgaccggggagaaacagggcagactgggtaagggagcagggcttactgagcagtgggttgcaggaggaggagctgggcagggcctgcaccagggaggagtggaggacgaggtaactcagcagcaatgtcaccttgtagcctatgcgctcaatggcccggaggggcagcaaccccccgcacacgtcagccaacagcagtgcctctgcaggcaccaagagagcgatgatggacttgagcgccgtgttcttcagcctcagctggaaggggaaaagtcagggccttcccggcgggggggaaggaggtgggcatcgggggcatggggcctggcctctggccgtgcatcctcactcccacccgcctccagcagccctctgtcggcctcctcgcgacttgactcaccgtcacctggaagcagggcaccagctgctggggtgggacttgggtcttcagatcataaactacgtattccctcttgacactcacaatctcgttcaccacgtgggcctggaactctaactccatcgctgaggggtgggaatgagaactatgaaccaggaaggagagatcccagctgccaagtctgggggtagcagactggagcccaggggtgatggagacttttgatggcttttggcagggacagacttggacacaaaaccgatccatagaagggcttcccaaaccttgttttgcaacatcccaaattgtctccagttgaaggaaggcctttatcagattcatagatgagctttcattgtaaaaataaatgtactttgcaccacttcaagat

SEQ ID NO: 405193 - DNA, 4607 bp, Homo sapiens
cgggggcccggtgggcccgcggaggaaagatactggggagtgggagccgcggggttcagagcgatgattcccccacaggaggcatccgctcgacggcgggagattgaggacaagctgaagcaggaggaggagactctgtccttcatccgagacagcctggagaagagcgaccagctcactaagaacatggtgtctatcttatcatcctttgagagccgccttatgaagctggagaactccatcatccctgtgcacaagcagacggagaatctgcagcggctgcaggagaatgttgagaagacgctgtcctgcctggaccatgtcatcagctactaccatgtggccagtgacactgagaagatcatcagagagggccccacaggtaggctggaagagtacctgggaagcatggccaagattcagaaggcagtggagtatttccaggacaacagcccagacagcccggaactcaacaaagtgaaactgctctttgagcgcgggaaggaggccctggagtccgaatttcgcagcctgatgacgcggcacagtaaggtcgtctcgcccgtgctcatcttggatctgatcagtggtgacgatgatctggaggcccaggaggacgtgaccctggagcacctgcccgagagcgtgctccaggatgtcattcgcatctcccgctggctggtggaatatggccgcaaccaagatttcatgaacgtctactaccagatacgctccagccagctggaccgctccatcaaaggactgaaggagcatttccataagagcagttcttcctctggggttccctactcccctgctatccccaacaagaggaaagacacacctaccaagaagccagtcaagcggccagggagagatgacatgctggacgtggagaccgatgcctacatccactgcgtcagtgccttcgtcaagctggcgcagagcgagtaccagctgctggccgacatcatccccgagcaccaccagaagaagaccttcgactccctgatacaggatgccctggatgggctgatgcttgaaggggagaacatcgtgtctgctgcccggaaggccattgtgcgacacgacttctccacggtgctcaccgtcttccccatcctgcgacacctcaagcagaccaagcctgagtttgaccaggtgctccagggcacggctgccagcacaaagaacaagctgcctggcctcatcacatccatggagaccatcggtgccaaagcgctggaggacttcgcagacaacatcaagaatgacccggacaaggagtacaacatgccgaaggacggcaccgtacacgagctcaccagcaatgccatcctcttcctgcagcagcttttggacttccaggagacggcaggcgccatgctggcctcccaagagaccagctcttcggccaccagctacagctctgagttcagcaagcggctgctaagcacctatatctgtaaagtgctgggcaacctgcagttgaacttgctgagcaagtccaaggtgtacgaggacccagctctgagcgccatcttcctgcacaacaactacaattacatcctcaagtccctggagaagtctgaactgatccagctggtggcagtgacacagaagactgctgagcgctcctaccgggagcacattgagcagcagatccagacctaccagcgcagctggttaaaggtgactgattacatcgcagagaagaatctacctgtgttccagccgggagtcaagctccgggacaaggagcggcagattatcaaggagcgttttaagggcttcaatgatggcctcgaagaactgtgcaaaatccagaaggcctgggctattccagacacagagcagagggacaggattcgccaggcccagaagaccattgtcaaggagacctacggggcctttctacagaagtttggcagcgtgcccttcaccaagaacccggagaagtacatcaagtacggggtggagcaggtgggcgacatgatcgatcgccttttcgacacctctgcctgagcctgctgctagccctgcctggttccaccagactggcgtgtcattggacagataaaccagtgttagcttgcctctgggctgggtgagcttgaagtcctctgggacagagacctgtctccacgcctccgggagctgtgtccctgagccccctagtcctggctcctgctttttccccacagcccgtgttcccagccgaaccagcactctcccggaagcctggggtccctccacaccttggcttttatgaccctgatggcttctgaaacaggaaaagagagaaggaagacagaggcctgtgcccactgctgctccatgtgtaccaagagcagcagggcagaagggccctccctccagcctaggtcagaggtggggacagagaactcccctacagcccagagatgtggcagggctcagagaagcagccagagctcctggaggaaaggcagtcgggactgaccccctctcttaaaacacattcccgcccgcccacaggcctgaggtctgggacctttccctcccaggagtcccctaggtggctgggggaggcaggctcactggccattttccctagagtccagcacactgcaggaggcgttcggaggaggagttccgccccaccctctacagccttcctcaggcccctgtctctggtccccagcctcagtgcctcttggcccagggccaggcagtcgtggttgcagaaggagcaattaggctgcctgcctgtgggctgggagacagggacaatggggaaaagttaaggagcaaaatgggggttggaagcaaaaaatagggccccacctatttaggacgagattgaagactgacccttgaggcacacttgcactggagatgggtttatttcacgctctgtgcttgtgtgctagcggagggagagctcagggtggcttaatccagaggccctgtcatggcccgcccccagccatgggaaagcaaacttcatcctaaggtgtgcagcccaggccctgcccctttacagtctaggccgcctgccatggggtgcagcctctccaggggctgcgtcagacttgcacgctgcccacatccagattcctgcaaagacgaattgggtgcacagcaccccaaccacatacacgaggaagaagatgcggtcagcagtctcaggccagcttctctgtgacccctttactcctctggagggctctgtggggagagatacagggaaaggagctgttcttcaaggtcccctcaacatgagcggaagagcgaaccccaggggtcatcagcctgtatcgcttcctttcttagattctcagctgatgaaaatttgggtctggcccatttcaggccatcttcagttgaagaaacaccctcttaggctgtgcaaggcatgggttatcaggggattgaggtcacctgggacttcagggaggctcagcttgctccctgccccagacctgtttcttctaagggaggaggacatggtggagaccagggacaggagagccagcagggtggatgcaaggggcctctacccacacctggacctccgtgccctcaccccagccctaggtgtgcacctaggcctcattccttaccccccagcccctgcccaccttcagcaggatgaggccctgggttgccgtgctctcgctgttcccctctcggggctgggctggggccgctcttggccccaaggttgccccgggccagcagcccagccagcagcacagtctctatggtgctgaggaagagcagcagcagcaggatggtgaagtagtaaactgggggaggcagggcacagggagatgctcaggggccagtccctgtgtctctggtgcccagcgagctgagcaccagtgggtgaccggggagaaacagggcagactgggtaagggagcagggcttactgagcagtgggttgcaggaggaggagctgggcagggcctgcaccagggaggagtggaggacgaggtaactcagcagcaatgtcaccttgtagcctatgcgctcaatggcccggaggggcagcaaccccccgcacacgtcagccaacagcagtgcctctgcaggcaccaagagagcgatgatggacttgagcgccgtgttcttcagcctcagctggaagggggcctggcctctggccgtgcatcctcactcccacccgcctccagcagccctctgtcggcctcctcgcgacttgactcaccgtcacctggaagcagggcaccagctgctggggtgggacttgggtcttcagatcataaactacgtattccctcttgacactcacaatctcgttcaccacgtgggcctggaactctaactccatcgctgaggggtgggaatgagaactatgaaccaggaaggagagatcccagctgccaagtctgggggtagcagactggagcccaggggtgatggagacttttgatggcttttggcagggacagacttggacacaaaaccgatccatagaagggcttcccaaaccttgttttgcaacatcccaaattgtctccagttgaaggaaggcctttatcagattcatagatgagctttcattgtaaaaataaatgtactttgcaccacttcaagat

SEQ ID NO: 405194 - DNA, 3496 bp, Homo sapiens
  misc_feature (3489)..(3489): n is a, c, g, or t
cgggggcccggtgggcccgcggaggaaagatactggggagtgggagccgcggggttcagagcgatgattcccccacaggaggcatccgctcgacggcgggagattgaggacaagctgaagcaggaggaggagactctgtccttcatccgagacagcctggagaagagcgaccagctcactaagaacatggtgtctatcttatcatcctttgagagccgccttatgaagctggagaactccatcatccctgtgcacaagcagacggagaatctgcagcggctgcaggagaatgttgagaagacgctgtcctgcctggaccatgtcatcagctactaccatgtggccagtgacactgagaagatcatcagagagggccccacaggtaggctggaagagtacctgggaagcatggccaagattcagaaggcagtggagtatttccaggacaacagcccagacagcccggaactcaacaaagtgaaactgctctttgagcgcgggaaggaggccctggagtccgaatttcgcagcctgatgacgcggcacagtaaggtcgtctcgcccgtgctcatcttggatctgatcagtggtgacgatgatctggaggcccaggaggacgtgaccctggagcacctgcccgagagcgtgctccaggatgtcattcgcatctcccgctggctggtggaatatggccgcaaccaagatttcatgaacgtctactaccagatacgctccagccagctggaccgctccatcaaaggactgaaggagcatttccataagagcagttcttcctctggggttccctactcccctgctatccccaacaagaggaaagacacacctaccaagaagccagtcaagcggccagggagagatgacatgctggacgtggagaccgatgcctacatccactgcgtcagtgccttcgtcaagctggcgcagagcgagtaccagctgctggccgacatcatccccgagcaccaccagaagaagaccttcgactccctgatacaggatgccctggatgggctgatgcttgaaggggagaacatcgtgtctgctgcccggaaggccattgtgcgacacgacttctccacggtgctcaccgtcttccccatcctgcgacacctcaagcagaccaagcctgagtttgaccaggtgctccagggcacggctgccagcacaaagaacaagctgcctggcctcatcacatccatggagaccatcggtgccaaagcgctggaggacttcgcagacaacatcaagaatgacccggacaaggagtacaacatgccgaaggacggcaccgtacacgagctcaccagcaatgccatcctcttcctgcagcagcttttggacttccaggagacggcaggcgccatgctggcctcccaagagaccagctcttcggccaccagctacagctctgagttcagcaagcggctgctaagcacctatatctgtaaagtgctgggcaacctgcagttgaacttgctgagcaagtccaaggtgtacgaggacccagctctgagcgccatcttcctgcacaacaactacaattacatcctcaagtccctggagaagtctgaactgatccagctggtggcagtgacacagaagactgctgagcgctcctaccgggagcacattgagcagcagatccagacctaccagcgcagctggttaaaggtgactgattacatcgcagagaagaatctacctgtgttccagccgggagtcaagctccgggacaaggagcggcagattatcaaggagcgttttaagggcttcaatgatggcctcgaagaactgtgcaaaatccagaaggcctgggctattccagacacagagcagagggacaggattcgccaggcccagaagaccattgtcaaggagacctacggggcctttctacagaagtttggcagcgtgcccttcaccaagaacccggagaagtacatcaagtacggggtggagcaggtgggcgacatgatcgatcgccttttcgacacctctgcctgagcctgctgctagccctgcctggttccaccagactggcgtgtcattggacagataaaccagtgttagcttgcctctgggctgggtgagcttgaagtcctctgggacagagacctgtctccacgcctccgggagctgtgtccctgagccccctagtcctggctcctgctttttccccacagcccgtgttcccagccgaaccagcactctcccggaagcctggggtccctccacaccttggcttttatgaccctgatggcttctgaaacaggaaaagagagaaggaagacagaggcctgtgcccactgctgctccatgtgtaccaagagcagcagggcagaagggccctccctccagcctaggtcagaggtggggacagagaactcccctacagcccagagatgtggcagggctcagagaagcagccagagctcctggaggaaaggcagtcgggactgaccccctctcttaaaacacattcccgcccgcccacaggcctgaggtctgggacctttccctcccaggagtcccctaggtggctgggggaggcaggctcactggccattttccctagagtccagcacactgcaggaggcgttcggaggaggagttccgccccaccctctacagccttcctcaggcccctgtctctggtccccagcctcagtgcctcttggcccagggccaggcagtcgtggttgcagaaggagcaattaggctgcctgcctgtgggctgggagacagggacaatggggaaaagttaaggagcaaaatgggggttggaagcaaaaaatagggccccacctatttaggacgagattgaagactgacccttgaggcacacttgcactggagatgggtttatttcacgctctgtgcttgtgtgctagcggagggagagctcagggtggcttaatccagaggccctgtcatggcccgcccccagccatgggaaagcaaacttcatcctaaggtgtgcagcccaggccctgcccctttacagtctaggccgcctgccatggggtgcagcctctccaggggctgcgtcagacttgcacgctgcccacatccagattcctgcaaagacgaattgggtgcacagcaccccaaccacatacacgaggaagaagatgcggtcagcagtctcaggccagcttctctgtgacccctttactcctctggagggctctgtggggagagatacagggaaaggagctgttcttcaaggtcccctcaacatgagcggaagagcgaaccccaggggtcatcagcctgtatcgcttcctttcttagattctcagctgatgaaaatttgggtctggcccatttcaggccatcttcagttgaagaaacaccctcttaggctgtgcaaggcatgggttatcaggggattgaggtcacctgggacttcagggaggctcagcttgctcccgtcgacgcggccgcgaatttagtagtagtagtagncggccgc

SEQ ID NO: 405195 - DNA, 3017 bp, Homo sapiens
cgggggcccggtgggcccgcggaggaaagatactggggagtgggagccgcggggttcagagcgatgattcccccacaggaggcatccgctcgacggcgggagattgaggacaagctgaagcaggaggaggagactctgtccttcatccgagacagcctggagaagagcgaccagctcactaagaacatggtgtctatcttatcatcctttgagagccgccttatgaagctggagaactccatcatccctgtgcacaagcagacggagaatctgcagcggctgcaggagaatgttgagaagacgctgtcctgcctggaccatgtcatcagctactaccatgtggccagtgacactgagaagatcatcagagagggccccacaggtaggctggaagagtacctgggaagcatggccaagattcagaaggcagtggagtatttccaggacaacagcccagacagcccggaactcaacaaagtgaaactgctctttgagcgcgggaaggaggccctggagtccgaatttcgcagcctgatgacgcggcacagtaaggtcgtctcgcccgtgctcatcttggatctgatcagtggtgacgatgatctggaggcccaggaggacgtgaccctggagcacctgcccgagagcgtgctccaggatgtcattcgcatctcccgctggctggtggaatatggccgcaaccaagatttcatgaacgtctactaccagatacgctccagccagctggaccgctccatcaaaggactgaaggagcatttccataagagcagttcttcctctggggttccctactcccctgctatccccaacaagaggaaagacacacctaccaagaagccagtcaagcggccagggagagatgacatgctggacgtggagaccgatgcctacatccactgcgtcagtgccttcgtcaagctggcgcagagcgagtaccagctgctggccgacatcatccccgagcaccaccagaagaagaccttcgactccctgatacaggatgccctggatgggctgatgcttgaaggggagaacatcgtgtctgctgcccggaaggccattgtgcgacacgacttctccacggtgctcaccgtcttccccatcctgcgacacctcaagcagaccaagcctgagtttgaccaggtgctccagggcacggctgccagcacaaagaacaagctgcctggcctcatcacatccatggagaccatcggtgccaaagcgctggaggacttcgcagacaacatcaagaatgacccggacaaggagtacaacatgccgaaggacggcaccgtacacgagctcaccagcaatgccatcctcttcctgcagcagcttttggacttccaggagacggcaggcgccatgctggcctcccaagagaccagctcttcggccaccagctacagctctgagttcagcaagcggctgctaagcacctatatctgtaaagtgctgggcaacctgcagttgaacttgctgagcaagtccaaggtgtacgaggacccagctctgagcgccatcttcctgcacaacaactacaattacatcctcaagtccctggagaagtctgaactgatccagctggtggcagtgacacagaagactgctgagcgctcctaccgggagcacattgagcagcagatccagacctaccagcgcagctggttaaaggtgactgattacatcgcagagaagaatctacctgtgttccagccgggagtcaagctccgggacaaggagcggcagattatcaaggagcgttttaagggcttcaatgatggcctcgaagaactgtgcaaaatccagaaggcctgggctattccagacacagagcagagggacaggattcgccaggcccagaagaccattgtcaaggagacctacggggcctttctacagaagtttggcagcgtgcccttcaccaagaacccggagaagtacatcaagtacggggtggagcaggtgggcgacatgatcgatcgccttttcgacacctctgcctgagcctgctgctagccctgcctggttccaccagactggcgtgtcattggacagataaaccagtgttagcttgcctctgggctgggtgagcttgaagtcctctgggacagagacctgtctccacgcctccgggagctgtgtccctgagccccctagtcctggctcctgctttttccccacagcccgtgttcccagccgaaccagcactctcccggaagcctggggtccctccacaccttggcttttatgaccctgatggcttctgaaacaggaaaagagagaaggaagacagaggcctgtgcccactgctgctccatgtgtaccaagagcagcagggcagaagggccctccctccagcctaggtcagaggtggggacagagaactcccctacagcccagagatgtggcagggctcagagaagcagccagagctcctggaggaaaggcagtcgggactgaccccctctcttaaaacacattcccgcccgcccacaggcctgaggtctgggacctttccctcccaggagtcccctaggtggctgggggaggcaggctcactggccattttccctagagtccagcacactgcaggaggcgttcggaggaggagttccgccccaccctctacagccttcctcaggcccctgtctctggtccccagcctcagtgcctcttggcccagggccaggcagtcgtggttgcagaaggagcaattaggctgcctgcctgtgggctgggagacagggacaatggggaaaagttaaggaagatcccagctgccaagtctgggggtagcagactggagcccaggggtgatggagacttttgatggcttttggcagggacagacttggacacaaaaccgatccatagaagggcttcccaaaccttgttttgcaacatcccaaattgtctccagttgaaggaaggcctttatcagattcatagatgagctttcattgtaaaaataaatgtactttgcaccacttcaagat

SEQ ID NO: 405196 - DNA, 1628 bp, Homo sapiens
cgggggcccggtgggcccgcggaggaaagatactggggagtgggagccgcggggttcagagcgatgattcccccacaggaggcatccgctcgacggcgggagattgaggacaagctgaagcaggaggaggagactctgtccttcatccgagacagcctggagaagagcgaccagctcactaagaacatggtgtctatcttatcatcctttgagagccgccttatgaagctggagaactccatcatccctgtgcacaagcagacggagaatctgcagcggctgcaggagaatgttgagaagacgctgtcctgcctggaccatgtcatcagctactaccatgtggccagtgacactgagaagatcatcagagagggccccacaggtaggctggaagagtacctgggaagcatggccaagattcagaaggcagtggagtatttccaggacaacagcccagacagcccggaactcaacaaagtgaaactgctctttgagcgcgggaaggaggccctggagtccgaatttcgcagcctgatgacgcggcacagtaaggtcgtctcgcccgtgctcatcttggatctgatcagtggtgacgatgatctggaggcccaggaggacgtgaccctggagcacctgcccgagagcgtgctccaggatgtcattcgcatctcccgctggctggtggaatatggccgcaaccaagatttcatgaacgtctactaccagatacgctccagccagctggaccgctccatcaaaggactgaaggagcatttccataagagcagttcttcctctggggttccctactcccctgctatccccaacaagaggaaagacacacctaccaagaagccagtcaagcggccagggagagatgacatgctggacgtggagaccgatgcctacatccactgcgtcagtgccttcgtcaagctggcgcagagcgagtaccagctgctggccgacatcatccccgagcaccaccagaagaagaccttcgactccctgatacaggatgccctggatgggctgatgcttgaaggggagaacatcgtgtctgctgcccggaaggccattgtgcgacacgacttctccacggtgctcaccgtcttccccatcctgcgacacctcaagcagaccaagcctgagtttgaccaggtgctccagggcacggctgccagcacaaagaacaagctgcctggcctcatcacatccatggagaccatcggtgccaaagcgctggaggacttcgcagacaacatcaagaatgacccggacaaggagtacaacatgccgaaggacggcaccgtacacgagctcaccagcaatgccatcctcttcctgcagcagcttttggacttccaggagacggcaggcgccatgctggcctcccaagagaccagctcttcggccaccagctacagctctgagttcagcaagcggctgctaagcacctatatctgtaaagtgctgggcaacctgcagttgaacttgctgagcaagtccaaggtgtacgaggacccagctctgagcgccatcttcctgcacaacaactacaattacatcctcaagtccctggagaagtctgaactgacactcatgacgtctgttaacccacgagatgt

SEQ ID NO: 405197 - DNA, 1795 bp, Homo sapiens
cgggggcccggtgggcccgcggaggaaagatactggggagtgggagccgcggggttcagagcgatgattcccccacaggaggcatccgctcgacggcgggagattgaggacaagctgaagcaggaggaggagactctgtccttcatccgagacagcctggagaagagcgaccagctcactaagaacatggtgtctatcttatcatcctttgagagccgccttatgaagctggagaactccatcatccctgtgcacaagcagacggagaatctgcagcggctgcaggagaatgttgagaagacgctgtcctgcctggaccatgtcatcagctactaccatgtggccagtgacactgagaagatcatcagagagggccccacaggtaggctggaagagtacctgggaagcatggccaagattcagaaggcagtggagtatttccaggacaacagcccagacagcccggaactcaacaaagtgaaactgctctttgagcgcgggaaggaggccctggagtccgaatttcgcagcctgatgacgcggcacagtaaggtcgtctcgcccgtgctcatcttggatctgatcagtggtgacgatgatctggaggcccaggaggacgtgaccctggagcacctgcccgagagcgtgctccaggatgtcattcgcatctcccgctggctggtggaatatggccgcaaccaagatttcatgaacgtctactaccagatacgctccagccagctggaccgctccatcaaaggactgaaggagcatttccataagagcagttcttcctctggggttccctactcccctgctatccccaacaagaggaaagacacacctaccaagaagccagtcaagcggccagggacgatccgtaaggctcagaaccttctgaaacagtattcccagcatggtctagatgggaaaaaggggggctctaacctcattcctctggaaggtcacgagcatgatttccgagttaagcacctgtccgaggccttgaacgacaagcacgggccgctggccgggagagatgacatgctggacgtggagaccgatgcctacatccactgcgtcagtgccttcgtcaagctggcgcagagcgagtaccagctgctggccgacatcatccccgagcaccaccagaagaagaccttcgactccctgatacaggatgccctggatgggctgatgcttgaaggggagaacatcgtgtctgctgcccggaaggccattgtgcgacacgacttctccacggtgctcaccgtcttccccatcctgcgacacctcaagcagaccaagcctgagtttgaccaggtgctccagggcacggctgccagcacaaagaacaagctgcctggcctcatcacatccatggagaccatcggtgccaaagcgctggaggacttcgcagacaacatcaagaatgacccggacaaggagtacaacatgccgaaggacggcaccgtacacgagctcaccagcaatgccatcctcttcctgcagcagcttttggacttccaggagacggcaggcgccatgctggcctcccaagagaccagctcttcggccaccagctacagctctgagttcagcaagcggctgctaagcacctatatctgtgagtgttctcccgggcagaccagcagccctgctgcctgcatgccctgcctttcccttccttctgtctgtgctctctggctattcccagggccctctcctaagtgccatctgatctttggaaccacaacctgacctctagttcagaggctgaggggagttgggctaa

SEQ ID NO: 405198 - DNA, 1319 bp, Homo sapiens
cgggggcccggtgggcccgcggaggaaagatactggggagtgggagccgcggggttcagagcgatgattcccccacaggaggcatccgctcgacggcgggagattgaggacaagctgaagcaggaggaggagactctgtccttcatccgagacagcctggagaagagcgaccagctcactaagaacatggtgtctatcttatcatcctttgagagccgccttatgaagctggagaactccatcatccctgtgcacaagcagacggagaatctgcagcggctgcaggagaatgttgagaagacgctgtcctgcctggaccatgtcatcagctactaccatgtggccagtgacactgagaagatcatcagagagggccccacaggtaggctggaagagtacctgggaagcatggccaagattcagaaggcagtggagtatttccaggacaacagcccagacagcccggaactcaacaaagtgaaactgctctttgagcgcgggaaggaggccctggagtccgaatttcgcagcctgatgacgcggcacagtaaggtcgtctcgcccgtgctcatcttggatctgatcagtggtgacgatgatctggaggcccaggaggacgtgaccctggagcacctgcccgagagcgtgctccaggatgtcattcgcatctcccgctggctggtggaatatggccgcaaccaagatttcatgaacgtctactaccagatacgctccagccagctggaccgctccatcaaaggactgaaggagcatttccataagagcagttcttcctctggggttccctactcccctgctatccccaacaagaggaaagacacacctaccaagaagccagtcaagcggccagggagagatgacatgctggacgtggagaccgatgcctacatccactgcgtcagtgccttcgtcaagctggcgcagagcgagtaccagctgctggccgacatcatccccgagcaccaccagaagaagaccttcgactccctgatacaggatgccctggatgggctgatgcttgaaggggagaacatcgtgtctgctgcccggaaggccattgtgcgacacgacttctccacggtgctcaccgtcttccccatcctttatctcgaggagataagcaggattcagagtttgagaagccccagtgtgcatcagacccagcacgttgaaatgtacccactacaaagaaaagaaactttttatctgaggaaggcgagccccctttaaatgatcaggcctagagaggcactggaatgagacaggtgtcacatttcactggccccactggagaaaga

SEQ ID NO: 405199 - DNA, 1272 bp, Homo sapiens
cgggggcccggtgggcccgcggaggaaagatactggggagtgggagccgcggggttcagagcgatgattcccccacaggaggcatccgctcgacggcgggagattgaggacaagctgaagcaggaggaggagactctgtccttcatccgagacagcctggagaagagcgaccagctcactaagaacatggtgtctatcttatcatcctttgagagccgccttatgaagctggagaactccatcatccctgtgcacaagcagacggagaatctgcagcggctgcaggagaatgttgagaagacgctgtcctgcctggaccatgtcatcagctactaccatgtggccagtgacactgagaagatcatcagagagggccccacaggtaggctggaagagtacctgggaagcatggccaagattcagaaggcagtggagtatttccaggacaacagcccagacagcccggaactcaacaaagtgaaactgctctttgagcgcgggaaggaggccctggagtccgaatttcgcagcctgatgacgcggcacagtaaggtcgtctcgcccgtgctcatcttggatctgatcagtggtgacgatgatctggaggcccaggaggacgtgaccctggagcacctgcccgagagcgtgctccaggatgtcattcgcatctcccgctggctggtggaatatggccgcaaccaagatttcatgaacgtctactaccagatacgctccagccagctggaccgctccatcaaaggactgaaggagcatttccataagagcagttcttcctctggggttccctactcccctgctatccccaacaagaggaaagacacacctaccaagaagccagtcaagcggccagggacgatccgtaaggctcagaaccttctgaaacagtattcccagcatggtctagatgggaaaaaggggggctctaacctcattcctctggaaggtcacgagcatgatttccgagttaagcacctgtccgaggccttgaacgacaagcacgggccgctggccggtgagtaccgcagcccagcccgagggcagccgctgacactgccttcgcagcggtccccggatggcctgctcctgcctggcccagctgggcccactctgctctgaggatgggccaggcctatgcgcctctctctccactctctctcttttgggcctaggtctccttgcctctctccagatgggagtgcgtgcctgtctgtcaggcctgggccaaggggagaagccgctgctcctcggaaa

SEQ ID NO: 405200 - DNA, 752 bp, Homo sapiens
gcccgggctcgcctcacctccccgcctgcttaagccctcccggagcgctcggggttcgacccccgagcacggcgggaggagggcgcccccctgcggcacagccacgtccacgaagcccctcccggggttctagaaagcggaggcctccgaaggaaagaccaagatgcagagagatgtctaaaaggtgccagaaggtgactatccagccctggtatcactgcctggtgatttcgtttctttgatcttcacgaatggcctcactggctgtgatttggacagaaatcagctgccacgtgcaacattctcccatgggaacatgtgtccgcagtacctatctcagagcccaaatccttcctgccccacagccttctcctgggacctgccttgggaggcatccgctcgacggcgggagattgaggacaagctgaagcaggaggaggagactctgtccttcatccgagacagcctggagaagagcgaccagctcactaagaacatggtgtctatcttatcatcctttgagagccgccttatgaagctggagaactccatcatccctgtgcacaagcagacggagaatctgcagcggctgcaggagaatgttgagaagacgctgtcctgcctggaccatgtcatcagctactaccatgtggccagtgacactgagaagatcatcagagagggccccacaggtaggctggaagagtacctgcgaacctatgacctcgaacctatgacctgcgaacctatga

SEQ ID NO: 405201 - DNA, 979 bp, Homo sapiens
gcccgggctcgcctcacctccccgcctgcttaagccctcccggagcgctcggggttcgacccccgagcacggcgggaggagggcgcccccctgcggcacagccacgtccacgaagcccctcccggggttctagaaagcggaggcctccgaaggaaagaccaagatgcagagagatgtctaaaaggtgccagaaggtgactatccagccctggtatcactgcctggtgatttcgtttctttgatcttcacgaatggcctcactggctgtgatttggacagaaatcagctgccacgtgcaacattctcccatgggaacatgtgtccgcagtacctatctcagagcccaaatccttcctgccccacagccttctcctgggacctgccttgggaggcatccgctcgacggcgggagattgaggacaagctgaagcaggaggaggagactctgtccttcatccgagacagcctggagaagagcgaccagctcactaagaacatggtgagtctccccgcagctgggggagagggcaggcctccggaccctgggggagagccttgcgacctggcggttccggttcctgcggcctggagttctggaatgggcagcgacggaggcagtgtgtgggtttatctagcaacagtttggcatctctcctgcctagccccctccccatgttccgtaccctcactgaggaggctgcacttcccactggcctggacttgctgctttctgtctaagctcgccattcttccttctctccttctgcaaacactcagtgagtctgaccagttgggctaggtactgggcatatgtcattgtcagtggactctctgcccaggaggttggcactttgagattcctgagggcagagaagactcagccttcactccagaggactttagggaaagaaagagctctaaagtcaggcagatctgggatctagtccttgcccttctgcttaaatgtgcggctcctgat

SEQ ID NO: 405202 - DNA, 285 bp, Homo sapiens
aagcctgagtttgaccaggtgctccaggtatgtgggcgaggggccctcaaaaacacagccaggaggcatcgtgctgccgggtgtggccgccccatccctccctgggagaaccccattctctgtcccacacttctgctctgaaggtgcatggaagcagcttaggaagggccctgggtgagtgagatgctcacagagcgactggaggtgagctgggggctcccctgtgcttcctcagggcacggctgccagcacaaagaacaagctgcctggcctcatcacatccat

SEQ ID NO: 405203 - DNA, 439 bp, Homo sapiens
gacagggaatcgctcagggccaccccttccaagactatcaggagtgccttaggctgagggtggagctggggaggggtcggccctccctgtcccctgaccacagtgcctcctcaggtttggcagcgtgcccttcaccaagaacccggagaagtacatcaagtacggggtggagcaggtgggcgacatgatcgatcgccttttcgacacctctgcctgagcctgctgctagccctgcctggttccaccagactggcgtgtcattggacagataaaccagtgttagcttgcctctgggctgggtgagcttgaagtcctctgggacagagacctgtctccacgcctccgggagctgtgtccctgagccccctagtcctggctcctgctttttccccacagcccgtgttcccagccgaaccagcactctcccggaagcctgggg

SEQ ID NO: 405204 - DNA, 874 bp, Homo sapiens
cttcagagagaacagaagttgagatttggcttcaaagggtggaagggaagccatcttgggctgattattttaagaagaattaatttgatgcttggtttgccttcaaataaaatttcaaccaatttgtcttagaccacctactatatgccaggcacatgataggtgctgaagatacagtggggaacaggtacaccctgttccttcgcttgtggagtttattgtctagaaaaccagagaaaaggcaggaaatgccgaaggtgggtgtgtagaagcagtgctgggaccactgtgagtcccaagatcaagaggcttccctcccgcaggtgtctatcttatcatcctttgagagccgccttatgaagctggagaactccatcatccctgtgcacaagcagacggagaatctgcagcggctgcaggagaatgttgagaagacgctgtcctgcctggaccatgtcatcagctactaccatgtggccagtgacactgagaagatcatcagagagggccccacaggtaggctggaagagtacctgggaagcatggccaagattcagaaggcagtggagtatttccaggacaacagcccagacagcccggaactcaacaaagtggtaaggggtccgcagaataacgtgagaagcttggggatatcagtctctgccctggtctcatgagggacatggagccagcttgaggatgtatgcagtagaatacacagaaggatatagcacagtacatcctataggcattaggatctctgcttcaagaattgcacattttttattattaaaaattctttattataaaacttgttaatgtattataaaaattaaattataaattacatataaaatataaacttaacatttga

SEQ ID NO: 405205 - DNA, 2980 bp, Homo sapiens
  misc_feature (1530)..(1530): n is a, c, g, or t
  misc_feature (1823)..(1823): n is a, c, g, or t
  misc_feature (1933)..(1933): n is a, c, g, or t
  misc_feature (2055)..(2055): n is a, c, g, or t
cgggggcccggtgggcccgcggaggaaagatactggggagtgggagccgcggggttcagagcgatgattcccccacaggaggcatccgctcgacggcgggagattgaggacaagctgaagcaggaggaggagactctgtccttcatccgagacagcctggagaagagcgaccagctcactaagaacatggtgtctatcttatcatcctttgagagccgccttatgaagctggagaactccatcatccctgtgcacaagcagacggagaatctgcagcggctgcaggagaatgttgagaagacgctgtcctgcctggaccatgtcatcagctactaccatgtggccagtgacactgagaagatcatcagagagggccccacaggtaggctggaagagtacctgggaagcatggccaagattcagaaggcagtggagtatttccaggacaacagcccagacagcccggaactcaacaaagtgaaactgctctttgagcgcgggaaggaggccctggagtccgaatttcgcagcctgatgacgcggcacagtaaggtcgtctcgcccgtgctcatcttggatctgatcagtggtgacgatgatctggaggcccaggaggacgtgaccctggagcacctgcccgagagcgtgctccaggatgtcattcgcatctcccgctggctggtggaatatggccgcaaccaagatttcatgaacgtctactaccagatacgctccagccagctggaccgctccatcaaaggactgaaggagcatttccataagagcagttcttcctctggggttccctactcccctgctatccccaacaagaggaaagacacacctaccaagaagccagtcaagcggccaggtgagcccccatcctggcccatctctgcaacagccagaggctgactgggactgtactgctttagtccaatctagcgttcgcagcgtcaggcccctccagagcttgtcgttgtggtaaccccgactgtaggtacacaggacagaaagcaagtgtctacccacccagtgaggccccccaagagcaagactcttccttccagctagcagagcctggggttacacagcttctttggaataggggagtaacacaggtgctcagcgaatcccgcctgaggcagagcccctgcctaggcctcctccctcacacacacgtcgccctgtcagaaggccaggcacactactgcagccaggatgctgggatagcaaggggataggtgctccaaccttcaccttccagaaaggcagggtgatctgaagtgacgtgtagctgagagctggatggggagaatttcactttcccagttgatccagaaaggaaagaaaccccagagcatcctctcggaagaacttaaactggctttgggctccagtgcgagcgagtgacttgtggaaaggggcaccatgatgagaggccggggccggtgggtgttgctgtcctgggtgaacatctcgtcatctgtctgttctttctccccggcatcatatcccttatagtctgtnctccaggtaaacagtgtctctgccagccacagcttggcaagcccggctatgtctggccactgagagatgctgcccgcagctcgatgatgtgctgggatgttctggggtggggctgctgagattgcactgaaaaagaaagctggagaagccggggctgctcccacccaggctggccccctgtccagctgctgctgtgggcacatgccctagttgtggcctgtggcacctgcttatgacaacaagctttgggtagagcttacttacacccttggtttctccagtccctgcctgcncatgcccctcagagagtgaggtgtctgttccacaagagcacccgctcccctgcaggcctttgtttagggtttggagaaacaggcagagcaggggctgccctcagggagtngagcattagggagctggtgcctggggccttctccctccagtgtggaaatcctgcccaccagccaaaacctgctgcaaatggggactgccagcccagcctgtgggcgcagctgcctgcacagnggatggagcagctctgtgccttctgtgtggtggggagtggctgtctctatgaggctgctaggatgcttgggccccagccagtctgtgcttgcttcctcttctgcctggctccctgacaggtcccccagaagccccagagccctatttgcactgccttaagagtgcccgctggccatgcagctacctggcctttcaggcaggagggatctgatctcaggtggctcacagtggaccacatccatccttgggccagagacactagaggaaaactccagctgtggggtttcagagttgtcaggaactggtgggctcaggaccgatgtcaggctctagggagtcaggctctggggatgtcggttcccacttctgaggagagggacagggaggcctcccaggtggtgaagcaccgacctcagcatccctggaggcaattgggagcctgacgggtttggcggctgctagatccacatcggcgacccacatcctgccggcgtgcacctgcgtctgtgtctgctcctggtgggttgtggggcaggaatcagattcactcattagtaagccgcactcgctgaaggggagagcatgagcaaggcagacgtgagccaggccttggttattaggagctaattatgggccaagtatggtggctcacgcctgtaatcctagcacttcgggaggccgaggcgggcggatcacctgaggtcaggagttcgagaccagcctggccaacatggtgaaaccctgtctctactaaaaatagaaaaaaaattagttgggtgtggtgacgcacgcctataatcccagctacctgggaggctgaggcaggagaatcacttgaacccaggaggcagaggttgcagtgagccgaggtcgtgccaccgtactccagcctgggcgacagagtgagactgtctcaaaaaaaaaa

SEQ ID NO: 405206 - DNA, 372 bp, Homo sapiens
agcgtgtatttccgcgtgaagcaccgggagatgtagccatgctcgtccggccgcagcctcgtccgtcacgagcatgatttccgagttaagcacctgtccgaggccttgaacgacaagcacgggccgctggccggtgagtaccgcagcccagcccgagggcagccgctgacactgccttcgcagcggtccccggatggcctgctcctgcctggcccagctgggcccactctgctctgaggatgggccaggcctatgcgcctctctctccactctctctcttttgggcctaggtctccttgcctctctccagatgggagtgcgtgcctgtctgtcaggcctgggccaaggggagaagccgctgctcctcggaaa

SEQ ID NO: 405207 - DNA, 4730 bp, Homo sapiens
cgggggcccggtgggcccgcggaggaaagatactggggagtgggagccgcggggttcagagcgatgattcccccacaggaggcatccgctcgacggcgggagattgaggacaagctgaagcaggaggaggagactctgtccttcatccgagacagcctggagaagagcgaccagctcactaagaacatggtgtctatcttatcatcctttgagagccgccttatgaagctggagaactccatcatccctgtgcacaagcagacggagaatctgcagcggctgcaggagaatgttgagaagacgctgtcctgcctggaccatgtcatcagctactaccatgtggccagtgacactgagaagatcatcagagagggccccacaggtaggctggaagagtacctgggaagcatggccaagattcagaaggcagtggagtatttccaggacaacagcccagacagcccggaactcaacaaagtgaaactgctctttgagcgcgggaaggaggccctggagtccgaatttcgcagcctgatgacgcggcacagtaaggtcgtctcgcccgtgctcatcttggatctgatcagtggtgacgatgatctggaggcccaggaggacgtgaccctggagcacctgcccgagagcgtgctccaggatgtcattcgcatctcccgctggctggtggaatatggccgcaaccaagatttcatgaacgtctactaccagatacgctccagccagctggaccgctccatcaaaggactgaaggagcatttccataagagcagttcttcctctggggttccctactcccctgctatccccaacaagaggaaagacacacctaccaagaagccagtcaagcggccaggtcacgagcatgatttccgagttaagcacctgtccgaggccttgaacgacaagcacgggccgctggccgggagagatgacatgctggacgtggagaccgatgcctacatccactgcgtcagtgccttcgtcaagctggcgcagagcgagtaccagctgctggccgacatcatccccgagcaccaccagaagaagaccttcgactccctgatacaggatgccctggatgggctgatgcttgaaggggagaacatcgtgtctgctgcccggaaggccattgtgcgacacgacttctccacggtgctcaccgtcttccccatcctgcgacacctcaagcagaccaagcctgagtttgaccaggtgctccagggcacggctgccagcacaaagaacaagctgcctggcctcatcacatccatggagaccatcggtgccaaagcgctggaggacttcgcagacaacatcaagaatgacccggacaaggagtacaacatgccgaaggacggcaccgtacacgagctcaccagcaatgccatcctcttcctgcagcagcttttggacttccaggagacggcaggcgccatgctggcctcccaagagaccagctcttcggccaccagctacagctctgagttcagcaagcggctgctaagcacctatatctgtaaagtgctgggcaacctgcagttgaacttgctgagcaagtccaaggtgtacgaggacccagctctgagcgccatcttcctgcacaacaactacaattacatcctcaagtccctggagaagtctgaactgatccagctggtggcagtgacacagaagactgctgagcgctcctaccgggagcacattgagcagcagatccagacctaccagcgcagctggttaaaggtgactgattacatcgcagagaagaatctacctgtgttccagccgggagtcaagctccgggacaaggagcggcagattatcaaggagcgttttaagggcttcaatgatggcctcgaagaactgtgcaaaatccagaaggcctgggctattccagacacagagcagagggacaggattcgccaggcccagaagaccattgtcaaggagacctacggggcctttctacagaagtttggcagcgtgcccttcaccaagaacccggagaagtacatcaagtacggggtggagcaggtgggcgacatgatcgatcgccttttcgacacctctgcctgagcctgctgctagccctgcctggttccaccagactggcgtgtcattggacagataaaccagtgttagcttgcctctgggctgggtgagcttgaagtcctctgggacagagacctgtctccacgcctccgggagctgtgtccctgagccccctagtcctggctcctgctttttccccacagcccgtgttcccagccgaaccagcactctcccggaagcctggggtccctccacaccttggcttttatgaccctgatggcttctgaaacaggaaaagagagaaggaagacagaggcctgtgcccactgctgctccatgtgtaccaagagcagcagggcagaagggccctccctccagcctaggtcagaggtggggacagagaactcccctacagcccagagatgtggcagggctcagagaagcagccagagctcctggaggaaaggcagtcgggactgaccccctctcttaaaacacattcccgcccgcccacaggcctgaggtctgggacctttccctcccaggagtcccctaggtggctgggggaggcaggctcactggccattttccctagagtccagcacactgcaggaggcgttcggaggaggagttccgccccaccctctacagccttcctcaggcccctgtctctggtccccagcctcagtgcctcttggcccagggccaggcagtcgtggttgcagaaggagcaattaggctgcctgcctgtgggctgggagacagggacaatggggaaaagttaaggagcaaaatgggggttggaagcaaaaaatagggccccacctatttaggacgagattgaagactgacccttgaggcacacttgcactggagatgggtttatttcacgctctgtgcttgtgtgctagcggagggagagctcagggtggcttaatccagaggccctgtcatggcccgcccccagccatgggaaagcaaacttcatcctaaggtgtgcagcccaggccctgcccctttacagtctaggccgcctgccatggggtgcagcctctccaggggctgcgtcagacttgcacgctgcccacatccagattcctgcaaagacgaattgggtgcacagcaccccaaccacatacacgaggaagaagatgcggtcagcagtctcaggccagcttctctgtgacccctttactcctctggagggctctgtggggagagatacagggaaaggagctgttcttcaaggtcccctcaacatgagcggaagagcgaaccccaggggtcatcagcctgtatcgcttcctttcttagattctcagctgatgaaaatttgggtctggcccatttcaggccatcttcagttgaagaaacaccctcttaggctgtgcaaggcatgggttatcaggggattgaggtcacctgggacttcagggaggctcagcttgctccctgccccagacctgtttcttctaagggaggaggacatggtggagaccagggacaggagagccagcagggtggatgcaaggggcctctacccacacctggacctccgtgccctcaccccagccctaggtgtgcacctaggcctcattccttaccccccagcccctgcccaccttcagcaggatgaggccctgggttgccgtgctctcgctgttcccctctcggggctgggctggggccgctcttggccccaaggttgccccgggccagcagcccagccagcagcacagtctctatggtgctgaggaagagcagcagcagcaggatggtgaagtagtaaactgggggaggcagggcacagggagatgctcaggggccagtccctgtgtctctggtgcccagcgagctgagcaccagtgggtgaccggggagaaacagggcagactgggtaagggagcagggcttactgagcagtgggttgcaggaggaggagctgggcagggcctgcaccagggaggagtggaggacgaggtaactcagcagcaatgtcaccttgtagcctatgcgctcaatggcccggaggggcagcaaccccccgcacacgtcagccaacagcagtgcctctgcaggcaccaagagagcgatgatggacttgagcgccgtgttcttcagcctcagctggaaggggaaaagtcagggccttcccggcgggggggaaggaggtgggcatcgggggcatggggcctggcctctggccgtgcatcctcactcccacccgcctccagcagccctctgtcggcctcctcgcgacttgactcaccgtcacctggaagcagggcaccagctgctggggtgggacttgggtcttcagatcataaactacgtattccctcttgacactcacaatctcgttcaccacgtgggcctggaactctaactccatcgctgaggggtgggaatgagaactatgaaccaggaaggagagatcccagctgccaagtctgggggtagcagactggagcccaggggtgatggagacttttgatggcttttggcagggacagacttggacacaaaaccgatccatagaagggcttcccaaaccttgttttgcaacatcccaaattgtctccagttgaaggaaggcctttatcagattcatagatgagctttcattgtaaaaataaatgtactttgcaccacttcaagat

SEQ ID NO: 405208 - DNA, 4345 bp, Homo sapiens
atacgctaggtagcgaggctgggttgcgggcagtgacactgagaagatatcagagaggccccacaggtaggctggaagagtacctgggaagcatggccaagattcagaaggcagtggagtatttccaggacaacagcccagacagcccggaactcaacaaagtgaaactgctctttgagcgcgggaaggaggccctggagtccgaatttcgcagcctgatgacgcggcacagtaaggtcgtctcgcccgtgctcatcttggatctgatcagtggtgacgatgatctggaggcccaggaggacgtgaccctggagcacctgcccgagagcgtgctccaggatgtcattcgcatctcccgctggctggtggaatatggccgcaaccaagatttcatgaacgtctactaccagatacgctccagccagctggaccgctccatcaaaggactgaaggagcatttccataagagcagttcttcctctggggttccctactcccctgctatccccaacaagaggaaagacacacctaccaagaagccagtcaagcggccagggagagatgacatgctggacgtggagaccgatgcctacatccactgcgtcagtgccttcgtcaagctggcgcagagcgagtaccagctgctggccgacatcatccccgagcaccaccagaagaagaccttcgactccctgatacaggatgccctggatgggctgatgcttgaaggggagaacatcgtgtctgctgcccggaaggccattgtgcgacacgacttctccacggtgctcaccgtcttccccatcctgcgacacctcaagcagaccaagcctgagtttgaccaggtgctccagggcacggctgccagcacaaagaacaagctgcctggcctcatcacatccatggagaccatcggtgccaaagcgctggaggacttcgcagacaacatcaagaatgacccggacaaggagtacaacatgccgaaggacggcaccgtacacgagctcaccagcaatgccatcctcttcctgcagcagcttttggacttccaggagacggcaggcgccatgctggcctcccaagagaccagctcttcggccaccagctacagctctgagttcagcaagcggctgctaagcacctatatctgtaaagtgctgggcaacctgcagttgaacttgctgagcaagtccaaggtgtacgaggacccagctctgagcgccatcttcctgcacaacaactacaattacatcctcaagtccctggagaagtctgaactgatccagctggtggcagtgacacagaagactgctgagcgctcctaccgggagcacattgagcagcagatccagacctaccagcgcagctggttaaaggtgactgattacatcgcagagaagaatctacctgtgttccagccgggagtcaagctccgggacaaggagcggcagattatcaaggagcgttttaagggcttcaatgatggcctcgaagaactgtgcaaaatccagaaggcctgggctattccagacacagagcagagggacaggattcgccaggcccagaagaccattgtcaaggagacctacggggcctttctacagaagtttggcagcgtgcccttcaccaagaacccggagaagtacatcaagtacggggtggagcaggtgggcgacatgatcgatcgccttttcgacacctctgcctgagcctgctgctagccctgcctggttccaccagactggcgtgtcattggacagataaaccagtgttagcttgcctctgggctgggtgagcttgaagtcctctgggacagagacctgtctccacgcctccgggagctgtgtccctgagccccctagtcctggctcctgctttttccccacagcccgtgttcccagccgaaccagcactctcccggaagcctggggtccctccacaccttggcttttatgaccctgatggcttctgaaacaggaaaagagagaaggaagacagaggcctgtgcccactgctgctccatgtgtaccaagagcagcagggcagaagggccctccctccagcctaggtcagaggtggggacagagaactcccctacagcccagagatgtggcagggctcagagaagcagccagagctcctggaggaaaggcagtcgggactgaccccctctcttaaaacacattcccgcccgcccacaggcctgaggtctgggacctttccctcccaggagtcccctaggtggctgggggaggcaggctcactggccattttccctagagtccagcacactgcaggaggcgttcggaggaggagttccgccccaccctctacagccttcctcaggcccctgtctctggtccccagcctcagtgcctcttggcccagggccaggcagtcgtggttgcagaaggagcaattaggctgcctgcctgtgggctgggagacagggacaatggggaaaagttaaggagcaaaatgggggttggaagcaaaaaatagggccccacctatttaggacgagattgaagactgacccttgaggcacacttgcactggagatgggtttatttcacgctctgtgcttgtgtgctagcggagggagagctcagggtggcttaatccagaggccctgtcatggcccgcccccagccatgggaaagcaaacttcatcctaaggtgtgcagcccaggccctgcccctttacagtctaggccgcctgccatggggtgcagcctctccaggggctgcgtcagacttgcacgctgcccacatccagattcctgcaaagacgaattgggtgcacagcaccccaaccacatacacgaggaagaagatgcggtcagcagtctcaggccagcttctctgtgacccctttactcctctggagggctctgtggggagagatacagggaaaggagctgttcttcaaggtcccctcaacatgagcggaagagcgaaccccaggggtcatcagcctgtatcgcttcctttcttagattctcagctgatgaaaatttgggtctggcccatttcaggccatcttcagttgaagaaacaccctcttaggctgtgcaaggcatgggttatcaggggattgaggtcacctgggacttcagggaggctcagcttgctccctgccccagacctgtttcttctaagggaggaggacatggtggagaccagggacaggagagccagcagggtggatgcaaggggcctctacccacacctggacctccgtgccctcaccccagccctaggtgtgcacctaggcctcattccttaccccccagcccctgcccaccttcagcaggatgaggccctgggttgccgtgctctcgctgttcccctctcggggctgggctggggccgctcttggccccaaggttgccccgggccagcagcccagccagcagcacagtctctatggtgctgaggaagagcagcagcagcaggatggtgaagtagtaaactgggggaggcagggcacagggagatgctcaggggccagtccctgtgtctctggtgcccagcgagctgagcaccagtgggtgaccggggagaaacagggcagactgggtaagggagcagggcttactgagcagtgggttgcaggaggaggagctgggcagggcctgcaccagggaggagtggaggacgaggtaactcagcagcaatgtcaccttgtagcctatgcgctcaatggcccggaggggcagcaaccccccgcacacgtcagccaacagcagtgcctctgcaggcaccaagagagcgatgatggacttgagcgccgtgttcttcagcctcagctggaaggggaaaagtcagggccttcccggcgggggggaaggaggtgggcatcgggggcatggggcctggcctctggccgtgcatcctcactcccacccgcctccagcagccctctgtcggcctcctcgcgacttgactcaccgtcacctggaagcagggcaccagctgctggggtgggacttgggtcttcagatcataaactacgtattccctcttgacactcacaatctcgttcaccacgtgggcctggaactctaactccatcgctgaggggtgggaatgagaactatgaaccaggaaggagagatcccagctgccaagtctgggggtagcagactggagcccaggggtgatggagacttttgatggcttttggcagggacagacttggacacaaaaccgatccatagaagggcttcccaaaccttgttttgcaacatcccaaattgtctccagttgaaggaaggcctttatcagattcatagatgagctttcattgtaaaaataaatgtactttgcaccacttcaagat

SEQ ID NO: 405209 - DNA, 4013 bp, Homo sapiens
gcggccgcctactactactaaattcgcggccgctccatcaaaggactgaaggagcatttccataagagcagttcttcctctggggttccctactcccctgctatccccaacaagaggaaagacacacctaccaagaagccagtcaagcggccaggtcacgagcatgatttccgagttaagcacctgtccgaggccttgaacgacaagcacgggccgctggccgggagagatgacatgctggacgtggagaccgatgcctacatccactgcgtcagtgccttcgtcaagctggcgcagagcgagtaccagctgctggccgacatcatccccgagcaccaccagaagaagaccttcgactccctgatacaggatgccctggatgggctgatgcttgaaggggagaacatcgtgtctgctgcccggaaggccattgtgcgacacgacttctccacggtgctcaccgtcttccccatcctgcgacacctcaagcagaccaagcctgagtttgaccaggtgctccagggcacggctgccagcacaaagaacaagctgcctggcctcatcacatccatggagaccatcggtgccaaagcgctggaggacttcgcagacaacatcaagaatgacccggacaaggagtacaacatgccgaaggacggcaccgtacacgagctcaccagcaatgccatcctcttcctgcagcagcttttggacttccaggagacggcaggcgccatgctggcctcccaagagaccagctcttcggccaccagctacagctctgagttcagcaagcggctgctaagcacctatatctgtaaagtgctgggcaacctgcagttgaacttgctgagcaagtccaaggtgtacgaggacccagctctgagcgccatcttcctgcacaacaactacaattacatcctcaagtccctggagaagtctgaactgatccagctggtggcagtgacacagaagactgctgagcgctcctaccgggagcacattgagcagcagatccagacctaccagcgcagctggttaaaggtgactgattacatcgcagagaagaatctacctgtgttccagccgggagtcaagctccgggacaaggagcggcagattatcaaggagcgttttaagggcttcaatgatggcctcgaagaactgtgcaaaatccagaaggcctgggctattccagacacagagcagagggacaggattcgccaggcccagaagaccattgtcaaggagacctacggggcctttctacagaagtttggcagcgtgcccttcaccaagaacccggagaagtacatcaagtacggggtggagcaggtgggcgacatgatcgatcgccttttcgacacctctgcctgagcctgctgctagccctgcctggttccaccagactggcgtgtcattggacagataaaccagtgttagcttgcctctgggctgggtgagcttgaagtcctctgggacagagacctgtctccacgcctccgggagctgtgtccctgagccccctagtcctggctcctgctttttccccacagcccgtgttcccagccgaaccagcactctcccggaagcctggggtccctccacaccttggcttttatgaccctgatggcttctgaaacaggaaaagagagaaggaagacagaggcctgtgcccactgctgctccatgtgtaccaagagcagcagggcagaagggccctccctccagcctaggtcagaggtggggacagagaactcccctacagcccagagatgtggcagggctcagagaagcagccagagctcctggaggaaaggcagtcgggactgaccccctctcttaaaacacattcccgcccgcccacaggcctgaggtctgggacctttccctcccaggagtcccctaggtggctgggggaggcaggctcactggccattttccctagagtccagcacactgcaggaggcgttcggaggaggagttccgccccaccctctacagccttcctcaggcccctgtctctggtccccagcctcagtgcctcttggcccagggccaggcagtcgtggttgcagaaggagcaattaggctgcctgcctgtgggctgggagacagggacaatggggaaaagttaaggagcaaaatgggggttggaagcaaaaaatagggccccacctatttaggacgagattgaagactgacccttgaggcacacttgcactggagatgggtttatttcacgctctgtgcttgtgtgctagcggagggagagctcagggtggcttaatccagaggccctgtcatggcccgcccccagccatgggaaagcaaacttcatcctaaggtgtgcagcccaggccctgcccctttacagtctaggccgcctgccatggggtgcagcctctccaggggctgcgtcagacttgcacgctgcccacatccagattcctgcaaagacgaattgggtgcacagcaccccaaccacatacacgaggaagaagatgcggtcagcagtctcaggccagcttctctgtgacccctttactcctctggagggctctgtggggagagatacagggaaaggagctgttcttcaaggtcccctcaacatgagcggaagagcgaaccccaggggtcatcagcctgtatcgcttcctttcttagattctcagctgatgaaaatttgggtctggcccatttcaggccatcttcagttgaagaaacaccctcttaggctgtgcaaggcatgggttatcaggggattgaggtcacctgggacttcagggaggctcagcttgctccctgccccagacctgtttcttctaagggaggaggacatggtggagaccagggacaggagagccagcagggtggatgcaaggggcctctacccacacctggacctccgtgccctcaccccagccctaggtgtgcacctaggcctcattccttaccccccagcccctgcccaccttcagcaggatgaggccctgggttgccgtgctctcgctgttcccctctcggggctgggctggggccgctcttggccccaaggttgccccgggccagcagcccagccagcagcacagtctctatggtgctgaggaagagcagcagcagcaggatggtgaagtagtaaactgggggaggcagggcacagggagatgctcaggggccagtccctgtgtctctggtgcccagcgagctgagcaccagtgggtgaccggggagaaacagggcagactgggtaagggagcagggcttactgagcagtgggttgcaggaggaggagctgggcagggcctgcaccagggaggagtggaggacgaggtaactcagcagcaatgtcaccttgtagcctatgcgctcaatggcccggaggggcagcaaccccccgcacacgtcagccaacagcagtgcctctgcaggcaccaagagagcgatgatggacttgagcgccgtgttcttcagcctcagctggaaggggaaaagtcagggccttcccggcgggggggaaggaggtgggcatcgggggcatggggcctggcctctggccgtgcatcctcactcccacccgcctccagcagccctctgtcggcctcctcgcgacttgactcaccgtcacctggaagcagggcaccagctgctggggtgggacttgggtcttcagatcataaactacgtattccctcttgacactcacaatctcgttcaccacgtgggcctggaactctaactccatcgctgaggggtgggaatgagaactatgaaccaggaaggagagatcccagctgccaagtctgggggtagcagactggagcccaggggtgatggagacttttgatggcttttggcagggacagacttggacacaaaaccgatccatagaagggcttcccaaaccttgttttgcaacatcccaaattgtctccagttgaaggaaggcctttatcagattcatagatgagctttcattgtaaaaataaatgtactttgcaccacttcaagat

SEQ ID NO: 405210 - DNA, 3918 bp, Homo sapiens
cgggacaaggagcggcagattatcaaggagcgttttaagggcttcaatgatggcctcgaagaactgtgcaaaatccagaaggcctgggctattccagacacagagcagagggacaggattcgccaggctcagaagaccattgtcaaggagacctacggggcctttctacagaagtttggcagcgtgcccttcaccaagaacccggagaagtacatcaagtacggggtggagcaggtgggcgacatgatcgatcgccttttcgacacctctgcctgagcctgctgctagccctgcctggttccaccagactatcgtgtctgctgcccggaaggccattgtgcgacacgacttctccacggtgctcaccgtcttccccatcctgcgacacctcaagcagaccaagcctgagtttgaccaggtgctccagggcacggctgccagcacaaagaacaagctgcctggcctcatcacatccatggagaccatcggtgccaaagcgctggaggacttcgcagacaacatcaagaatgacccggacaaggagtacaacatgccgaaggacggcaccgtacacgagctcaccagcaatgccatcctcttcctgcagcagcttttggacttccaggagacggcaggcgccatgctggcctcccaagagaccagctcttcggccaccagctacagctctgagttcagcaagcggctgctaagcacctatatctgtaaagtgctgggcaacctgcagttgaacttgctgagcaagtccaaggtgtacgaggacccagctctgagcgccatcttcctgcacaacaactacaattacatcctcaagtccctggagaagtctgaactgatccagctggtggcagtgacacagaagactgctgagcgctcctaccgggagcacattgagcagcagatccagacctaccagcgcagctggttaaaggtgactgattacatcgcagagaagaatctacctgtgttccagccgggagtcaagctccgggacaaggagcggcagattatcaaggagcgttttaagggcttcaatgatggcctcgaagaactgtgcaaaatccagaaggcctgggctattccagacacagagcagagggacaggattcgccaggcccagaagaccattgtcaaggagacctacggggcctttctacagaagtttggcagcgtgcccttcaccaagaacccggagaagtacatcaagtacggggtggagcaggtgggcgacatgatcgatcgccttttcgacacctctgcctgagcctgctgctagccctgcctggttccaccagactggcgtgtcattggacagataaaccagtgttagcttgcctctgggctgggtgagcttgaagtcctctgggacagagacctgtctccacgcctccgggagctgtgtccctgagccccctagtcctggctcctgctttttccccacagcccgtgttcccagccgaaccagcactctcccggaagcctggggtccctccacaccttggcttttatgaccctgatggcttctgaaacaggaaaagagagaaggaagacagaggcctgtgcccactgctgctccatgtgtaccaagagcagcagggcagaagggccctccctccagcctaggtcagaggtggggacagagaactcccctacagcccagagatgtggcagggctcagagaagcagccagagctcctggaggaaaggcagtcgggactgaccccctctcttaaaacacattcccgcccgcccacaggcctgaggtctgggacctttccctcccaggagtcccctaggtggctgggggaggcaggctcactggccattttccctagagtccagcacactgcaggaggcgttcggaggaggagttccgccccaccctctacagccttcctcaggcccctgtctctggtccccagcctcagtgcctcttggcccagggccaggcagtcgtggttgcagaaggagcaattaggctgcctgcctgtgggctgggagacagggacaatggggaaaagttaaggagcaaaatgggggttggaagcaaaaaatagggccccacctatttaggacgagattgaagactgacccttgaggcacacttgcactggagatgggtttatttcacgctctgtgcttgtgtgctagcggagggagagctcagggtggcttaatccagaggccctgtcatggcccgcccccagccatgggaaagcaaacttcatcctaaggtgtgcagcccaggccctgcccctttacagtctaggccgcctgccatggggtgcagcctctccaggggctgcgtcagacttgcacgctgcccacatccagattcctgcaaagacgaattgggtgcacagcaccccaaccacatacacgaggaagaagatgcggtcagcagtctcaggccagcttctctgtgacccctttactcctctggagggctctgtggggagagatacagggaaaggagctgttcttcaaggtcccctcaacatgagcggaagagcgaaccccaggggtcatcagcctgtatcgcttcctttcttagattctcagctgatgaaaatttgggtctggcccatttcaggccatcttcagttgaagaaacaccctcttaggctgtgcaaggcatgggttatcaggggattgaggtcacctgggacttcagggaggctcagcttgctccctgccccagacctgtttcttctaagggaggaggacatggtggagaccagggacaggagagccagcagggtggatgcaaggggcctctacccacacctggacctccgtgccctcaccccagccctaggtgtgcacctaggcctcattccttaccccccagcccctgcccaccttcagcaggatgaggccctgggttgccgtgctctcgctgttcccctctcggggctgggctggggccgctcttggccccaaggttgccccgggccagcagcccagccagcagcacagtctctatggtgctgaggaagagcagcagcagcaggatggtgaagtagtaaactgggggaggcagggcacagggagatgctcaggggccagtccctgtgtctctggtgcccagcgagctgagcaccagtgggtgaccggggagaaacagggcagactgggtaagggagcagggcttactgagcagtgggttgcaggaggaggagctgggcagggcctgcaccagggaggagtggaggacgaggtaactcagcagcaatgtcaccttgtagcctatgcgctcaatggcccggaggggcagcaaccccccgcacacgtcagccaacagcagtgcctctgcaggcaccaagagagcgatgatggacttgagcgccgtgttcttcagcctcagctggaaggggaaaagtcagggccttcccggcgggggggaaggaggtgggcatcgggggcatggggcctggcctctggccgtgcatcctcactcccacccgcctccagcagccctctgtcggcctcctcgcgacttgactcaccgtcacctggaagcagggcaccagctgctggggtgggacttgggtcttcagatcataaactacgtattccctcttgacactcacaatctcgttcaccacgtgggcctggaactctaactccatcgctgaggggtgggaatgagaactatgaaccaggaaggagagatcccagctgccaagtctgggggtagcagactggagcccaggggtgatggagacttttgatggcttttggcagggacagacttggacacaaaaccgatccatagaagggcttcccaaaccttgttttgcaacatcccaaattgtctccagttgaaggaaggcctttatcagattcatagatgagctttcattgtaaaaataaatgtactttgcaccacttcaagat

SEQ ID NO: 405211 - DNA, 3617 bp, Homo sapiens
tacctaaacgtgggctatcttcaggctgttacgagtcctgaatccctggtattcacggtgctcaccgtcttccccatcctgcgacacctcaagcagaccaagcctgagtttgaccaggtgctccagggcacggctgccagcacaaagaacaagctgcctggcctcatcacatccatggagaccatcggtgccaaagcgctggaggacttcgcagacaacatcaagaatgacccggacaaggagtacaacatgccgaaggacggcaccgtacacgagctcaccagcaatgccatcctcttcctgcagcagcttttggacttccaggagacggcaggcgccatgctggcctcccaagagaccagctcttcggccaccagctacagctctgagttcagcaagcggctgctaagcacctatatctgtaaagtgctgggcaacctgcagttgaacttgctgagcaagtccaaggtgtacgaggacccagctctgagcgccatcttcctgcacaacaactacaattacatcctcaagtccctggagaagtctgaactgatccagctggtggcagtgacacagaagactgctgagcgctcctaccgggagcacattgagcagcagatccagacctaccagcgcagctggttaaaggtgactgattacatcgcagagaagaatctacctgtgttccagccgggagtcaagctccgggacaaggagcggcagattatcaaggagcgttttaagggcttcaatgatggcctcgaagaactgtgcaaaatccagaaggcctgggctattccagacacagagcagagggacaggattcgccaggcccagaagaccattgtcaaggagacctacggggcctttctacagaagtttggcagcgtgcccttcaccaagaacccggagaagtacatcaagtacggggtggagcaggtgggcgacatgatcgatcgccttttcgacacctctgcctgagcctgctgctagccctgcctggttccaccagactggcgtgtcattggacagataaaccagtgttagcttgcctctgggctgggtgagcttgaagtcctctgggacagagacctgtctccacgcctccgggagctgtgtccctgagccccctagtcctggctcctgctttttccccacagcccgtgttcccagccgaaccagcactctcccggaagcctggggtccctccacaccttggcttttatgaccctgatggcttctgaaacaggaaaagagagaaggaagacagaggcctgtgcccactgctgctccatgtgtaccaagagcagcagggcagaagggccctccctccagcctaggtcagaggtggggacagagaactcccctacagcccagagatgtggcagggctcagagaagcagccagagctcctggaggaaaggcagtcgggactgaccccctctcttaaaacacattcccgcccgcccacaggcctgaggtctgggacctttccctcccaggagtcccctaggtggctgggggaggcaggctcactggccattttccctagagtccagcacactgcaggaggcgttcggaggaggagttccgccccaccctctacagccttcctcaggcccctgtctctggtccccagcctcagtgcctcttggcccagggccaggcagtcgtggttgcagaaggagcaattaggctgcctgcctgtgggctgggagacagggacaatggggaaaagttaaggagcaaaatgggggttggaagcaaaaaatagggccccacctatttaggacgagattgaagactgacccttgaggcacacttgcactggagatgggtttatttcacgctctgtgcttgtgtgctagcggagggagagctcagggtggcttaatccagaggccctgtcatggcccgcccccagccatgggaaagcaaacttcatcctaaggtgtgcagcccaggccctgcccctttacagtctaggccgcctgccatggggtgcagcctctccaggggctgcgtcagacttgcacgctgcccacatccagattcctgcaaagacgaattgggtgcacagcaccccaaccacatacacgaggaagaagatgcggtcagcagtctcaggccagcttctctgtgacccctttactcctctggagggctctgtggggagagatacagggaaaggagctgttcttcaaggtcccctcaacatgagcggaagagcgaaccccaggggtcatcagcctgtatcgcttcctttcttagattctcagctgatgaaaatttgggtctggcccatttcaggccatcttcagttgaagaaacaccctcttaggctgtgcaaggcatgggttatcaggggattgaggtcacctgggacttcagggaggctcagcttgctccctgccccagacctgtttcttctaagggaggaggacatggtggagaccagggacaggagagccagcagggtggatgcaaggggcctctacccacacctggacctccgtgccctcaccccagccctaggtgtgcacctaggcctcattccttaccccccagcccctgcccaccttcagcaggatgaggccctgggttgccgtgctctcgctgttcccctctcggggctgggctggggccgctcttggccccaaggttgccccgggccagcagcccagccagcagcacagtctctatggtgctgaggaagagcagcagcagcaggatggtgaagtagtaaactgggggaggcagggcacagggagatgctcaggggccagtccctgtgtctctggtgcccagcgagctgagcaccagtgggtgaccggggagaaacagggcagactgggtaagggagcagggcttactgagcagtgggttgcaggaggaggagctgggcagggcctgcaccagggaggagtggaggacgaggtaactcagcagcaatgtcaccttgtagcctatgcgctcaatggcccggaggggcagcaaccccccgcacacgtcagccaacagcagtgcctctgcaggcaccaagagagcgatgatggacttgagcgccgtgttcttcagcctcagctggaaggggaaaagtcagggccttcccggcgggggggaaggaggtgggcatcgggggcatggggcctggcctctggccgtgcatcctcactcccacccgcctccagcagccctctgtcggcctcctcgcgacttgactcaccgtcacctggaagcagggcaccagctgctggggtgggacttgggtcttcagatcataaactacgtattccctcttgacactcacaatctcgttcaccacgtgggcctggaactctaactccatcgctgaggggtgggaatgagaactatgaaccaggaaggagagatcccagctgccaagtctgggggtagcagactggagcccaggggtgatggagacttttgatggcttttggcagggacagacttggacacaaaaccgatccatagaagggcttcccaaaccttgttttgcaacatcccaaattgtctccagttgaaggaaggcctttatcagattcatagatgagctttcattgtaaaaataaatgtactttgcaccacttcaagat

SEQ ID NO: 405212 - DNA, 4366 bp, Homo sapiens
cgggggcccggtgggcccgcggaggaaagatactggggagtgggagccgcggggttcagagcgatgattcccccacaggaggcatccgctcgacggcgggagattgaggacaagctgaagcaggaggaggagactctgtccttcatccgagacagcctggagaagagcgaccagctcactaagaacatggtgtctatcttatcatcctttgagagccgccttatgaagctggagaactccatcatccctgtgcacaagcagacggagaatctgcagcggctgcaggagaatgttgagaagacgctgtcctgcctggaccatgtcatcagctactaccatgtggccagtgacactgagaagatcatcagagagggccccacaggtaggctggaagagtacctgggaagcatggccaagattcagaaggcagtggagtatttccaggacaacagcccagacagcccggaactcaacaaagtgaaactgctctttgagcgcgggaaggaggccctggagtccgaatttcgcagcctgatgacgcggcacagtaaggtcgtctcgcccgtgctcatcttggatctgatcagtggtgacgatgatctggaggcccaggaggacgtgaccctggagcacctgcccgagagcgtgctccaggatgtcattcgcatctcccgctggctggtggaatatggccgcaaccaagatttcatgaacgtctactaccagatacgctccagccagctggaccgctccatcaaaggactgaaggagcatttccataagagcagttcttcctctggggttccctactcccctgctatccccaacaagaggaaagacacacctaccaagaagccagtcaagcggccagggagagatgacatgctggacgtggagaccgatgcctacatccactgcgtcagtgccttcgtcaagctggcgcagagcgagtaccagctgctggccgacatcatccccgagcaccaccagaagaagaccttcgactccctgatacaggatgccctggatgggctgatgcttgaaggggagaacatcgtgtctgctgcccggaaggccattgtgcgacacgacttctccacggtgctcaccgtcttccccatcctgcgacacctcaagcagaccaagcctgagtttgaccaggtgctccagggcacggctgccagcacaaagaacaagctgcctggcctcatcacatccatggagaccatcggtgccaaagcgctggaggacttcgcagacaacatcaagaatgacccggacaaggagtacaacatgccgaaggacggcaccgtacacgagctcaccagcaatgccatcctcttcctgcagcagcttttggacttccaggagacggcaggcgccatgctggcctcccaagagaccagctcttcggccaccagctacagctctgagttcagcaagcggctgctaagcacctatatctgtaaagtgctgggcaacctgcagttgaacttgctgagcaagtccaaggtgtacgaggacccagctctgagcgccatcttcctgcacaacaactacaattacatcctcaagtccctggagaagtctgaactgatccagctggtggcagtgacacagaagactgctgagcgctcctaccgggagcacattgagcagcagatccagacctaccagcgcagctggttaaaggtgactgattacatcgcagagaagaatctacctgtgttccagccgggagtcaagctccgggacaaggagcggcagattatcaaggagcgttttaagggcttcaatgatggcctcgaagaactgtgcaaaatccagaaggcctgggctattccagacacagagcagagggacaggattcgccaggcccagaagaccattgtcaaggagacctacggggcctttctacagaagtttggcagcgtgcccttcaccaagaacccggagaagtacatcaagtacggggtggagcaggtgggcgacatgatcgatcgccttttcgacacctctgcctgagcctgctgctagccctgcctggttccaccagactggcgtgtcattggacagataaaccagtgttagcttgcctctgggctgggtgagcttgaagtcctctgggacagagacctgtctccacgcctccgggagctgtgtccctgagccccctagtcctggctcctgctttttccccacagcccgtgttcccagccgaaccagcactctcccggaagcctggggtccctccacaccttggcttttatgaccctgatggcttctgaaacaggaaaagagagaaggaagacagaggcctgtgcccactgctgctccatgtgtaccaagagcagcagggcagaagggccctccctccagcctaggtcagaggtggggacagagaactcccctacagcccagagatgtggcagggctcagagaagcagccagagctcctggaggaaaggcagtcgggactgaccccctctcttaaaacacattcccgcccgcccacaggcctgaggtctgggacctttccctcccaggagtcccctaggtggctgggggaggcaggctcactggccattttccctagagtccagcacactgcaggaggcgttcggaggaggagttccgccccaccctctacagccttcctcaggcccctgtctctggtccccagcctcagtgcctcttggcccagggccaggcagtcgtggttgcagaaggagcaattaggctgcctgcctgtgggctgggagacagggacaatggggaaaagttaaggagcaaaatgggggttggaagcaaaaaatagggccccacctatttaggacgagattgaagactgacccttgaggcacacttgcactggagatgggtttatttcacgctctgtgcttgtgtgctagcggagggagagctcagggtggcttaatccagaggccctgtcatggcccgcccccagccatgggaaagcaaacttcatcctaaggtgtgcagcccaggccctgcccctttacagtctaggccgcctgccatggggtgcagcctctccaggggctgcgtcagacttgcacgctgcccacatccagattcctgcaaagacgaattgggtgcacagcaccccaaccacatacacgaggaagaagatgcggtcagcagtctcaggccagcttctctgtgacccctttactcctctggagggctctgtggggagagatacagggaaaggagctgttcttcaaggtcccctcaacatgagcggaagagcgaaccccaggggtcatcagcctgtatcgcttcctttcttagattctcagctgatgaaaatttgggtctggcccatttcaggccatcttcagttgaagaaacaccctcttaggctgtgcaaggcatgggttatcaggggattgaggtcacctgggacttcagggaggctcagcttgctccctgccccagacctgtttcttctaagggaggaggacatggtggagaccagggacaggagagccagcagggtggatgcaaggggcctctacccacacctggacctccgtgccctcaccccagccctaggtgtgcacctaggcctcattccttaccccccagcccctgcccaccttcagcaggatgaggccctgggttgccgtgctctcgctgttcccctctcggggctgggctggggccgctcttggccccaaggttgccccgggccagcagcccagccagcagcacagtctctatggtgctgaggaagagcagcagcagcaggatggtgaagtagtaaactgggggaggcagggcacagggagatgctcaggggccagtccctgtgtctctggtgcccagcgagctgagcaccagtgggtgaccggggagaaacagggcagactgggtaagggagcagggcttactgagcagtgggttgcaggaggaggagctgggcagggcctgcaccagggaggagtggaggacgaggtaactcagcagcaatgtcaccttgtagcctatgcgctcaatggcccggaggggcagcaaccccccgcacacgtcagccaacagcagtgcctctgcaggcaccaagagagcgatgatggacttgagcgccgtgttcttcagcctcagctggaaggggaaaagtcagggccttcccggcgggggggaaggaggtgggcatcgggggcatggggcctggcctctggccgtgcatcctcactcccacccgcctccagcagccctctgtcggcctcctcgcgacttgactcaccgtcacctggaagcagggcaccagctgctggggtgggacttgggtcttcagatcataaactacgtattccctcttgacactcacaatctcgttcac

SEQ ID NO: 405213 - DNA, 4122 bp, Homo sapiens
cgggggcccggtgggcccgcggaggaaagatactggggagtgggagccgcggggttcagagcgatgattcccccacaggaggcatccgctcgacggcgggagattgaggacaagctgaagcaggaggaggagactctgtccttcatccgagacagcctggagaagagcgaccagctcactaagaacatggtgtctatcttatcatcctttgagagccgccttatgaagctggagaactccatcatccctgtgcacaagcagacggagaatctgcagcggctgcaggagaatgttgagaagacgctgtcctgcctggaccatgtcatcagctactaccatgtggccagtgacactgagaagatcatcagagagggccccacaggtaggctggaagagtacctgggaagcatggccaagattcagaaggcagtggagtatttccaggacaacagcccagacagcccggaactcaacaaagtgaaactgctctttgagcgcgggaaggaggccctggagtccgaatttcgcagcctgatgacgcggcacagtaaggtcgtctcgcccgtgctcatcttggatctgatcagtggtgacgatgatctggaggcccaggaggacgtgaccctggagcacctgcccgagagcgtgctccaggatgtcattcgcatctcccgctggctggtggaatatggccgcaaccaagatttcatgaacgtctactaccagatacgctccagccagctggaccgctccatcaaaggactgaaggagcatttccataagagcagttcttcctctggggttccctactcccctgctatccccaacaagaggaaagacacacctaccaagaagccagtcaagcggccagggagagatgacatgctggacgtggagaccgatgcctacatccactgcgtcagtgccttcgtcaagctggcgcagagcgagtaccagctgctggccgacatcatccccgagcaccaccagaagaagaccttcgactccctgatacaggatgccctggatgggctgatgcttgaaggggagaacatcgtgtctgctgcccggaaggccattgtgcgacacgacttctccacggtgctcaccgtcttccccatcctgcgacacctcaagcagaccaagcctgagtttgaccaggtgctccagggcacggctgccagcacaaagaacaagctgcctggcctcatcacatccatggagaccatcggtgccaaagcgctggaggacttcgcagacaacatcaagaatgacccggacaaggagtacaacatgccgaaggacggcaccgtacacgagctcaccagcaatgccatcctcttcctgcagcagcttttggacttccaggagacggcaggcgccatgctggcctcccaagagaccagctcttcggccaccagctacagctctgagttcagcaagcggctgctaagcacctatatctgtaaagtgctgggcaacctgcagttgaacttgctgagcaagtccaaggtgtacgaggacccagctctgagcgccatcttcctgcacaacaactacaattacatcctcaagtccctggagaagtctgaactgatccagctggtggcagtgacacagaagactgctgagcgctcctaccgggagcacattgagcagcagatccagacctaccagcgcagctggttaaaggtgactgattacatcgcagagaagaatctacctgtgttccagccgggagtcaagctccgggacaaggagcggcagattatcaaggagcgttttaagggcttcaatgatggcctcgaagaactgtgcaaaatccagaaggcctgggctattccagacacagagcagagggacaggattcgccaggcccagaagaccattgtcaaggagacctacggggcctttctacagaagtttggcagcgtgcccttcaccaagaacccggagaagtacatcaagtacggggtggagcaggtgggcgacatgatcgatcgccttttcgacacctctgcctgagcctgctgctagccctgcctggttccaccagactggcgtgtcattggacagataaaccagtgttagcttgcctctgggctgggtgagcttgaagtcctctgggacagagacctgtctccacgcctccgggagctgtgtccctgagccccctagtcctggctcctgctttttccccacagcccgtgttcccagccgaaccagcactctcccggaagcctggggtccctccacaccttggcttttatgaccctgatggcttctgaaacaggaaaagagagaaggaagacagaggcctgtgcccactgctgctccatgtgtaccaagagcagcagggcagaagggccctccctccagcctaggtcagaggtggggacagagaactcccctacagcccagagatgtggcagggctcagagaagcagccagagctcctggaggaaaggcagtcgggactgaccccctctcttaaaacacattcccgcccgcccacaggcctgaggtctgggacacttgcacgctgcccacatccagattcctgcaaagacgaattgggtgcacagcaccccaaccacatacacgaggaagaagatgcggtcagcagtctcaggccagcttctctgtgacccctttactcctctggagggctctgtggggagagatacagggaaaggagctgttcttcaaggtcccctcaacatgagcggaagagcgaaccccaggggtcatcagcctgtatcgcttcctttcttagattctcagctgatgaaaatttgggtctggcccatttcaggccatcttcagttgaagaaacaccctcttaggctgtgcaaggcatgggttatcaggggattgaggtcacctgggacttcagggaggctcagcttgctccctgccccagacctgtttcttctaagggaggaggacatggtggagaccagggacaggagagccagcagggtggatgcaaggggcctctacccacacctggacctccgtgccctcaccccagccctaggtgtgcacctaggcctcattccttaccccccagcccctgcccaccttcagcaggatgaggccctgggttgccgtgctctcgctgttcccctctcggggctgggctggggccgctcttggccccaaggttgccccgggccagcagcccagccagcagcacagtctctatggtgctgaggaagagcagcagcagcaggatggtgaagtagtaaactgggggaggcagggcacagggagatgctcaggggccagtccctgtgtctctggtgcccagcgagctgagcaccagtgggtgaccggggagaaacagggcagactgggtaagggagcagggcttactgagcagtgggttgcaggaggaggagctgggcagggcctgcaccagggaggagtggaggacgaggtaactcagcagcaatgtcaccttgtagcctatgcgctcaatggcccggaggggcagcaaccccccgcacacgtcagccaacagcagtgcctctgcaggcaccaagagagcgatgatggacttgagcgccgtgttcttcagcctcagctggaaggggaaaagtcagggccttcccggcgggggggaaggaggtgggcatcgggggcatggggcctggcctctggccgtgcatcctcactcccacccgcctccagcagccctctgtcggcctcctcgcgacttgactcaccgtcacctggaagcagggcaccagctgctggggtgggacttgggtcttcagatcataaactacgtattccctcttgacactcacaatctcgttcaccacgtgggcctggaactctaactccatcgctgaggggtgggaatgagaactatgaaccaggaaggagagatcccagctgccaagtctgggggtagcagactggagcccaggggtgatggagacttttgatggcttttggcagggacagacttggacacaaaaccgatccatagaagggcttcccaaaccttgttttgcaacatcccaaattgtctccagttgaaggaaggcctttatcagattcatagatgagctttcattgtaaaaataaatgtactttgcaccacttcaagat

SEQ ID NO: 405214 - DNA, 4278 bp, Homo sapiens
cgggggcccggtgggcccgcggaggaaagatactggggagtgggagccgcggggttcagagcgatgattcccccacaggaggcatccgctcgacggcgggagattgaggacaagctgaagcaggaggaggagactctgtccttcatccgagacagcctggagaagagcgaccagctcactaagaacatggtgtctatcttatcatcctttgagagccgccttatgaagctggagaactccatcatccctgtgcacaagcagacggagaatctgcagcggctgcaggagaatgttgagaagacgctgtcctgcctggaccatgtcatcagctactaccatgtggccagtgacactgagaagatcatcagagagggccccacaggtaggctggaagagtacctgggaagcatggccaagattcagaaggcagtggagtatttccaggacaacagcccagacagcccggaactcaacaaagtgaaactgctctttgagcgcgggaaggaggccctggagtccgaatttcgcagcctgatgacgcggcacagtaaggtcgtctcgcccgtgctcatcttggatctgatcagtggtgacgatgatctggaggcccaggaggacgtgaccctggagcacctgcccgagagcgtgctccaggatgtcattcgcatctcccgctggctggtggaatatggccgcaaccaagatttcatgaacgtctactaccagatacgctccagccagctggaccgctccatcaaaggactgaaggagcatttccataagagcagttcttcctctggggttccctactcccctgctatccccaacaagaggaaagacacacctaccaagaagccagtcaagcggccagggagagatgacatgctggacgtggagaccgatgcctacatccactgcgtcagtgccttcgtcaagctggcgcagagcgagtaccagctgctggccgacatcatccccgagcaccaccagaagaagaccttcgactccctgatacaggatgccctggatgggctgatgcttgaaggggagaacatcgtgtctgctgcccggaaggccattgtgcgacacgacttctccacggtgctcaccgtcttccccatcctgcgacacctcaagcagaccaagcctgagtttgaccaggtgctccagggcacggctgccagcacaaagaacaagctgcctggcctcatcacatccatggagaccatcggtgccaaagcgctggaggacttcgcagacaacatcaagaatgacccggacaaggagtacaacatgccgaaggacggcaccgtacacgagctcaccagcaatgccatcctcttcctgcagcagcttttggacttccaggagacggcaggcgccatgctggcctcccaagagaccagctcttcggccaccagctacagctctgagttcagcaagcggctgctaagcacctatatctgtaaagtgctgggcaacctgcagttgaacttgctgagcaagtccaaggtgtacgaggacccagctctgagcgccatcttcctgcacaacaactacaattacatcctcaagtccctggagaagtctgaactgatccagctggtggcagtgacacagaagactgctgagcgctcctaccgggagcacattgagcagcagatccagacctaccagcgcagctggttaaaggtgactgattacatcgcagagaagaatctacctgtgttccagccgggagtcaagctccgggacaaggagcggcagattatcaaggagcgttttaagggcttcaatgatggcctcgaagaactgtgcaaaatccagaaggcctgggctattccagacacagagcagagggacaggattcgccaggcccagaagaccattgtcaaggagacctacggggcctttctacagaagtttggcagcgtgcccttcaccaagaacccggagaagtacatcaagtacggggtggagcaggtgggcgacatgatcgatcgccttttcgacacctctgcctgagcctgctgctagccctgcctggttccaccagactggcgtgtcattggacagataaaccagtgttagcttgcctctgggctgggtgagcttgaagtcctctgggacagagacctgtctccacgcctccgggagctgtgtccctgagccccctagtcctggctcctgctttttccccacagcccgtgttcccagccgaaccagcactctcccggaagcctggggtccctccacaccttggcttttatgaccctgatggcttctgaaacaggaaaagagagaaggaagacagaggcctgtgcccactgctgctccatgtgtaccaagagcagcagggcagaagggccctccctccagcctaggtcagaggtggggacagagaactcccctacagcccagagatgtggcagggctcagagaagcagccagagctcctggaggaaaggcagtcgggactgaccccctctcttaaaacacattcccgcccgcccacaggcctgaggtctgggacctttccctcccaggagtcccctaggtggctgggggaggcaggctcactggccattttccctagagtccagcacactgcaggaggcgttcggaggaggagttccgccccaccctctacagccttcctcaggcccctgtctctggtccccagcctcagtgcctcttggcccagggccaggcagtcgtggttgcagaaggagcaattaggctgcctgcctgtgggctgggagacagggacaatggggaaaagttaaggagcaaaatgggggttggaagcaaaaaatagggccccacctatttaggacgagattgaagactgacccttgaggcacacttgcactggagatgggtttatttcacgctctgtgcttgtgtgctagcggagggagagctcagggtggcttaatccagaggccctgtcatggcccgcccccagccatgggaaagcaaacttcatcctaaggtgtgcagcccaggccctgcccctttacagtgggattgaggtcacctgggacttcagggaggctcagcttgctccctgccccagacctgtttcttctaagggaggaggacatggtggagaccagggacaggagagccagcagggtggatgcaaggggcctctacccacacctggacctccgtgccctcaccccagccctaggtgtgcacctaggcctcattccttaccccccagcccctgcccaccttcagcaggatgaggccctgggttgccgtgctctcgctgttcccctctcggggctgggctggggccgctcttggccccaaggttgccccgggccagcagcccagccagcagcacagtctctatggtgctgaggaagagcagcagcagcaggatggtgaagtagtaaactgggggaggcagggcacagggagatgctcaggggccagtccctgtgtctctggtgcccagcgagctgagcaccagtgggtgaccggggagaaacagggcagactgggtaagggagcagggcttactgagcagtgggttgcaggaggaggagctgggcagggcctgcaccagggaggagtggaggacgaggtaactcagcagcaatgtcaccttgtagcctatgcgctcaatggcccggaggggcagcaaccccccgcacacgtcagccaacagcagtgcctctgcaggcaccaagagagcgatgatggacttgagcgccgtgttcttcagcctcagctggaaggggaaaagtcagggccttcccggcgggggggaaggaggtgggcatcgggggcatggggcctggcctctggccgtgcatcctcactcccacccgcctccagcagccctctgtcggcctcctcgcgacttgactcaccgtcacctggaagcagggcaccagctgctggggtgggacttgggtcttcagatcataaactacgtattccctcttgacactcacaatctcgttcaccacgtgggcctggaactctaactccatcgctgaggggtgggaatgagaactatgaaccaggaaggagagatcccagctgccaagtctgggggtagcagactggagcccaggggtgatggagacttttgatggcttttggcagggacagacttggacacaaaaccgatccatagaagggcttcccaaaccttgttttgcaacatcccaaattgtctccagttgaaggaaggcctttatcagattcatagatgagctttcattgtaaaaataaatgtactttgcaccacttcaagat

SEQ ID NO: 405215 - DNA, 3202 bp, Homo sapiens
  misc_feature (3202)..(3202): n is a, c, g, or t
cgggggcccggtgggcccgcggaggaaagatactggggagtgggagccgcggggttcagagcgatgattcccccacaggaggcatccgctcgacggcgggagattgaggacaagctgaagcaggaggaggagactctgtccttcatccgagacagcctggagaagagcgaccagctcactaagaacatggtgtctatcttatcatcctttgagagccgccttatgaagctggagaactccatcatccctgtgcacaagcagacggagaatctgcagcggctgcaggagaatgttgagaagacgctgtcctgcctggaccatgtcatcagctactaccatgtggccagtgacactgagaagatcatcagagagggccccacaggtaggctggaagagtacctgggaagcatggccaagattcagaaggcagtggagtatttccaggacaacagcccagacagcccggaactcaacaaagtgaaactgctctttgagcgcgggaaggaggccctggagtccgaatttcgcagcctgatgacgcggcacagtaaggtcgtctcgcccgtgctcatcttggatctgatcagtggtgacgatgatctggaggcccaggaggacgtgaccctggagcacctgcccgagagcgtgctccaggatgtcattcgcatctcccgctggctggtggaatatggccgcaaccaagatttcatgaacgtctactaccagatacgctccagccagctggaccgctccatcaaaggactgaaggagcatttccataagagcagttcttcctctggggttccctactcccctgctatccccaacaagaggaaagacacacctaccaagaagccagtcaagcggccagggagagatgacatgctggacgtggagaccgatgcctacatccactgcgtcagtgccttcgtcaagctggcgcagagcgagtaccagctgctggccgacatcatccccgagcaccaccagaagaagaccttcgactccctgatacaggatgccctggatgggctgatgcttgaaggggagaacatcgtgtctgctgcccggaaggccattgtgcgacacgacttctccacggtgctcaccgtcttccccatcctgcgacacctcaagcagaccaagcctgagtttgaccaggtgctccagggcacggctgccagcacaaagaacaagctgcctggcctcatcacatccatggagaccatcggtgccaaagcgctggaggacttcgcagacaacatcaagaatgacccggacaaggagtacaacatgccgaaggacggcaccgtacacgagctcaccagcaatgccatcctcttcctgcagcagcttttggacttccaggagacggcaggcgccatgctggcctcccaagagaccagctcttcggccaccagctacagctctgagttcagcaagcggctgctaagcacctatatctgtaaagtgctgggcaacctgcagttgaacttgctgagcaagtccaaggtgtacgaggacccagctctgagcgccatcttcctgcacaacaactacaattacatcctcaagtccctggagaagtctgaactgatccagctggtggcagtgacacagaagactgctgagcgctcctaccgggagcacattgagcagcagatccagacctaccagcgcagctggttaaaggtgactgattacatcgcagagaagaatctacctgtgttccagccgggagtcaagctccgggacaaggagcggcagattatcaaggagcgttttaagggcttcaatgatggcctcgaagaactgtgcaaaatccagaaggcctgggctattccagacacagagcagagggacaggattcgccaggcccagaagaccattgtcaaggagacctacggggcctttctacagaagtttggcagcgtgcccttcaccaagaacccggagaagtacatcaagtacggggtggagcaggtgggcgacatgatcgatcgccttttcgacacctctgcctgagcctgctgctagccctgcctggttccaccagactggcgtgtcattggacagataaaccagtgttagcttgaaaaaaaaaaaaaaaaaaaaaaaaaaaaaaaaaaaaaaaaaaaaaaaaaaaggggcgcgcgccgcccaaaaaatctctcccccggggaggccccagcagcgtgtctcccgcccacccacacacaattattgtgtgagaacaaagaggagggccccactaaaagggagagaggcagatataatatacagacatgacagagagggggcgcagccgggataaacacaacaagcagccaggaaagacaggaagaaaaaagcggcgaaaacaacgcgaggagagcacctatcggaggcgagagagaaccaccatataacggagcgggggcgcagcaacaaaacggggcgcaacaaacaccacccctcagagagaaaatataaaaaacaccacacgaggcagccacccaacaagacaactcgcgaacgagccgggcaaacacacccgcgccgggggaataaaaaccaagaaaaacgagagcaagcaaataaaacgccacacacgcggcggcaagcacagaacgagaaagaatcgggacggggacacacacgccgggagagtcaaaggcgatccagcggagagcacaacactttttctaacaaccaccgagggagggccgcagctcggagaaacaacgcggggtcgggcaagcatgcagcagcggaagcacgcgcagagcgaggggacgcacgcgacgaatgaaggggggaggtcaggagacgaggcgagaagggggggagggcagcaagcgggggaagggcggcggagagagaggaggagctaggcacgggacggacgggaagggcagcgaggagtcaacgccaaggagcagcagagagaacggcagacacgaggagagaaaggagaagcaagaagaaagagaagaaggacgaacagcgggggcaggccagagacgaaacaagacgccagacgatagaaagcgaaagggcaaggaaggaggagagaacaaaaagcaaaggagaaaagaaaaagaaaaggaccgagaacacaaaaagcgggagagagccagacgagagggacagaggggggcgcggagaagaaaacggcagaagaaagaagacacgaagacagccagaagagaagagacaaagn

SEQ ID NO: 405216 - DNA, 1706 bp, Homo sapiens
cgggggcccggtgggcccgcggaggaaagatactggggagtgggagccgcggggttcagagcgatgattcccccacaggaggcatccgctcgacggcgggagattgaggacaagctgaagcaggaggaggagactctgtccttcatccgagacagcctggagaagagcgaccagctcactaagaacatggtgtctatcttatcatcctttgagagccgccttatgaagctggagaactccatcatccctgtgcacaagcagacggagaatctgcagcggctgcaggagaatgttgagaagacgctgtcctgcctggaccatgtcatcagctactaccatgtggccagtgacactgagaagatcatcagagagggccccacaggtaggctggaagagtacctgggaagcatggccaagattcagaaggcagtggagtatttccaggacaacagcccagacagcccggaactcaacaaagtgaaactgctctttgagcgcgggaaggaggccctggagtccgaatttcgcagcctgatgacgcggcacagtaaggtcgtctcgcccgtgctcatcttggatctgatcagtggtgacgatgatctggaggcccaggaggacgtgaccctggagcacctgcccgagagcgtgctccaggatgtcattcgcatctcccgctggctggtggaatatggccgcaaccaagatttcatgaacgtctactaccagatacgctccagccagctggaccgctccatcaaaggactgaaggagcatttccataagagcagttcttcctctggggttccctactcccctgctatccccaacaagaggaaagacacacctaccaagaagccagtcaagcggccagggagagatgacatgctggacgtggagaccgatgcctacatccactgcgtcagtgccttcgtcaagctggcgcagagcgagtaccagctgctggccgacatcatccccgagcaccaccagaagaagaccttcgactccctgatacaggatgccctggatgggctgatgcttgaaggggagaacatcgtgtctgctgcccggaaggccattgtgcgacacgacttctccacggtgctcaccgtcttccccatcctgcgacacctcaagcagaccaagcctgagtttgaccaggtgctccagggcacggctgccagcacaaagaacaagctgcctggcctcatcacatccatggagaccatcggtgccaaagcgctggaggacttcgcagacaacatcaagaatgacccggacaaggagtacaacatgccgaaggacggcaccgtacacgagctcaccagcaatgccatcctcttcctgcagcagcttttggacttccaggagacggcaggcgccatgctggcctcccaagagaccagctcttcggccaccagctacagctctgagttcagcaagcggctgctaagcacctatatctgtaaagtgctgggcaacctgcagttgaacttgctgagcaagtccaaggtgtacgaggacccagctctgagcgccatcttcctgcacaacaactacaattacatcctcaagtccctggagaagtctgaactgatccagctggtggcagtgacacagaagactgctgagcgctcctaccgggagcacattgagcagccacctgtgttccagccgggagtcaagctccgggacaaggagcggca

SEQ ID NO: 405217 - DNA, 1394 bp, Homo sapiens
  misc_feature (1387)..(1387): n is a, c, g, or t
cgggggcccggtgggcccgcggaggaaagatactggggagtgggagccgcggggttcagagcgatgattcccccacaggaggcatccgctcgacggcgggagattgaggacaagctgaagcaggaggaggagactctgtccttcatccgagacagcctggagaagagcgaccagctcactaagaacatggtgtctatcttatcatcctttgagagccgccttatgaagctggagaactccatcatccctgtgcacaagcagacggagaatctgcagcggctgcaggagaatgttgagaagacgctgtcctgcctggaccatgtcatcagctactaccatgtggccagtgacactgagaagatcatcagagagggccccacaggtaggctggaagagtacctgggaagcatggccaagattcagaaggcagtggagtatttccaggacaacagcccagacagcccggaactcaacaaagtgaaactgctctttgagcgcgggaaggaggccctggagtccgaatttcgcagcctgatgacgcggcacagtaaggtcgtctcgcccgtgctcatcttggatctgatcagtggtgacgatgatctggaggcccaggaggacgtgaccctggagcacctgcccgagagcgtgctccaggatgtcattcgcatctcccgctggctggtggaatatggccgcaaccaagatttcatgaacgtctactaccagatacgctccagccagctggaccgctccatcaaaggactgaaggagcatttccataagagcagttcttcctctggggttccctactcccctgctatccccaacaagaggaaagacacacctaccaagaagccagtcaagcggccagggagagatgacatgctggacgtggagaccgatgcctacatccactgcgtcagtgccttcgtcaagctggcgcagagcgagtaccagctgctggccgacatcatccccgagcaccaccagaagaagaccttcgactccctgatacaggatgccctggatgggctgatgcttgaaggggagaacatcgtgtctgctgcccggaaggccattgtgcgacacgacttctccacggtgctcaccgtcttccccatcctgcgacacctcaagcagaccaagcctgagtttgaccaggtgctccagggcacggctgccagcacaaagaacaagctgcctggcctcatcacatccatggagaccatcggtgccaaagcgctggaggacttcgcagacaacatcaagaatgacccggacaaggagtacaacatgccgaaggacggcaccgtacacgagctcaccagcaatgccatcctcttcctgcagcagtcgacgcggccgcgaatttagtagtagtagtagncggccgc

SEQ ID NO: 405218 - DNA, 1187 bp, Homo sapiens
cgggggcccggtgggcccgcggaggaaagatactggggagtgggagccgcggggttcagagcgatgattcccccacaggaggcatccgctcgacggcgggagattgaggacaagctgaagcaggaggaggagactctgtccttcatccgagacagcctggagaagagcgaccagctcactaagaacatggtgtctatcttatcatcctttgagagccgccttatgaagctggagaactccatcatccctgtgcacaagcagacggagaatctgcagcggctgcaggagaatgttgagaagacgctgtcctgcctggaccatgtcatcagctactaccatgtggccagtgacactgagaagatcatcagagagggccccacaggtaggctggaagagtacctgggaagcatggccaagattcagaaggcagtggagtatttccaggacaacagcccagacagcccggaactcaacaaagtgaaactgctctttgagcgcgggaaggaggccctggagtccgaatttcgcagcctgatgacgcggcacagtaaggtcgtctcgcccgtgctcatcttggatctgatcagtggtgacgatgatctggaggcccaggaggacgtgaccctggagcacctgcccgagagcgtgctccaggatgtcattcgcatctcccgctggctggtggaatatggccgcaaccaagatttcatgaacgtctactaccagatacgctccagccagctggaccgctccatcaaaggactgaaggagcatttccataagagcagttcttcctctggggttccctactcccctgctatccccaacaagaggaaagacacacctaccaagaagccagtcaagcggccagggagagatgacatgctggacgtggagaccgatgcctacatccactgcgtcagtgccttcgtcaagctggcgcagagcgagtaccagctgctggccgacatcatccccgagcaccaccagaagaagaccttcgactccctgatacaggatgccctggatgggctgatgcttgaaggggagaacatcgtgtctgctgcccggaaggccattgtgcgacacgacttctccacggtgctcaccgtcttccccatcctaagggcatcctgtatacagggagtcgaagtcttcttctgggggatactctagaacgccaccca

SEQ ID NO: 405219 - DNA, 1005 bp, Homo sapiens
cgggggcccggtgggcccgcggaggaaagatactggggagtgggagccgcggggttcagagcgatgattcccccacaggaggcatccgctcgacggcgggagattgaggacaagctgaagcaggaggaggagactctgtccttcatccgagacagcctggagaagagcgaccagctcactaagaacatggtgtctatcttatcatcctttgagagccgccttatgaagctggagaactccatcatccctgtgcacaagcagacggagaatctgcagcggctgcaggagaatgttgagaagacgctgtcctgcctggaccatgtcatcagctactaccatgtggccagtgacactgagaagatcatcagagagggccccacaggtaggctggaagagtacctgggaagcatggccaagattcagaaggcagtggagtatttccaggacaacagcccagacagcccggaactcaacaaagtgaaactgctctttgagcgcgggaaggaggccctggagtccgaatttcgcagcctgatgacgcggcacagtaaggtcgtctcgcccgtgctcatcttggatctgatcagtggtgacgatgatctggaggcccaggaggacgtgaccctggagcacctgcccgagagcgtgctccaggatgtcattcgcatctcccgctggctggtggaatatggccgcaaccaagatttcatgaacgtctactaccagatacgctccagccagctggaccgctccatcaaaggactgaaggagcatttccataagagcagttcttcctctggggtagcagactggagcccaggggtgatggagacttttgatggcttttggcagggacagacttggacacaaaaccgatccatagaagggcttcccaaaccttgttttgcaacatcccaaattgtctccagttgaaggaaggcctttatcagattcatagatgagctttcattgtaaaaataaatgtactttgcaccacttcaagat

SEQ ID NO: 405220 - DNA, 718 bp, Homo sapiens
gcccgggctcgcctcacctccccgcctgcttaagccctcccggagcgctcggggttcgacccccgagcacggcgggaggagggcgcccccctgcggcacagccacgtccacgaagcccctcccggggttctagaaagcggaggcctccgaaggaaagaccaagatgcagagagatgtctaaaaggtgccagaaggtgactatccagccctggtatcactgcctggtgatttcgtttctttgatcttcacgaatggcctcactggctgtgatttggacagaaatcagctgccacgtgcaacattctcccatgggaacatgtgtccgcagtacctatctcagagcccaaatccttcctgccccacagccttctcctgggacctgccttgggaggcatccgctcgacggcgggagattgaggacaagctgaagcaggaggaggagactctgtccttcatccgagacagcctggagaagagcgaccagctcactaagaacatggtgtctatcttatcatcctttgagagccgccttatgaagctggagaattttgatggcttttggcagggacagacttggacacaaaaccgatccatagaagggcttcccaaaccttgttttgcaacatcccaaattgtctccagttgaaggaaggcctttatcagattcatagatgagctttcattgtaaaaataaatgtactttgcaccacttcaagat

SEQ ID NO: 405221 - DNA, 208 bp, Homo sapiens
gatactttttgtcgtgtctctgggaaaaagtggacaagcatccctctgggatcagagagcaaaggatgcatgtggccatcaggacacaggagacaggcccagaccaagggtgtttggggaagagtgggggaaggctgctctgctctgaagtgagctttctctgctatctctcctggcttcccagctccgggacaaggagcggcagatt

SEQ ID NO: 405222 - DNA, 708 bp, Homo sapiens
aggctggtcttgaaatcctggccctgtgatccacccaccttgatcttggctcactgcaacctgtgcttcccaggttcaagtgattcttctgattcagcctcctgaatagctgggattacaggtgtgtactaccacgaccagctaatttttgtatttttagtagagatggtgtttcaccatgttggaccaggctggtcttgaactcctgacctcaggtgatctgccctccttggcctcccaaagtgttgggattacaggcatgtgccatggcgcctggccccaagtttatttttaaattgttttatctgctgtttctcatgctataccagattttcttccccatggcttgctcctagagttcttttgtatcacatctgtatacctttttgggatttccagcatttgagatattaatcttaaattaatttggggggtttcaatcaattttagattgttcatggtaattgctagtgagcaaccaattaactctgttttattagtttcctcaatagcactatatgcagctgttgataaaataaatgtaaagttctaatttttgttttagctaaaggttgactgttagggataatatttatatttataggatccaattcatctttatcccgaaacggggactcgcttttttcccgcaactgggagtatccaccttaacttttgctccttggttgccacacccgcggttttgcg

SEQ ID NO: 405223 - DNA, 3675 bp, Homo sapiens
atgcgcgttcactccggcgcggagtgccggccggggcggggatacgccgtgtgcgcggccgggggcggaacggaggaggaggcggtggtgtcccggctgcggggtaggagtccgcggcagcctccgggtaagccaagcgccgcgcagtgctgagttcccgcacgccgcagagccatggagatcggcaccgagatcagccgcaagatccggagtgccattaaggggaaattacaagaattaggagcttatgttgatgaagaacttcctgattacattatggtgatggtggccaacaagaaaagtcaggaccaaatgacagaggatctgtccctgtttctagggaacaacacaattcgattcaccgtatggcttcatggtgtattagataaacttcgctctgttacaactgaaccctctagtctgaagtcttctgataccaacatctttgatagtaacgtgccttcaaacaagagcaatttcagtcggggagatgagaggaggcatgaagctgcagtgccaccacttgccattcctagcgcgagacctgaaaaaagagattccagagtttctacaagttcgcaggagtcaaaaaccacaaatgtcagacagacttacgatgatggagctgcaacccgactaatgtcaacagtgaaacctttgagggagccagcaccctctgaagatgtgattgatattaagccagaaccagatgatctcattgacgaagacctcaactttgtgcaggagaatcccttatctcagaaaaaacctacagtgacacttacatatggttcttctcgcccttctattgaaatttatcgaccacctgcaagtagaaatgcagatagtggtgttcatttaaacaggttgcaatttcaacagcagcagaatagtattcatgctgccaagcagcttgatatgcagagtagttgggtatatgaaacaggacgtttgtgtgaaccagaggtgcttaacagcttagaagaaacgtatagtccgttctttagaaacaactcggagaaaatgagtatggaggatgaaaactttcggaagagaaagttgcctgtggtaagttcagttgttaaagtaaaaaaattcaatcatgatggagaagaggaggaagaagatgatgattacgggtctcgaacaggaagcatctccagcagtgtgtctgtgcctgcaaagcctgaaaggagaccttctcttccaccttctaaacaagctaacaagaatctgattttgaaggctatatctgaagctcaagaatccgtaacaaaaacaactaactactctacagttccacagaaacagacacttccagttgctcccagaactcgaacttctcaagaagaattgctagcagaagtggtccagggacaaagtaggacccccagaataagtccccccattaaagaagaggaaacaaaaggagattctgtagaaaaaaatcaagctgagatgagtgaactgagtgtggcacagaaaccagaaaaacttttggagcgctgcaagtactggcctgcttgtaaaaatggggatgagtgtgcctaccatcaccccatctcaccctgcaaagccttccccaattgtaaatttgctgaaaaatgtttgtttgttcacccaaattgtaaatatgatgcaaagtgtactaaaccagattgtcccttcactcatgtgagtagaagaattccagtactgtctccaaaaccagcagttgcaccaccagcaccaccttccagtagtcagctctgccgttacttccctgcttgtaagaagatggaatgtcccttctatcatccaaaacattgtaggtttaacactcaatgtacaagaccggactgcacattctaccatcccaccattaatgtcccaccacgacatgccttgaaatggattcgacctcaaaccagcgaatagcacccagtcctgcctggcagaagatcatgcagtttggaagttttcatgtactgatgaaagatactctacagaacttgtcaaatctttgaaacttggaatatattgctttcataatatgaagttttattgcctatctatctgaagtgtctaatttttcaagtttgtaagtttattatgtggttttaacattgggtgtttttgttttgtttttactatgaaaagacagcttaaggaagagctaaattctgttaaaatatttggggcatgtttgtgcactgctgttgtgaggatcagcatatgaaattgacatcatggttagtcatggtactgcagcttagggggctacacggttgctgtgtgagtggagagatgcagtgaggcagttgtcattattctaaaaattgtactactttcacttttcccaaagattatataatgttcataatccaccatgaaaacagcattggccaaaggtactgaggctgcttaaaatattcaattctgctttttaatttttaagtgaatttagtttgaaaagcatgattatacaggcctctcaggctgagtgctactttggtaaagttcccagttttcctgccttctgtgacaggatgaatgaggtgggtatggacagtggaggcagctggaatggcaagtgcagaaaataggaacagttctatacagtgctctcatttactaataacataatgccttctaaataatttttttgggaaactacattatcacaaaattatacaaatttttttacaagtatttacatactgtatctgaaaacagactttaaagtcacaagattataaatgtacatatgtattctcacattctgaaaaataacattctcagaatccacagaaaatatacttagttactactgaagataatttttgaaatgtaaaaattagatttaaatagtatattttaaatgacagaactataattacagagatcagatcagataggtaaactgcaagatagataggatgaaacttttggcctactgtattacttacagagtttttttgtgtgtggtttttaaaactgttaaggcaagaagtgtcaaatgctttagagttaaataacagatcactgatttcaaagacttggtgtatagtgttaaaaattaaagcttaaaaggtggttagaaaagtggattaatgcaaaaggggtaataaagactgcaacattctcaggaccaaattaaactgctaaaaaaaaaaaaaaagttcattgacttgcttagtcgtatactcaaatgatgataaacctacatgtgcaaaggctcacgtttaagattgtcaagccagcagtctactgttgtgttgccattgcttttccattgggagaagaaagaattaaccagtcattaaaccatttggtaagttgcactttgctgtgctgatcccacaggaaaggcttgaaacacgagaagcagcaaagacagagcacacaagtgcataaggctgttgtcttcggcttgggtgaaatgacagttcctcttcattctaaaggtttactccattgaatttaaggcatttgttcattccagtgttgagatgctttgcatctctgcagaagaaatttattttaaattgtttaaatatctggaaatacttttagctatcatttataaagatagttttgttctcagtttcactataaattatagaacaaatgggaaacaagggtttaatttagttcagccattttacaaggaaataataaaatactaaaatctga

SEQ ID NO: 405224 - DNA, 4143 bp, Homo sapiens
atgcgcgttcactccggcgcggagtgccggccggggcggggatacgccgtgtgcgcggccgggggcggaacggaggaggaggcggtggtgtcccggctgcggggtaggagtccgcggcagcctccgggtaagccaagcgccgcgcagtgctgagttcccgcacgccgcagagccatggagatcggcaccgagatcagccgcaagatccggagtgccattaaggggaaattacaagaattaggagcttatgttgatgaagaacttcctgattacattatggtgatggtggccaacaagaaaagtcaggaccaaatgacagaggatctgtccctgtttctagggaacaacacaattcgattcaccgtatggcttcatggtgtattagataaacttcgctctgttacaactgaaccctctagtctgaagtcttctgataccaacatctttgatagtaacgtgccttcaaacaagagcaatttcagtcggggagatgagaggaggcatgaagctgcagtgccaccacttgccattcctagcgcgagacctgaaaaaagagattccagagtttctacaagttcgcaggagtcaaaaaccacaaatgtcagacagacttacgatgatggagctgcaacccgactaatgtcaacagtgaaacctttgagggagccagcaccctctgaagatgtgattgatattaagccagaaccagatgatctcattgacgaagacctcaactttgtgcaggagaatcccttatctcagaaaaaacctacagtgacacttacatatggttcttctcgcccttctattgaaatttatcgaccacctgcaagtagaaatgcagatagtggtgttcatttaaacaggttgcaatttcaacagcagcagaatagtattcatgctgccaagcagcttgatatgcagagtagttgggtatatgaaacaggacgtttgtgtgaaccagaggtgcttaacagcttagaagaaacgtatagtccgttctttagaaacaactcggagaaaatgagtatggaggatgaaaactttcggaagagaaagttgcctgtggtaagttcagttgttaaagtaaaaaaattcaatcatgatggagaagaggaggaagaagatgatgattacgggtctcgaacaggaagcatctccagcagtgtgtctgtgcctgcaaagcctgaaaggagaccttctcttccaccttctaaacaagctaacaagaatctgattttgaaggctatatctgaagctcaagaatccgtaacaaaaacaactaactactctacagttccacagaaacagacacttccagttgctcccagaactcgaacttctcaagaagaattgctagcagaagtggtccagggacaaagtaggacccccagaataagtccccccattaaagaagaggaaacaaaaggagattctgtagaaaaaaatcaaggaactcaacagaggcaattattatcccgactgcaaatcgacccagtaatggcagaaactctgcagatgagtcaagattactatgacatggaatccatggtccatgcagacacaagatcatttattctgaagaagccaaagctgtctgaggaagtagtagtggcaccaaaccaagagtcggggatgaagactgcagattcccttcgggtactttcaggacaccttatgcagacacgagatcttgtacaaccagataaacctgcaagtcccaagtttatagtgacgctggatggtgtccccagccccccaggatacatgtcagatcaagaggaggacatgtgctttgaaggaatgaaacccgtaaaccaaactgcagcctcaaacaagggactcagaggtctcctccacccacagcagttgcacttgctgagcaggcagcttgaggacccaaatggtagcttttctaacgctgagatgagtgaactgagtgtggcacagaaaccagaaaaacttttggagcgctgcaagtactggcctgcttgtaaaaatggggatgagtgtgcctaccatcaccccatctcaccctgcaaagccttccccaattgtaaatttgctgaaaaatgtttgtttgttcacccaaattgtaaatatgatgcaaagtgtactaaaccagattgtcccttcactcatgtgagtagaagaattccagtactgtctccaaaaccagcagttgcaccaccagcaccaccttccagtagtcagctctgccgttacttccctgcttgtaagaagatggaatgtcccttctatcatccaaaacattgtaggtttaacactcaatgtacaagaccggactgcacattctaccatcccaccattaatgtcccaccacgacatgccttgaaatggattcgacctcaaaccagcgaatagcacccagtcctgcctggcagaagatcatgcagtttggaagttttcatgtactgatgaaagatactctacagaacttgtcaaatctttgaaacttggaatatattgctttcataatatgaagttttattgcctatctatctgaagtgtctaatttttcaagtttgtaagtttattatgtggttttaacattgggtgtttttgttttgtttttactatgaaaagacagcttaaggaagagctaaattctgttaaaatatttggggcatgtttgtgcactgctgttgtgaggatcagcatatgaaattgacatcatggttagtcatggtactgcagcttagggggctacacggttgctgtgtgagtggagagatgcagtgaggcagttgtcattattctaaaaattgtactactttcacttttcccaaagattatataatgttcataatccaccatgaaaacagcattggccaaaggtactgaggctgcttaaaatattcaattctgctttttaatttttaagtgaatttagtttgaaaagcatgattatacaggcctctcaggctgagtgctactttggtaaagttcccagttttcctgccttctgtgacaggatgaatgaggtgggtatggacagtggaggcagctggaatggcaagtgcagaaaataggaacagttctatacagtgctctcatttactaataacataatgccttctaaataatttttttgggaaactacattatcacaaaattatacaaatttttttacaagtatttacatactgtatctgaaaacagactttaaagtcacaagattataaatgtacatatgtattctcacattctgaaaaataacattctcagaatccacagaaaatatacttagttactactgaagataatttttgaaatgtaaaaattagatttaaatagtatattttaaatgacagaactataattacagagatcagatcagataggtaaactgcaagatagataggatgaaacttttggcctactgtattacttacagagtttttttgtgtgtggtttttaaaactgttaaggcaagaagtgtcaaatgctttagagttaaataacagatcactgatttcaaagacttggtgtatagtgttaaaaattaaagcttaaaaggtggttagaaaagtggattaatgcaaaaggggtaataaagactgcaacattctcaggaccaaattaaactgctaaaaaaaaaaaaaaagttcattgacttgcttagtcgtatactcaaatgatgataaacctacatgtgcaaaggctcacgtttaagattgtcaagccagcagtctactgttgtgttgccattgcttttccattgggagaagaaagaattaaccagtcattaaaccatttggtaagttgcactttgctgtgctgatcccacaggaaaggcttgaaacacgagaagcagcaaagacagagcacacaagtgcataaggctgttgtcttcggcttgggtgaaatgacagttcctcttcattctaaaggtttactccattgaatttaaggcatttgttcattccagtgttgagatgctttgcatctctgcagaagaaatttattttaaattgtttaaatatctggaaatacttttagctatcatttataaagatagttttgttctcagtttcactataaattatagaacaaatgggaaacaagggtttaatttagttcagccattttacaaggaaataataaaatactaaaatctga

SEQ ID NO: 405225 - DNA, 4068 bp, Homo sapiens
atgcgcgttcactccggcgcggagtgccggccggggcggggatacgccgtgtgcgcggccgggggcggaacggaggaggaggcggtggtgtcccggctgcggggtaggagtccgcggcagcctccgggtaagccaagcgccgcgcagtgctgagttcccgcacgccgcagagccatggagatcggcaccgagatcagccgcaagatccggagtgccattaaggggaaattacaagaattaggagcttatgttgatgaagaacttcctgattacattatggtgatggtggccaacaagaaaagtcaggaccaaatgacagaggatctgtccctgtttctagggaacaacacaattcgattcaccgtatggcttcatggtgtattagataaacttcgctctgttacaactgaaccctctagtctgaagtcttctgataccaacatctttgatagtaacgtgccttcaaacaagagcaatttcagtcggggagatgagaggaggcatgaagctgcagtgccaccacttgccattcctagcgcgagacctgaaaaaagagattccagagtttctacaagttcgcaggagtcaaaaaccacaaatgtcagacagacttacgatgatggagctgcaacccgactaatgtcaacagtgaaacctttgagggagccagcaccctctgaagatgtgattgatattaagccagaaccagatgatctcattgacgaagacctcaactttgtgcaggagaatcccttatctcagaaaaaacctacagtgacacttacatatggttcttctcgcccttctattgaaatttatcgaccacctgcaagtagaaatgcagatagtggtgttcatttaaacaggttgcaatttcaacagcagcagaatagtattcatgctgccaagcagcttgatatgcagagtagttgggtatatgaaacaggacgtttgtgtgaaccagaggtgcttaacagcttagaagaaacgtatagtccgttctttagaaacaactcggagaaaatgagtatggaggatgaaaactttcggaagagaaagttgcctgtggtaagttcagttgttaaagtaaaaaaattcaatcatgatggagaagaggaggaagaagatgatgattacgggtctcgaacaggaagcatctccagcagtgtgtctgtgcctgcaaagcctgaaaggagaccttctcttccaccttctaaacaagctaacaagaatctgattttgaaggctatatctgaagctcaagaatccgtaacaaaaacaactaactactctacagttccacagaaacagacacttccagttgctcccagaactcgaacttctcaagaagaattgctagcagaagtggtccagggacaaagtaggacccccagaataagtccccccattaaagaagaggaaacaaaaggagattctgtagaaaaaaatcaagattactatgacatggaatccatggtccatgcagacacaagatcatttattctgaagaagccaaagctgtctgaggaagtagtagtggcaccaaaccaagagtcggggatgaagactgcagattcccttcgggtactttcaggacaccttatgcagacacgagatcttgtacaaccagataaacctgcaagtcccaagtttatagtgacgctggatggtgtccccagccccccaggatacatgtcagatcaagaggaggacatgtgctttgaaggaatgaaacccgtaaaccaaactgcagcctcaaacaagggactcagaggtctcctccacccacagcagttgcacttgctgagcaggcagcttgaggacccaaatggtagcttttctaacgctgagatgagtgaactgagtgtggcacagaaaccagaaaaacttttggagcgctgcaagtactggcctgcttgtaaaaatggggatgagtgtgcctaccatcaccccatctcaccctgcaaagccttccccaattgtaaatttgctgaaaaatgtttgtttgttcacccaaattgtaaatatgatgcaaagtgtactaaaccagattgtcccttcactcatgtgagtagaagaattccagtactgtctccaaaaccagcagttgcaccaccagcaccaccttccagtagtcagctctgccgttacttccctgcttgtaagaagatggaatgtcccttctatcatccaaaacattgtaggtttaacactcaatgtacaagaccggactgcacattctaccatcccaccattaatgtcccaccacgacatgccttgaaatggattcgacctcaaaccagcgaatagcacccagtcctgcctggcagaagatcatgcagtttggaagttttcatgtactgatgaaagatactctacagaacttgtcaaatctttgaaacttggaatatattgctttcataatatgaagttttattgcctatctatctgaagtgtctaatttttcaagtttgtaagtttattatgtggttttaacattgggtgtttttgttttgtttttactatgaaaagacagcttaaggaagagctaaattctgttaaaatatttggggcatgtttgtgcactgctgttgtgaggatcagcatatgaaattgacatcatggttagtcatggtactgcagcttagggggctacacggttgctgtgtgagtggagagatgcagtgaggcagttgtcattattctaaaaattgtactactttcacttttcccaaagattatataatgttcataatccaccatgaaaacagcattggccaaaggtactgaggctgcttaaaatattcaattctgctttttaatttttaagtgaatttagtttgaaaagcatgattatacaggcctctcaggctgagtgctactttggtaaagttcccagttttcctgccttctgtgacaggatgaatgaggtgggtatggacagtggaggcagctggaatggcaagtgcagaaaataggaacagttctatacagtgctctcatttactaataacataatgccttctaaataatttttttgggaaactacattatcacaaaattatacaaatttttttacaagtatttacatactgtatctgaaaacagactttaaagtcacaagattataaatgtacatatgtattctcacattctgaaaaataacattctcagaatccacagaaaatatacttagttactactgaagataatttttgaaatgtaaaaattagatttaaatagtatattttaaatgacagaactataattacagagatcagatcagataggtaaactgcaagatagataggatgaaacttttggcctactgtattacttacagagtttttttgtgtgtggtttttaaaactgttaaggcaagaagtgtcaaatgctttagagttaaataacagatcactgatttcaaagacttggtgtatagtgttaaaaattaaagcttaaaaggtggttagaaaagtggattaatgcaaaaggggtaataaagactgcaacattctcaggaccaaattaaactgctaaaaaaaaaaaaaaagttcattgacttgcttagtcgtatactcaaatgatgataaacctacatgtgcaaaggctcacgtttaagattgtcaagccagcagtctactgttgtgttgccattgcttttccattgggagaagaaagaattaaccagtcattaaaccatttggtaagttgcactttgctgtgctgatcccacaggaaaggcttgaaacacgagaagcagcaaagacagagcacacaagtgcataaggctgttgtcttcggcttgggtgaaatgacagttcctcttcattctaaaggtttactccattgaatttaaggcatttgttcattccagtgttgagatgctttgcatctctgcagaagaaatttattttaaattgtttaaatatctggaaatacttttagctatcatttataaagatagttttgttctcagtttcactataaattatagaacaaatgggaaacaagggtttaatttagttcagccattttacaaggaaataataaaatactaaaatctga

SEQ ID NO: 405226 - DNA, 4418 bp, Homo sapiens
atgcgcgttcactccggcgcggagtgccggccggggcggggatacgccgtgtgcgcggccgggggcggaacggaggaggaggcggtggtgtcccggctgcggggtaggagtccgcggcagcctccgggtaagccaagcgccgcgcagtgctgagttcccgcacgccgcagagccatggagatcggcaccgagatcagccgcaagatccggagtgccattaaggggaaattacaagaattaggagcttatgttgatgaagaacttcctgattacattatggtgatggtggccaacaagaaaagtcaggaccaaatgacagaggatctgtccctgtttctagggaacaacacaattcgattcaccgtatggcttcatggtgtattagataaacttcgctctgttacaactgaaccctctagtctgaagtcttctgataccaacatctttgatagtaacgtgccttcaaacaagagcaatttcagtcggggagatgagaggaggcatgaagctgcagtgccaccacttgccattcctagcgcgagacctgaaaaaagagattccagagtttctacaagttcgcaggagtcaaaaaccacaaatgtcagacagacttacgatgatggagctgcaacccgactaatgtcaacagtgaaacctttgagggagccagcaccctctgaagatgtgattgatattaagccagaaccagatgatctcattgacgaagacctcaactttgtgcaggagaatcccttatctcagaaaaaacctacagtgacacttacatatggttcttctcgcccttctattgaaatttatcgaccacctgcaagtagaaatgcagatagtggtgttcatttaaacaggttgcaatttcaacagcagcagaatagtattcatgctgccaagcagcttgatatgcagagtagttgggtatatgaaacaggacgtttgtgtgaaccagaggtgcttaacagcttagaagaaacgtatagtccgttctttagaaacaactcggagaaaatgagtatggaggatgaaaactttcggaagagaaagttgcctgtggtaagttcagttgttaaagtaaaaaaattcaatcatgatggagaagaggaggaagaagatgatgattacgggtctcgaacaggaagcatctccagcagtgtgtctgtgcctgcaaagcctgaaaggagaccttctcttccaccttctaaacaagctaacaagaatctgattttgaaggctatatctgaagctcaagaatccgtaacaaaaacaactaactactctacagttccacagaaacagacacttccagttgctcccagaactcgaacttctcaagaagaattgctagcagaagtggtccagggacaaagtaggacccccagaataagtccccccattaaagaagaggaaacaaaaggagattctgtagaaaaaaatcaaggaactcaacagaggcaattattatcccgactgcaaatcgacccagtaatggcagaaactctgcagatgagtcaagacacaagatcatttattctgaagaagccaaagctgtctgaggaagtagtagtggcaccaaaccaagagtcggggatgaagactgcagattcccttcgggtactttcaggacaccttatgcagacacgagatcttgtacaaccagataaacctgcaagtcccaagtttatagtgacgctggatggtgtccccagccccccaggatacatgtcagatcaagaggaggacatgtgctttgaaggaatgaaacccgtaaaccaaactgcagcctcaaacaagggactcagaggtctcctccacccacagcagttgcacttgctgagcaggcagcttgaggacccaaatggtagcttttctaacgctgagatgagtgaactgagtgtggcacagaaaccagaaaaacttttggagcgctgcaagtactggcctgcttgtaaaaatggggatgagtgtgcctaccatcaccccatctcaccctgcaaagccttccccaattgtaaatttgctgaaaaatgtttgtttgttcacccaaattgtaaatatgatgcaaagtgtactaaaccagattgtcccttcactcatgtgagtagaagaattccagtactgtctccaaaaccaggtgagtgagtgactgtgctactacatttgggtaaaaaatataaaatggcattttgtgactgtaaatggaattgaacaaacaaaagatggtttcagaaataattttggcaggatcagttaatccaaccagtctttaaagagcaagtgtgcctatctgtagtattccgaagtattttgactagtgaatatataaaccttaccattctaatttaaaaatggttttcactttcaaaaaaaacatcagtagactgcattaaaaatgggttttccaaacagattggagatcagtcctggtttttattttgttagcagttgcaccaccagcaccaccttccagtagtcagctctgccgttacttccctgcttgtaagaagatggaatgtcccttctatcatccaaaacattgtaggtttaacactcaatgtacaagaccggactgcacattctaccatcccaccattaatgtcccaccacgacatgccttgaaatggattcgacctcaaaccagcgaatagcacccagtcctgcctggcagaagatcatgcagtttggaagttttcatgtactgatgaaagatactctacagaacttgtcaaatctttgaaacttggaatatattgctttcataatatgaagttttattgcctatctatctgaagtgtctaatttttcaagtttgtaagtttattatgtggttttaacattgggtgtttttgttttgtttttactatgaaaagacagcttaaggaagagctaaattctgttaaaatatttggggcatgtttgtgcactgctgttgtgaggatcagcatatgaaattgacatcatggttagtcatggtactgcagcttagggggctacacggttgctgtgtgagtggagagatgcagtgaggcagttgtcattattctaaaaattgtactactttcacttttcccaaagattatataatgttcataatccaccatgaaaacagcattggccaaaggtactgaggctgcttaaaatattcaattctgctttttaatttttaagtgaatttagtttgaaaagcatgattatacaggcctctcaggctgagtgctactttggtaaagttcccagttttcctgccttctgtgacaggatgaatgaggtgggtatggacagtggaggcagctggaatggcaagtgcagaaaataggaacagttctatacagtgctctcatttactaataacataatgccttctaaataatttttttgggaaactacattatcacaaaattatacaaatttttttacaagtatttacatactgtatctgaaaacagactttaaagtcacaagattataaatgtacatatgtattctcacattctgaaaaataacattctcagaatccacagaaaatatacttagttactactgaagataatttttgaaatgtaaaaattagatttaaatagtatattttaaatgacagaactataattacagagatcagatcagataggtaaactgcaagatagataggatgaaacttttggcctactgtattacttacagagtttttttgtgtgtggtttttaaaactgttaaggcaagaagtgtcaaatgctttagagttaaataacagatcactgatttcaaagacttggtgtatagtgttaaaaattaaagcttaaaaggtggttagaaaagtggattaatgcaaaaggggtaataaagactgcaacattctcaggaccaaattaaactgctaaaaaaaaaaaaaaagttcattgacttgcttagtcgtatactcaaatgatgataaacctacatgtgcaaaggctcacgtttaagattgtcaagccagcagtctactgttgtgttgccattgcttttccattgggagaagaaagaattaaccagtcattaaaccatttggtaagttgcactttgctgtgctgatcccacaggaaaggcttgaaacacgagaagcagcaaagacagagcacacaagtgcataaggctgttgtcttcggcttgggtgaaatgacagttcctcttcattctaaaggtttactccattgaatttaaggcatttgttcattccagtgttgagatgctttgcatctctgcagaagaaatttattttaaattgtttaaatatctggaaatacttttagctatcatttataaagatagttttgttctcagtttcactataaattatagaacaaatgggaaacaagggtttaatttagttcagccattttacaaggaaataataaaatactaaaatctga

SEQ ID NO: 405227 - DNA, 3783 bp, Homo sapiens
atgcgcgttcactccggcgcggagtgccggccggggcggggatacgccgtgtgcgcggccgggggcggaacggaggaggaggcggtggtgtcccggctgcggggtaggagtccgcggcagcctccgggtaagccaagcgccgcgcagtgctgagttcccgcacgccgcagagccatggagatcggcaccgagatcagccgcaagatccggagtgccattaaggggaaattacaagaattaggagcttatgttgatgaagaacttcctgattacattatggtgatggtggccaacaagaaaagtcaggaccaaatgacagaggatctgtccctgtttctagggaacaacacaattcgattcaccgtatggcttcatggtgtattagataaacttcgctctgttacaactgaaccctctagtctgaagtcttctgataccaacatctttgatagtaacgtgccttcaaacaagagcaatttcagtcggggagatgagaggaggcatgaagctgcagtgccaccacttgccattcctagcgcgagacctgaaaaaagagattccagagtttctacaagttcgcaggagtcaaaaaccacaaatgtcagacagacttacgatgatggagctgcaacccgactaatgtcaacagtgaaacctttgagggagccagcaccctctgaagatgtgattgatattaagccagaaccagatgatctcattgacgaagacctcaactttgtgcaggagaatcccttatctcagaaaaaacctacagtgacacttacatatggttcttctcgcccttctattgaaatttatcgaccacctgcaagtagaaatgcagatagtggtgttcatttaaacaggttgcaatttcaacagcagcagaatagtattcatgctgccaagcagcttgatatgcagagtagttgggtatatgaaacaggacgtttgtgtgaaccagaggtgcttaacagcttagaagaaacgtatagtccgttctttagaaacaactcggagaaaatgagtatggaggatgaaaactttcggaagagaaagttgcctgtggtaagttcagttgttaaagtaaaaaaattcaatcatgatggagaagaggaggaagaagatgatgattacgggtctcgaacaggaagcatctccagcagtgtgtctgtgcctgcaaagcctgaaaggagaccttctcttccaccttctaaacaagctaacaagaatctgattttgaaggctatatctgaagctcaagaatccgtaacaaaaacaactaactactctacagttccacagaaacagacacttccagttgctcccagaactcgaacttctcaagaagaattgctagcagaagtggtccagggacaaagtaggacccccagaataagtccccccattaaagaagaggaaacaaaaggagattctgtagaaaaaaatcaaggaactcaacagaggcaattattatcccgactgcaaatcgacccagtaatggcagaaactctgcagatgagtcaagctgagatgagtgaactgagtgtggcacagaaaccagaaaaacttttggagcgctgcaagtactggcctgcttgtaaaaatggggatgagtgtgcctaccatcaccccatctcaccctgcaaagccttccccaattgtaaatttgctgaaaaatgtttgtttgttcacccaaattgtaaatatgatgcaaagtgtactaaaccagattgtcccttcactcatgtgagtagaagaattccagtactgtctccaaaaccagattggagatcagtcctggtttttattttgttagcagttgcaccaccagcaccaccttccagtagtcagctctgccgttacttccctgcttgtaagaagatggaatgtcccttctatcatccaaaacattgtaggtttaacactcaatgtacaagaccggactgcacattctaccatcccaccattaatgtcccaccacgacatgccttgaaatggattcgacctcaaaccagcgaatagcacccagtcctgcctggcagaagatcatgcagtttggaagttttcatgtactgatgaaagatactctacagaacttgtcaaatctttgaaacttggaatatattgctttcataatatgaagttttattgcctatctatctgaagtgtctaatttttcaagtttgtaagtttattatgtggttttaacattgggtgtttttgttttgtttttactatgaaaagacagcttaaggaagagctaaattctgttaaaatatttggggcatgtttgtgcactgctgttgtgaggatcagcatatgaaattgacatcatggttagtcatggtactgcagcttagggggctacacggttgctgtgtgagtggagagatgcagtgaggcagttgtcattattctaaaaattgtactactttcacttttcccaaagattatataatgttcataatccaccatgaaaacagcattggccaaaggtactgaggctgcttaaaatattcaattctgctttttaatttttaagtgaatttagtttgaaaagcatgattatacaggcctctcaggctgagtgctactttggtaaagttcccagttttcctgccttctgtgacaggatgaatgaggtgggtatggacagtggaggcagctggaatggcaagtgcagaaaataggaacagttctatacagtgctctcatttactaataacataatgccttctaaataatttttttgggaaactacattatcacaaaattatacaaatttttttacaagtatttacatactgtatctgaaaacagactttaaagtcacaagattataaatgtacatatgtattctcacattctgaaaaataacattctcagaatccacagaaaatatacttagttactactgaagataatttttgaaatgtaaaaattagatttaaatagtatattttaaatgacagaactataattacagagatcagatcagataggtaaactgcaagatagataggatgaaacttttggcctactgtattacttacagagtttttttgtgtgtggtttttaaaactgttaaggcaagaagtgtcaaatgctttagagttaaataacagatcactgatttcaaagacttggtgtatagtgttaaaaattaaagcttaaaaggtggttagaaaagtggattaatgcaaaaggggtaataaagactgcaacattctcaggaccaaattaaactgctaaaaaaaaaaaaaaagttcattgacttgcttagtcgtatactcaaatgatgataaacctacatgtgcaaaggctcacgtttaagattgtcaagccagcagtctactgttgtgttgccattgcttttccattgggagaagaaagaattaaccagtcattaaaccatttggtaagttgcactttgctgtgctgatcccacaggaaaggcttgaaacacgagaagcagcaaagacagagcacacaagtgcataaggctgttgtcttcggcttgggtgaaatgacagttcctcttcattctaaaggtttactccattgaatttaaggcatttgttcattccagtgttgagatgctttgcatctctgcagaagaaatttattttaaattgtttaaatatctggaaatacttttagctatcatttataaagatagttttgttctcagtttcactataaattatagaacaaatgggaaacaagggtttaatttagttcagccattttacaaggaaataataaaatactaaaatctga

SEQ ID NO: 405228 - DNA, 4599 bp, Homo sapiens
atgcgcgttcactccggcgcggagtgccggccggggcggggatacgccgtgtgcgcggccgggggcggaacggaggaggaggcggtggtgtcccggctgcggggtaggagtccgcggcagcctccgggtaagccaagcgccgcgcagtgctgagttcccgcacgccgcagagccatggagatcggcaccgagatcagccgcaagatccggagtgccattaaggggaaattacaagaattaggagcttatgttgatgaagaacttcctgattacattatggtgatggtggccaacaagaaaagtcaggaccaaatgacagaggatctgtccctgtttctagggaacaacacaattcgattcaccgtatggcttcatggtgtattagataaacttcgctctgttacaactgaaccctctagtctgaagtcttctgataccaacatctttgatagtaacgtgccttcaaacaagagcaatttcagtcggggagatgagaggaggcatgaagctgcagtgccaccacttgccattcctagcgcgagacctgaaaaaagagattccagagtttctacaagttcgcaggagtcaaaaaccacaaatgtcagacagacttacgatgatggagctgcaacccgactaatgtcaacagtgaaacctttgagggagccagcaccctctgaagatgtgattgatattaagccagaaccagatgatctcattgacgaagacctcaactttgtgcaggagaatcccttatctcagaaaaaacctacagtgacacttacatatggttcttctcgcccttctattgaaatttatcgaccacctgcaagtagaaatgcagatagtggtgttcatttaaacaggttgcaatttcaacagcagcagaatagtattcatgctgccaagcagcttgatatgcagagtagttgggtatatgaaacaggacgtttgtgtgaaccagaggtgcttaacagcttagaagaaacgtatagtccgttctttagaaacaactcggagaaaatgagtatggaggatgaaaactttcggaagagaaagttgcctgtggtaagttcagttgttaaagtaaaaaaattcaatcatgatggagaagaggaggaagaagatgatgattacgggtctcgaacaggaagcatctccagcagtgtgtctgtgcctgcaaagcctgaaaggagaccttctcttccaccttctaaacaagctaacaagaatctgattttgaaggctatatctgaagctcaagaatccgtaacaaaaacaactaactactctacagttccacagaaacagacacttccagttgctcccagaactcgaacttctcaagaagaattgctagcagaagtggtccagggacaaagtaggacccccagaataagtccccccattaaagaagaggaaacaaaaggagattctgtagaaaaaaatcaagctgagatgagtgaactgagtgtggcacagaaaccagaaaaacttttggagcgctgcaagtactggcctgcttgtaaaaatggggatgagtgtgcctaccatcaccccatctcaccctgcaaagccttccccaattgtaaatttgctgaaaaatgtttgtttgttcacccaaattgtaaatatgatgcaaagtgtactaaaccagattgtcccttcactcatgtgagtagaagaattccagtactgtctccaaaaccagcagttgcaccaccagcaccaccttccagtagtcagctctgccgttacttccctgcttgtaagaagatggaatgtcccttctatcatccaaaacattgtaggtttaacactcaatgtacaagaccggactgcacattctaccatcccaccattaatgtcccaccacgacatgccttgaaatggattcgacctcaaaccagcgaatagcacccagtcctgcctggcagaagatcatgcagtttggaagttttcatgtactgatgaaagatactctacagaacttgtcaaatctttgaaacttggaatatattgctttcataatatgaagttttattgcctatctatctgaagtgtctaatttttcaagtttgtaagtttattatgtggttttaacattgggtgtttttgttttgtttttactatgaaaagacagcttaaggaagagctaaattctgttaaaatatttggggcatgtttgtgcactgctgttgtgaggatcagcatatgaaattgacatcatggttagtcatggtactgcagcttagggggctacacggttgctgtgtgagtggagagatgcagtgaggcagttgtcattattctaaaaattgtactactttcacttttcccaaagattatataatgttcataatccaccatgaaaacagcattggccaaaggtactgaggctgcttaaaatattcaattctgctttttaatttttaagtgaatttagtttgaaaagcatgattatacaggcctctcaggctgagtgctactttggtaaagttcccagttttcctgccttctgtgacaggatgaatgaggtgggtatggacagtggaggcagctggaatggcaagtgcagaaaataggaacagttctatacagtgctctcatttactaataacataatgccttctaaataatttttttgggaaactacattatcacaaaattatacaaatttttttacaagtatttacatactgtatctgaaaacagactttaaagtcacaagattataaatgtacatatgtattctcacattctgaaaaataacattctcagaatccacagaaaatatacttagttactactgaagataatttttgaaatgtaaaaattagatttaaatagtatattttaaatgacagaactataattacagagatcagatcagataggtaaactgcaagatagataggatgaaacttttggcctactgtattacttacagagtttttttgtgtgtggtttttaaaactgttaaggcaagaagtgtcaaatgctttagagttaaataacagatcactgatttcaaagacttggtgtatagtgttaaaaattaaagcttaaaaggtggttagaaaagtggattaatgcaaaaggggtaataaagactgcaacattctcaggaccaaattaaactgctaaaaaaaaaaaaaaagttcattgacttgcttagtcgtatactcaaatgatgataaacctacatgtgcaaaggctcacgtttaagattgtcaagccagcagtctactgttgtgttgccattgcttttccattgggagaagaaagaattaaccagtcattaaaccatttggtaagttgcactttgctgtgctgatcccacaggaaaggcttgaaacacgagaagcagcaaagacagagcacacaagtgcataaggctgttgtcttcggcttgggtgaaatgacagttcctcttcattctaaaggtttactccattgaatttaaggcatttgttcattccagtgttgagatgctttgcatctctgcagaagaaatttattttaaattgtttaaatatctggaaatacttttagctatcatttataaagatagttttgttctcagtttcactataaattatagaacaaatgggaaacaagggtttaatttagttcagccattttacaaggaaataataaaatactaaaatctgattgttttttgctatttaatagccactgcccagacacatatttaagagtttaatctttcagttgctatggcttatgaacaagctaaggttgaccataaaacatttgttggatgacgtggtttaaaatgatcaccacaaaaagggaccacaaaaaaaggaaggaaatgagcatggttggcgattggaagcaagggtaccagagggcacagtgtgctttggcatgcattttatacataaaatgaatggaacaaaaggtgccagaagtcccaggttacacaatcaggagcttagatactgcacacaaaaataattatctgggttaaaaaagtaaacatagggcagattctatatggcctatcatgtttcttcaccttcccctcgttgctggctgatacagcgaggtggtcagctgatgactacttagtcaatatgacctttagtcgtgaaactgacagcagcagtgattaaggctgacttaatcaggttggccactttgaaggacagaaatgcagtggaaacagttttattctatgtagtttacatgcttaaggttacagagtttctacctgcactgtaatggaaatataatttctctgtagccaaaagctggcaaacttgacccagagggaaaatttaaaactgcagcaggctcaaatgtagagtatttttctttttatgggcaggttgttcagggatttttttcctcctttaatttattgactgactgtaaatacatgagtagaaacttaatagtcatgtatttcaaaatttggcttaatttaggagaatccactgatgaacaagtaccaacttacgtttcaagcttcttagccccataatcagtccttcagccacagctatttagagctttaaaactaccaggttcaatcactggttatgctttctgtgatgtaatttagtcatt

SEQ ID NO: 405229 - DNA, 2826 bp, Homo sapiens
atgcgcgttcactccggcgcggagtgccggccggggcggggatacgccgtgtgcgcggccgggggcggaacggaggaggaggcggtggtgtcccggctgcggggtaggagtccgcggcagcctccgggtaagccaagcgccgcgcagtgctgagttcccgcacgccgcagagccatggagatcggcaccgagatcagccgcaagatccggagtgccattaaggggaaattacaagaattaggagcttatgttgatgaagaacttcctgattacattatggtgatggtggccaacaagaaaagtcaggaccaaatgacagaggatctgtccctgtttctagggaacaacacaattcgattcaccgtatggcttcatggtgtattagataaacttcgctctgttacaactgaaccctctagtctgaagtcttctgataccaacatctttgatagtaacgtgccttcaaacaagagcaatttcagtcggggagatgagaggaggcatgaagctgcagtgccaccacttgccattcctagcgcgagacctgaaaaaagagattccagagtttctacaagttcgcaggagtcaaaaaccacaaatgtcagacagacttacgatgatggagctgcaacccgactaatgtcaacagtgaaacctttgagggagccagcaccctctgaagatgtgattgatattaagccagaaccagatgatctcattgacgaagacctcaactttgtgcaggagaatcccttatctcagaaaaaacctacagtgacacttacatatggttcttctcgcccttctattgaaatttatcgaccacctgcaagtagaaatgcagatagtggtgttcatttaaacaggttgcaatttcaacagcagcagaatagtattcatgctgccaagcagcttgatatgcagagtagttgggtatatgaaacaggacgtttgtgtgaaccagaggtgcttaacagcttagaagaaacgtatagtccgttctttagaaacaactcggagaaaatgagtatggaggatgaaaactttcggaagagaaagttgcctgtggtaagttcagttgttaaagtaaaaaaattcaatcatgatggagaagaggaggaagaagatgatgattacgggtctcgaacaggaagcatctccagcagtgtgtctgtgcctgcaaagcctgaaaggagaccttctcttccaccttctaaacaagctaacaagaatctgattttgaaggctatatctgaagctcaagaatccgtaacaaaaacaactaactactctacagttccacagaaacagacacttccagttgctcccagaactcgaacttctcaagaagaattgctagcagaagtggtccagggacaaagtaggacccccagaataagtccccccattaaagaagaggaaacaaaaggagattctgtagaaaaaaatcaagctgagatgagtgaactgagtgtggcacagaaaccagaaaaacttttggagcgctgcaagtactggcctgcttgtaaaaatggggatgagtgtgcctaccatcaccccatctcaccctgcaaagccttccccaattgtaaatttgctgaaaaatgtttgtttgttcacccaaattgtaaatatgatgcaaagtgtactaaaccagattgtcccttcactcatgtgagtagaagaattccagtactgtctccaaaaccagcagttgcaccaccagcaccaccttccagtagtcagctctgccgttacttccctgcttgtaagaagatggaatgtcccttctatcatccaaaacattgtaggtttaacactcaatgtacaagaccggactgcacattctaccatcccaccattaatgtcccaccacgacatgccttgaaatggattcgacctcaaaccagcgaatagcacccagtcctgcctggcagaagatcatgcagtttggaagttttcatgtactgatgaaagatactctacagaacttgtcaaatctttgaaacttggaatatattgctttcataatatgaagttttattgcctatctatctgaagtgtctaatttttcaagtttgtaagtttattatgtggttttaacattgggtgtttttgtttttaaaactgttaaggcaagaagtgtcaaatgctttagagttaaataacagatcactgatttcaaagacttggtgtatagtgttaaaaattaaagcttaaaaggtggttagaaaagtggattaatgcaaaaggggtaataaagactgcaacattctcaggaccaaattaaactgctaaaaaaaaaaaaaaagttcattgacttgcttagtcgtatactcaaatgatgataaacctacatgtgcaaaggctcacgtttaagattgtcaagccagcagtctactgttgtgttgccattgcttttccattgggagaagaaagaattaaccagtcattaaaccatttggtaagttgcactttgctgtgctgatcccacaggaaaggcttgaaacacgagaagcagcaaagacagagcacacaagtgcataaggctgttgtcttcggcttgggtgaaatgacagttcctcttcattctaaaggtttactccattgaatttaaggcatttgttcattccagtgttgagatgctttgcatctctgcagaagaaatttattttaaattgtttaaatatctggaaatacttttagctatcatttataaagatagttttgttctcagtttcactataaattatagaacaaatgggaaacaagggtttaatttagttcagccattttacaaggaaataataaaatactaaaatctga

SEQ ID NO: 405230 - DNA, 3711 bp, Homo sapiens
atgcgcgttcactccggcgcggagtgccggccggggcggggatacgccgtgtgcgcggccgggggcggaacggaggaggaggcggtggtgtcccggctgcggggtaggagtccgcggcagcctccgggtaagccaagcgccgcgcagtgctgagttcccgcacgccgcagagccatggagatcggcaccgagatcagccgcaagatccggagtgccattaaggggaaattacaagaattaggagcttatgttgatgaagaacttcctgattacattatggtgatggtggccaacaagaaaagtcaggaccaaatgacagaggatctgtccctgtttctagggaacaacacaattcgattcaccgtatggcttcatggtgtattagataaacttcgctctgttacaactgaaccctctagtctgaagtcttctgataccaacatctttgatagtaacgtgccttcaaacaagagcaatttcagtcggggagatgagaggaggcatgaagctgcagtgccaccacttgccattcctagcgcgagacctgaaaaaagagattccagagtttctacaagttcgcaggagtcaaaaaccacaaatgtcagacagacttacgatgatggagctgcaacccgactaatgtcaacagtgaaacctttgagggagccagcaccctctgaagatgtgattgatattaagccagaaccagatgatctcattgacgaagacctcaactttgtgcaggagaatcccttatctcagaaaaaacctacagtgacacttacatatggttcttctcgcccttctattgaaatttatcgaccacctgcaagtagaaatgcagatagtggtgttcatttaaacaggttgcaatttcaacagcagcagaatagtattcatgctgccaagcagcttgatatgcagagtagttgggtatatgaaacaggacgtttgtgtgaaccagaggtgcttaacagcttagaagaaacgtatagtccgttctttagaaacaactcggagaaaatgagtatggaggatgaaaactttcggaagagaaagttgcctgtggtaagttcagttgttaaagtaaaaaaattcaatcatgatggagaagaggaggaagaagatgatgattacgggtctcgaacaggaagcatctccagcagtgtgtctgtgcctgcaaagcctgaaaggagaccttctcttccaccttctaaacaagctaacaagaatctgattttgaaggctatatctgaagctcaagaatccgtaacaaaaacaactaactactctacagttccacagaaacagacacttccagttgctcccagaactcgaacttctcaagaagaattgctagcagaagtggtccagggacaaagtaggacccccagaataagtccccccattaaagaagaggaaacaaaaggagattctgtagaaaaaaatcaagctgagatgagtgaactgagtgtggcacagaaaccagaaaaacttttggagcgctgcaagtactggcctgcttgtaaaaatggggatgagtgtgcctaccatcaccccatctcaccctgcaaagccttccccaattgtaaatttgctgaaaaatgtttgtttgttcacccaaattgtaaatatgatgcaaagtgtactaaaccagattgtcccttcactcatgtgagtagaagaattccagtactgtctccaaaaccagcagttgcaccaccagcaccaccttccagtagtcagctctgccgttacttccctgcttgtaagaagatggaatgtcccttctatcatccaaaacattgtaggtttaacactcaatgtacaagaccggactgcacattctaccatcccaccattaatgtcccaccacgacatgccttgaaatggattcgacctcaaaccagcgaatagcacccagtcctgcctggcagaagatcatgcagtttggaagttttcatgtactgatgaaagatactctacagaacttgtcaaatctttgaaacttggaatatattgctttcataatatgaagttttattgcctatctatctgaagtgtctaatttttcaagtttgtaagtttattatgtggttttaacattgggtgtttttgttttgtttttactatgaaaagacagcttaaggaagagctaaattctgttaaaatatttggggcatgtttgtgcactgctgttgtgaggatcagcatatgaaattgacatcatggttagtcatggtactgcagcttagggggctacacggttgctgtgtgagtggagagatgcagtgaggcagttgtcattattctaaaaattgtactactttcacttttcccaaagattatataatgttcataatccaccatgaaaacagcattggccaaaggtactgaggctgcttaaaatattcaattctgctttttaatttttaagtgaatttagtttgaaaagcatgattatacaggcctctcaggctgagtgctactttggtaaagttcccagttttcctgccttctgtgacaggatgaatgaggtgggtatggacagtggaggcagctggaatggcaagtgcagaaaataggaacagttctatacagtgctctcatttactaataacataatgccttctaaataatttttttgggaaactacattatcacaaaattatacaaatttttttacaagtatttacatactgtatctgaaaacagactttaaagtcacaagattataaatgtacatatgtattctcacattctgaaaaataacattctcagaatccacagaaaatatacttagttactactgaagataatttttgaaatgtaaaaattagatttaaatagtatattttaaatgacagaactataattacagagatcagatcagataggtaaactgcaagatagataggatgaaacttttggcctactgtattacttacagagtttttttgtgtgtggtttttaaaactgttaaggcaagaagtgtcaaatgctttagagttaaataacagatcactgatttcaaagacttggtgtatagtgttaaaaattaaagcttaaaaggtggttagaaaagtggattaatgcaaaaggggtaataaagactgcaacattctcaggaccaaattaaactgctaaaaaaaaaaaaaaaaaaaaaaaaaaaaaaaaaaaaaaaacaaaaaaaaaaaaaaaaaaacaaaaaaaaaaaaaaaaaaaaaaacaaaaaaaaaaaccaaaccaaaaaacaaaaacacaaaaaaagacacagacaacaaaagaaaaaagaaccaaaaaaaaacaggccacgacgcgagcggccgcggcgtccccacactccaaatcacaagagaaccacgcgccccaacagcgacatcccgaccgacccgcaacacgagacgcgcactacggggccgacaaaaatactaaacagcacaacgacgccggacaccagccagacccgacgagccatgacagaatacgaccggccccacaaaacaccagccagaatgagaacatgcgcggcaaccagcgcaatacagaggaacgcaccaaagcaaacctcaaaccaaacagaccaccccgcagacggacgcaacacacccaaaaagcacagaacacacagacccaaacccacagacgcacgaacgacagccagcacacagagaaaatacgacaaccgcgcacaccccagccacggcccaa

SEQ ID NO: 405231 - DNA, 3995 bp, Homo sapiens
atgcgcgttcactccggcgcggagtgccggccggggcggggatacgccgtgtgcgcggccgggggcggaacggaggaggaggcggtggtgtcccggctgcggggtaggagtccgcggcagcctccgggtaagccaagcgccgcgcagtgctgagttcccgcacgccgcagagccatggagatcggcaccgagatcagccgcaagatccggagtgccattaaggggaaattacaagaattaggagcttatgttggcttcatggtgtattagataaacttcgctctgttacaactgaaccctctagtctgaagtcttctgataccaacatctttgatagtaacgtgccttcaaacaagagcaatttcagtcggggagatgagaggaggcatgaagctgcagtgccaccacttgccattcctagcgcgagacctgaaaaaagagattccagagtttctacaagttcgcaggagtcaaaaaccacaaatgtcagacagacttacgatgatggagctgcaacccgactaatgtcaacagtgaaacctttgagggagccagcaccctctgaagatgtgattgatattaagccagaaccagatgatctcattgacgaagacctcaactttgtgcaggagaatcccttatctcagaaaaaacctacagtgacacttacatatggttcttctcgcccttctattgaaatttatcgaccacctgcaagtagaaatgcagatagtggtgttcatttaaacaggttgcaatttcaacagcagcagaatagtattcatgctgccaagcagcttgatatgcagagtagttgggtatatgaaacaggacgtttgtgtgaaccagaggtgcttaacagcttagaagaaacgtatagtccgttctttagaaacaactcggagaaaatgagtatggaggatgaaaactttcggaagagaaagttgcctgtggtaagttcagttgttaaagtaaaaaaattcaatcatgatggagaagaggaggaagaagatgatgattacgggtctcgaacaggaagcatctccagcagtgtgtctgtgcctgcaaagcctgaaaggagaccttctcttccaccttctaaacaagctaacaagaatctgattttgaaggctatatctgaagctcaagaatccgtaacaaaaacaactaactactctacagttccacagaaacagacacttccagttgctcccagaactcgaacttctcaagaagaattgctagcagaagtggtccagggacaaagtaggacccccagaataagtccccccattaaagaagaggaaacaaaaggagattctgtagaaaaaaatcaaggaactcaacagaggcaattattatcccgactgcaaatcgacccagtaatggcagaaactctgcagatgagtcaagacacaagatcatttattctgaagaagccaaagctgtctgaggaagtagtagtggcaccaaaccaagagtcggggatgaagactgcagattcccttcgggtactttcaggacaccttatgcagacacgagatcttgtacaaccagataaacctgcaagtcccaagtttatagtgacgctggatggtgtccccagccccccaggatacatgtcagatcaagaggaggacatgtgctttgaaggaatgaaacccgtaaaccaaactgcagcctcaaacaagggactcagaggtctcctccacccacagcagttgcacttgctgagcaggcagcttgaggacccaaatggtagcttttctaacgctgagatgagtgaactgagtgtggcacagaaaccagaaaaacttttggagcgctgcaagtactggcctgcttgtaaaaatggggatgagtgtgcctaccatcaccccatctcaccctgcaaagccttccccaattgtaaatttgctgaaaaatgtttgtttgttcacccaaattgtaaatatgatgcaaagtgtactaaaccagattgtcccttcactcatgtgagtagaagaattccagtactgtctccaaaaccagcagttgcaccaccagcaccaccttccagtagtcagctctgccgttacttccctgcttgtaagaagatggaatgtcccttctatcatccaaaacattgtaggtttaacactcaatgtacaagaccggactgcacattctaccatcccaccattaatgtcccaccacgacatgccttgaaatggattcgacctcaaaccagcgaatagcacccagtcctgcctggcagaagatcatgcagtttggaagttttcatgtactgatgaaagatactctacagaacttgtcaaatctttgaaacttggaatatattgctttcataatatgaagttttattgcctatctatctgaagtgtctaatttttcaagtttgtaagtttattatgtggttttaacattgggtgtttttgttttgtttttactatgaaaagacagcttaaggaagagctaaattctgttaaaatatttggggcatgtttgtgcactgctgttgtgaggatcagcatatgaaattgacatcatggttagtcatggtactgcagcttagggggctacacggttgctgtgtgagtggagagatgcagtgaggcagttgtcattattctaaaaattgtactactttcacttttcccaaagattatataatgttcataatccaccatgaaaacagcattggccaaaggtactgaggctgcttaaaatattcaattctgctttttaatttttaagtgaatttagtttgaaaagcatgattatacaggcctctcaggctgagtgctactttggtaaagttcccagttttcctgccttctgtgacaggatgaatgaggtgggtatggacagtggaggcagctggaatggcaagtgcagaaaataggaacagttctatacagtgctctcatttactaataacataatgccttctaaataatttttttgggaaactacattatcacaaaattatacaaatttttttacaagtatttacatactgtatctgaaaacagactttaaagtcacaagattataaatgtacatatgtattctcacattctgaaaaataacattctcagaatccacagaaaatatacttagttactactgaagataatttttgaaatgtaaaaattagatttaaatagtatattttaaatgacagaactataattacagagatcagatcagataggtaaactgcaagatagataggatgaaacttttggcctactgtattacttacagagtttttttgtgtgtggtttttaaaactgttaaggcaagaagtgtcaaatgctttagagttaaataacagatcactgatttcaaagacttggtgtatagtgttaaaaattaaagcttaaaaggtggttagaaaagtggattaatgcaaaaggggtaataaagactgcaacattctcaggaccaaattaaactgctaaaaaaaaaaaaaaagttcattgacttgcttagtcgtatactcaaatgatgataaacctacatgtgcaaaggctcacgtttaagattgtcaagccagcagtctactgttgtgttgccattgcttttccattgggagaagaaagaattaaccagtcattaaaccatttggtaagttgcactttgctgtgctgatcccacaggaaaggcttgaaacacgagaagcagcaaagacagagcacacaagtgcataaggctgttgtcttcggcttgggtgaaatgacagttcctcttcattctaaaggtttactccattgaatttaaggcatttgttcattccagtgttgagatgctttgcatctctgcagaagaaatttattttaaattgtttaaatatctggaaatacttttagctatcatttataaagatagttttgttctcagtttcactataaattatagaacaaatgggaaacaagggtttaatttagttcagccattttacaaggaaataataaaatactaaaatctga

SEQ ID NO: 405232 - DNA, 3332 bp, Homo sapiens
aatagggtttactggaagaggagctatacagatggtacttagaggatgtagggccctacgtattagggcttcttagttgtagcgaagagcaattggtctggtacgtttagctttttcacatttagttttgaattctgactctagaaatgtacaaccccatcttttgaattacaggttttaagatgttatttgctcttaatacgtcttaaggtaacagccttgatcactgcttttactttcgatgaaataacttaatgagctgtgaagaaaaaattatcagattttaagggagagaattttatgaaaatgtctttgaggttcctgtcacctttatgagaatgtcttcaaagtttccatcaccacctctaccaatttttcttccaccggagccagtggacttaggttccataacaagctcctcttgttcactgaatgagctagacaatatttcccaccttttaaggaaaatatcagctgatatcaatgaaattaaaggaatgaaagcagctattttgacagtggaagcaaatctttttgatctaaatgttagagtgtccaagaatgaagcaaaaatttcatctttggaggttaaaatgaatgaatattcaacaacatatgaatgcaacagacagtttgaagatcaagaagaagatactgaatcacagtcaagaactactgatgtaaaaataatcggcttccttagaaacgttgagaaagattactatgacatggaatccatggtccatgcagacacaagatcatttattctgaagaagccaaagctgtctgaggaagtagtagtggcaccaaaccaagagtcggggatgaagactgcagattcccttcgggtactttcaggacaccttatgcagacacgagatcttgtacaaccagataaacctgcaagtcccaagtttatagtgacgctggatggtgtccccagccccccaggatacatgtcagatcaagaggaggacatgtgctttgaaggaatgaaacccgtaaaccaaactgcagcctcaaacaagggactcagaggtctcctccacccacagcagttgcacttgctgagcaggcagcttgaggacccaaatggtagcttttctaacgctgagatgagtgaactgagtgtggcacagaaaccagaaaaacttttggagcgctgcaagtactggcctgcttgtaaaaatggggatgagtgtgcctaccatcaccccatctcaccctgcaaagccttccccaattgtaaatttgctgaaaaatgtttgtttgttcacccaaattgtaaatatgatgcaaagtgtactaaaccagattgtcccttcactcatgtgagtagaagaattccagtactgtctccaaaaccagcagttgcaccaccagcaccaccttccagtagtcagctctgccgttacttccctgcttgtaagaagatggaatgtcccttctatcatccaaaacattgtaggtttaacactcaatgtacaagaccggactgcacattctaccatcccaccattaatgtcccaccacgacatgccttgaaatggattcgacctcaaaccagcgaatagcacccagtcctgcctggcagaagatcatgcagtttggaagttttcatgtactgatgaaagatactctacagaacttgtcaaatctttgaaacttggaatatattgctttcataatatgaagttttattgcctatctatctgaagtgtctaatttttcaagtttgtaagtttattatgtggttttaacattgggtgtttttgttttgtttttactatgaaaagacagcttaaggaagagctaaattctgttaaaatatttggggcatgtttgtgcactgctgttgtgaggatcagcatatgaaattgacatcatggttagtcatggtactgcagcttagggggctacacggttgctgtgtgagtggagagatgcagtgaggcagttgtcattattctaaaaattgtactactttcacttttcccaaagattatataatgttcataatccaccatgaaaacagcattggccaaaggtactgaggctgcttaaaatattcaattctgctttttaatttttaagtgaatttagtttgaaaagcatgattatacaggcctctcaggctgagtgctactttggtaaagttcccagttttcctgccttctgtgacaggatgaatgaggtgggtatggacagtggaggcagctggaatggcaagtgcagaaaataggaacagttctatacagtgctctcatttactaataacataatgccttctaaataatttttttgggaaactacattatcacaaaattatacaaatttttttacaagtatttacatactgtatctgaaaacagactttaaagtcacaagattataaatgtacatatgtattctcacattctgaaaaataacattctcagaatccacagaaaatatacttagttactactgaagataatttttgaaatgtaaaaattagatttaaatagtatattttaaatgacagaactataattacagagatcagatcagataggtaaactgcaagatagataggatgaaacttttggcctactgtattacttacagagtttttttgtgtgtggtttttaaaactgttaaggcaagaagtgtcaaatgctttagagttaaataacagatcactgatttcaaagacttggtgtatagtgttaaaaattaaagcttaaaaggtggttagaaaagtggattaatgcaaaaggggtaataaagactgcaacattctcaggaccaaattaaactgctaaaaaaaaaaaaaaagttcattgacttgcttagtcgtatactcaaatgatgataaacctacatgtgcaaaggctcacgtttaagattgtcaagccagcagtctactgttgtgttgccattgcttttccattgggagaagaaagaattaaccagtcattaaaccatttggtaagttgcactttgctgtgctgatcccacaggaaaggcttgaaacacgagaagcagcaaagacagagcacacaagtgcataaggctgttgtcttcggcttgggtgaaatgacagttcctcttcattctaaaggtttactccattgaatttaaggcatttgttcattccagtgttgagatgctttgcatctctgcagaagaaatttattttaaattgtttaaatatctggaaatacttttagctatcatttataaagatagttttgttctcagtttcactataaattatagaacaaatgggaaacaagggtttaatttagttcagccattttacaaggaaataataaaatactaaaatctga

SEQ ID NO: 405233 - DNA, 2939 bp, Homo sapiens
aatagggtttactggaagaggagctatacagatggtacttagaggatgtagggccctacgtattagggcttcttagttgtagcgaagagcaattggtctggtacgtttagctttttcacatttagttttgaattctgactctagaaatgtacaaccccatcttttgaattacaggttttaagatgttatttgctcttaatacgtcttaaggtaacagccttgatcactgcttttactttcgatgaaataacttaatgagctgtgaagaaaaaattatcagattttaagggagagaattttatgaaaatgtctttgaggttcctgtcacctttatgagaatgtcttcaaagtttccatcaccacctctaccaatttttcttccaccggagccagtggacttaggttccataacaagctcctcttgttcactgaatgagctagacaatatttcccaccttttaaggaaaatatcagctgatatcaatgaaattaaaggaatgaaagcagctattttgacagtggaagcaaatctttttgatctaaatgttagagtgtccaagaatgaagcaaaaatttcatctttggaggttaaaatgaatgaatattcaacaacatatgaatgcaacagacagtttgaagatcaagaagaagatactgaatcacagtcaagaactactgatgtaaaaataatcggcttccttagaaacgttgagaaagctgagatgagtgaactgagtgtggcacagaaaccagaaaaacttttggagcgctgcaagtactggcctgcttgtaaaaatggggatgagtgtgcctaccatcaccccatctcaccctgcaaagccttccccaattgtaaatttgctgaaaaatgtttgtttgttcacccaaattgtaaatatgatgcaaagtgtactaaaccagattgtcccttcactcatgtgagtagaagaattccagtactgtctccaaaaccagcagttgcaccaccagcaccaccttccagtagtcagctctgccgttacttccctgcttgtaagaagatggaatgtcccttctatcatccaaaacattgtaggtttaacactcaatgtacaagaccggactgcacattctaccatcccaccattaatgtcccaccacgacatgccttgaaatggattcgacctcaaaccagcgaatagcacccagtcctgcctggcagaagatcatgcagtttggaagttttcatgtactgatgaaagatactctacagaacttgtcaaatctttgaaacttggaatatattgctttcataatatgaagttttattgcctatctatctgaagtgtctaatttttcaagtttgtaagtttattatgtggttttaacattgggtgtttttgttttgtttttactatgaaaagacagcttaaggaagagctaaattctgttaaaatatttggggcatgtttgtgcactgctgttgtgaggatcagcatatgaaattgacatcatggttagtcatggtactgcagcttagggggctacacggttgctgtgtgagtggagagatgcagtgaggcagttgtcattattctaaaaattgtactactttcacttttcccaaagattatataatgttcataatccaccatgaaaacagcattggccaaaggtactgaggctgcttaaaatattcaattctgctttttaatttttaagtgaatttagtttgaaaagcatgattatacaggcctctcaggctgagtgctactttggtaaagttcccagttttcctgccttctgtgacaggatgaatgaggtgggtatggacagtggaggcagctggaatggcaagtgcagaaaataggaacagttctatacagtgctctcatttactaataacataatgccttctaaataatttttttgggaaactacattatcacaaaattatacaaatttttttacaagtatttacatactgtatctgaaaacagactttaaagtcacaagattataaatgtacatatgtattctcacattctgaaaaataacattctcagaatccacagaaaatatacttagttactactgaagataatttttgaaatgtaaaaattagatttaaatagtatattttaaatgacagaactataattacagagatcagatcagataggtaaactgcaagatagataggatgaaacttttggcctactgtattacttacagagtttttttgtgtgtggtttttaaaactgttaaggcaagaagtgtcaaatgctttagagttaaataacagatcactgatttcaaagacttggtgtatagtgttaaaaattaaagcttaaaaggtggttagaaaagtggattaatgcaaaaggggtaataaagactgcaacattctcaggaccaaattaaactgctaaaaaaaaaaaaaaagttcattgacttgcttagtcgtatactcaaatgatgataaacctacatgtgcaaaggctcacgtttaagattgtcaagccagcagtctactgttgtgttgccattgcttttccattgggagaagaaagaattaaccagtcattaaaccatttggtaagttgcactttgctgtgctgatcccacaggaaaggcttgaaacacgagaagcagcaaagacagagcacacaagtgcataaggctgttgtcttcggcttgggtgaaatgacagttcctcttcattctaaaggtttactccattgaatttaaggcatttgttcattccagtgttgagatgctttgcatctctgcagaagaaatttattttaaattgtttaaatatctggaaatacttttagctatcatttataaagatagttttgttctcagtttcactataaattatagaacaaatgggaaacaagggtttaatttagttcagccattttacaaggaaataataaaatactaaaatctga

SEQ ID NO: 405234 - DNA, 1621 bp, Homo sapiens
atgcgcgttcactccggcgcggagtgccggccggggcggggatacgccgtgtgcgcggccgggggcggaacggaggaggaggcggtggtgtcccggctgcggggtaggagtccgcggcagcctccgggtaagccaagcgccgcgcagtgctgagttcccgcacgccgcagagccatggagatcggcaccgagatcagccgcaagatccggagtgccattaaggggaaattacaagaattaggagcttatgttgatgaagaacttcctgattacattatggtgatggtggccaacaagaaaagtcaggaccaaatgacagaggatctgtccctgtttctagggaacaacacaattcgattcaccgtatggcttcatggtgtattagataaacttcgctctgttacaactgaaccctctagtctgaagtcttctgataccaacatctttgatagtaacgtgccttcaaacaagagcaatttcagtcggggagatgagaggaggcatgaagctgcagtgccaccacttgccattcctagcgcgagacctgaaaaaagagattccagagtttctacaagttcgcaggagtcaaaaaccacaaatgtcagacagacttacgatgatggagctgcaacccgactaatgtcaacagtgaaacctttgagggagccagcaccctctgaagatgtgattgatattaagccagaaccagatgatctcattgacgaagacctcaactttgtgcaggagaatcccttatctcagaaaaaacctacagtgacacttacatatggttcttctcgcccttctattgaaatttatcgaccacctgcaagtagaaatgcagatagtggtgttcatttaaacaggttgcaatttcaacagcagcagaatagtattcatgctgccaagcagcttgatatgcagagtagttgggtatatgaaacaggacgtttgtgtgaaccagaggtgcttaacagcttagaagaaacgtatagtccgttctttagaaacaactcggagaaaatgagtatggaggatgaaaactttcggaagagaaagttgcctgtggtaagttcagttgttaaagtaaaaaaattcaatcatgatggagaagaggaggaagaagatgatgattacgggtctcgaacaggaagcatctccagcagtgtgtctgtgcctgcaaagcctgaaaggagaccttctcttccaccttctaaacaagctaacaagaatctgattttgaaggctatatctgaagctcaagaatccgtaacaaaaacaactaactactctacagttccacagaaacagacacttccagttgctcccagaactcgaacttctcaagaagaattgctagcagaagtggtccagggacaaagtaggacccccagaataagtccccccattaaagaagaggaaacaaaaggagattctgtagaaaaaaatcaaggtgatctgtcctttctctctggctgctttcaagatcttctctttgtgtttgatgttctgcagtttcactacgatgtgtctaggcgtggatttccttttatttttcctgtttggtataatgtatggaagcatcccatatatttgaaataaaatgcattatgaaatacat

SEQ ID NO: 405235 - DNA, 331 bp, Homo sapiens
ataccagattttcttccccatggcttgctcctagagttcttttgtatcacatctgtatacctttttgggatttccagcatttgagatattaatcttaaattaatttggggggtttcaatcaattttagattgttcatggtaattgctagtgagcaaccaattaactctgttttattagtttcctcaatagcactatatgcagctgttgataaaataaatgtaaagttctaatttttgttttagctaaaggttgactgttagggataatatttatatttatagtatttatttatttatttattttgatacggtgtctcactctgtcgcccag

SEQ ID NO: 405236 - DNA, 198 bp, Homo sapiens
gtacaagaccggactgcacattctaccatcccaccattaatgtcccaccacgacatgccttgaaatggattcgacctcaaaccaggtaaacattcaaattcgtttttctcatgtcagttcaaattcttttttctaatttgcagtttctaaatttataagcacacaaaattggaaactagactgttactttgaattttt

SEQ ID NO: 405237 - DNA, 4110 bp, Homo sapiens
atgcgcgttcactccggcgcggagtgccggccggggcggggatacgccgtgtgcgcggccgggggcggaacggaggaggaggcggtggtgtcccggctgcggggtaggagtccgcggcagcctccgggtaagccaagcgccgcgcagtgctgagttcccgcacgccgcagagccatggagatcggcaccgagatcagccgcaagatccggagtgccattaaggggaaattacaagaattaggagcttatgttgatgaagaacttcctgattacattatggtgatggtggccaacaagaaaagtcaggaccaaatgacagaggatctgtccctgtttctagggaacaacacaattcgattcaccgtatggcttcatggtgtattagataaacttcgctctgttacaactgaaccctctagtctgaagtcttctgataccaacatctttgatagtaacgtgccttcaaacaagagcaatttcagtcggggagatgagaggaggcatgaagctgcagtgccaccacttgccattcctagcgcgagacctgaaaaaagagattccagagtttctacaagttcgcaggagtcaaaaaccacaaatgtcagacagacttacgatgatggagctgcaacccgactaatgtcaacagtgaaacctttgagggagccagcaccctctgaagatgtgattgatattaagccagaaccagatgatctcattgacgaagacctcaactttgtgcaggagaatcccttatctcagaaaaaacctacagtgacacttacatatggttcttctcgcccttctattgaaatttatcgaccacctgcaagtagaaatgcagatagtggtgttcatttaaacaggttgcaatttcaacagcagcagaatagtattcatgctgccaagcagcttgatatgcagagtagttgggtatatgaaacaggacgtttgtgtgaaccagaggtgcttaacagcttagaagaaacgtatagtccgttctttagaaacaactcggagaaaatgagtatggaggatgaaaactttcggaagagaaagttgcctgtggtaagttcagttgttaaagtaaaaaaattcaatcatgatggagaagaggaggaagaagatgatgattacgggtctcgaacaggaagcatctccagcagtgtgtctgtgcctgcaaagcctgaaaggagaccttctcttccaccttctaaacaagctaacaagaatctgattttgaaggctatatctgaagctcaagaatccgtaacaaaaacaactaactactctacagttccacagaaacagacacttccagttgctcccagaactcgaacttctcaagaagaattgctagcagaagtggtccagggacaaagtaggacccccagaataagtccccccattaaagaagaggaaacaaaaggagattctgtagaaaaaaatcaaggaactcaacagaggcaattattatcccgactgcaaatcgacccagtaatggcagaaactctgcagatgagtcaagacacaagatcatttattctgaagaagccaaagctgtctgaggaagtagtagtggcaccaaaccaagagtcggggatgaagactgcagattcccttcgggtactttcaggacaccttatgcagacacgagatcttgtacaaccagataaacctgcaagtcccaagtttatagtgacgctggatggtgtccccagccccccaggatacatgtcagatcaagaggaggacatgtgctttgaaggaatgaaacccgtaaaccaaactgcagcctcaaacaagggactcagaggtctcctccacccacagcagttgcacttgctgagcaggcagcttgaggacccaaatggtagcttttctaacgctgagatgagtgaactgagtgtggcacagaaaccagaaaaacttttggagcgctgcaagtactggcctgcttgtaaaaatggggatgagtgtgcctaccatcaccccatctcaccctgcaaagccttccccaattgtaaatttgctgaaaaatgtttgtttgttcacccaaattgtaaatatgatgcaaagtgtactaaaccagattgtcccttcactcatgtgagtagaagaattccagtactgtctccaaaaccagcagttgcaccaccagcaccaccttccagtagtcagctctgccgttacttccctgcttgtaagaagatggaatgtcccttctatcatccaaaacattgtaggtttaacactcaatgtacaagaccggactgcacattctaccatcccaccattaatgtcccaccacgacatgccttgaaatggattcgacctcaaaccagcgaatagcacccagtcctgcctggcagaagatcatgcagtttggaagttttcatgtactgatgaaagatactctacagaacttgtcaaatctttgaaacttggaatatattgctttcataatatgaagttttattgcctatctatctgaagtgtctaatttttcaagtttgtaagtttattatgtggttttaacattgggtgtttttgttttgtttttactatgaaaagacagcttaaggaagagctaaattctgttaaaatatttggggcatgtttgtgcactgctgttgtgaggatcagcatatgaaattgacatcatggttagtcatggtactgcagcttagggggctacacggttgctgtgtgagtggagagatgcagtgaggcagttgtcattattctaaaaattgtactactttcacttttcccaaagattatataatgttcataatccaccatgaaaacagcattggccaaaggtactgaggctgcttaaaatattcaattctgctttttaatttttaagtgaatttagtttgaaaagcatgattatacaggcctctcaggctgagtgctactttggtaaagttcccagttttcctgccttctgtgacaggatgaatgaggtgggtatggacagtggaggcagctggaatggcaagtgcagaaaataggaacagttctatacagtgctctcatttactaataacataatgccttctaaataatttttttgggaaactacattatcacaaaattatacaaatttttttacaagtatttacatactgtatctgaaaacagactttaaagtcacaagattataaatgtacatatgtattctcacattctgaaaaataacattctcagaatccacagaaaatatacttagttactactgaagataatttttgaaatgtaaaaattagatttaaatagtatattttaaatgacagaactataattacagagatcagatcagataggtaaactgcaagatagataggatgaaacttttggcctactgtattacttacagagtttttttgtgtgtggtttttaaaactgttaaggcaagaagtgtcaaatgctttagagttaaataacagatcactgatttcaaagacttggtgtatagtgttaaaaattaaagcttaaaaggtggttagaaaagtggattaatgcaaaaggggtaataaagactgcaacattctcaggaccaaattaaactgctaaaaaaaaaaaaaaagttcattgacttgcttagtcgtatactcaaatgatgataaacctacatgtgcaaaggctcacgtttaagattgtcaagccagcagtctactgttgtgttgccattgcttttccattgggagaagaaagaattaaccagtcattaaaccatttggtaagttgcactttgctgtgctgatcccacaggaaaggcttgaaacacgagaagcagcaaagacagagcacacaagtgcataaggctgttgtcttcggcttgggtgaaatgacagttcctcttcattctaaaggtttactccattgaatttaaggcatttgttcattccagtgttgagatgctttgcatctctgcagaagaaatttattttaaattgtttaaatatctggaaatacttttagctatcatttataaagatagttttgttctcagtttcactataaattatagaacaaatgggaaacaagggtttaatttagttcagccattttacaaggaaataataaaatactaaaatctga

SEQ ID NO: 405238 - DNA, 3750 bp, Homo sapiens
atgcgcgttcactccggcgcggagtgccggccggggcggggatacgccgtgtgcgcggccgggggcggaacggaggaggaggcggtggtgtcccggctgcggggtaggagtccgcggcagcctccgggtaagccaagcgccgcgcagtgctgagttcccgcacgccgcagagccatggagatcggcaccgagatcagccgcaagatccggagtgccattaaggggaaattacaagaattaggagcttatgttgatgaagaacttcctgattacattatggtgatggtggccaacaagaaaagtcaggaccaaatgacagaggatctgtccctgtttctagggaacaacacaattcgattcaccgtatggcttcatggtgtattagataaacttcgctctgttacaactgaaccctctagtctgaagtcttctgataccaacatctttgatagtaacgtgccttcaaacaagagcaatttcagtcggggagatgagaggaggcatgaagctgcagtgccaccacttgccattcctagcgcgagacctgaaaaaagagattccagagtttctacaagttcgcaggagtcaaaaaccacaaatgtcagacagacttacgatgatggagctgcaacccgactaatgtcaacagtgaaacctttgagggagccagcaccctctgaagatgtgattgatattaagccagaaccagatgatctcattgacgaagacctcaactttgtgcaggagaatcccttatctcagaaaaaacctacagtgacacttacatatggttcttctcgcccttctattgaaatttatcgaccacctgcaagtagaaatgcagatagtggtgttcatttaaacaggttgcaatttcaacagcagcagaatagtattcatgctgccaagcagcttgatatgcagagtagttgggtatatgaaacaggacgtttgtgtgaaccagaggtgcttaacagcttagaagaaacgtatagtccgttctttagaaacaactcggagaaaatgagtatggaggatgaaaactttcggaagagaaagttgcctgtggtaagttcagttgttaaagtaaaaaaattcaatcatgatggagaagaggaggaagaagatgatgattacgggtctcgaacaggaagcatctccagcagtgtgtctgtgcctgcaaagcctgaaaggagaccttctcttccaccttctaaacaagctaacaagaatctgattttgaaggctatatctgaagctcaagaatccgtaacaaaaacaactaactactctacagttccacagaaacagacacttccagttgctcccagaactcgaacttctcaagaagaattgctagcagaagtggtccagggacaaagtaggacccccagaataagtccccccattaaagaagaggaaacaaaaggagattctgtagaaaaaaatcaaggaactcaacagaggcaattattatcccgactgcaaatcgacccagtaatggcagaaactctgcagatgagtcaagctgagatgagtgaactgagtgtggcacagaaaccagaaaaacttttggagcgctgcaagtactggcctgcttgtaaaaatggggatgagtgtgcctaccatcaccccatctcaccctgcaaagccttccccaattgtaaatttgctgaaaaatgtttgtttgttcacccaaattgtaaatatgatgcaaagtgtactaaaccagattgtcccttcactcatgtgagtagaagaattccagtactgtctccaaaaccagcagttgcaccaccagcaccaccttccagtagtcagctctgccgttacttccctgcttgtaagaagatggaatgtcccttctatcatccaaaacattgtaggtttaacactcaatgtacaagaccggactgcacattctaccatcccaccattaatgtcccaccacgacatgccttgaaatggattcgacctcaaaccagcgaatagcacccagtcctgcctggcagaagatcatgcagtttggaagttttcatgtactgatgaaagatactctacagaacttgtcaaatctttgaaacttggaatatattgctttcataatatgaagttttattgcctatctatctgaagtgtctaatttttcaagtttgtaagtttattatgtggttttaacattgggtgtttttgttttgtttttactatgaaaagacagcttaaggaagagctaaattctgttaaaatatttggggcatgtttgtgcactgctgttgtgaggatcagcatatgaaattgacatcatggttagtcatggtactgcagcttagggggctacacggttgctgtgtgagtggagagatgcagtgaggcagttgtcattattctaaaaattgtactactttcacttttcccaaagattatataatgttcataatccaccatgaaaacagcattggccaaaggtactgaggctgcttaaaatattcaattctgctttttaatttttaagtgaatttagtttgaaaagcatgattatacaggcctctcaggctgagtgctactttggtaaagttcccagttttcctgccttctgtgacaggatgaatgaggtgggtatggacagtggaggcagctggaatggcaagtgcagaaaataggaacagttctatacagtgctctcatttactaataacataatgccttctaaataatttttttgggaaactacattatcacaaaattatacaaatttttttacaagtatttacatactgtatctgaaaacagactttaaagtcacaagattataaatgtacatatgtattctcacattctgaaaaataacattctcagaatccacagaaaatatacttagttactactgaagataatttttgaaatgtaaaaattagatttaaatagtatattttaaatgacagaactataattacagagatcagatcagataggtaaactgcaagatagataggatgaaacttttggcctactgtattacttacagagtttttttgtgtgtggtttttaaaactgttaaggcaagaagtgtcaaatgctttagagttaaataacagatcactgatttcaaagacttggtgtatagtgttaaaaattaaagcttaaaaggtggttagaaaagtggattaatgcaaaaggggtaataaagactgcaacattctcaggaccaaattaaactgctaaaaaaaaaaaaaaagttcattgacttgcttagtcgtatactcaaatgatgataaacctacatgtgcaaaggctcacgtttaagattgtcaagccagcagtctactgttgtgttgccattgcttttccattgggagaagaaagaattaaccagtcattaaaccatttggtaagttgcactttgctgtgctgatcccacaggaaaggcttgaaacacgagaagcagcaaagacagagcacacaagtgcataaggctgttgtcttcggcttgggtgaaatgacagttcctcttcattctaaaggtttactccattgaatttaaggcatttgttcattccagtgttgagatgctttgcatctctgcagaagaaatttattttaaattgtttaaatatctggaaatacttttagctatcatttataaagatagttttgttctcagtttcactataaattatagaacaaatgggaaacaagggtttaatttagttcagccattttacaaggaaataataaaatactaaaatctga
